United States Patent Application Publication US 2019/0348154 A1 - sequence listing, part 106

SEQ ID NO: 396374 - DNA, 519 bp, Salmonella enterica
atggatcgtgcatctctcatcacgctaatgcatgttgccaggcgggagttacggctggatgaagatacttacaaagatgcgctgcataccgcgacaggtaaaaccagttgtcgcgatatgacactggcggagttatcgaaagcgctggcgactttcaaaaaacgcggtttcaaagtgcgttcaaaaccacaaaacagagctttaaaacccgctaccgtcaccgctaaaatccgcgcgatatggcgtcttatgtatgctcagggttttcttgccggtgacagtgaagtagcgcttaatggctgggtgagaaagcaaacggcatcggcgaacggcggcgaaggcgtggcaaactatcagtggctggagagggaaccggcgctggcatctgatgtgctggaacgtctcaagcggtggcatcgtcgcgaaatgctccgcgctcttggtctgtctgagcgggaaaaaatcagctacgagcagacctgcaagcgcttcgctgcacgaaaggttgccacgccttaa

SEQ ID NO: 396375 - DNA, 267 bp, Salmonella enterica
atggcgaagcgcgtgaagattgacgatatctggctggtgattggcctgaccggtcaggtttatggggcaggaacggattctgccagtgcctggcgggatgcaggagacaggcttaatcagtactggaaagacctggctttatccggttcttatgccctggttgcagcgaccgcaaatgccacttatgaccccgaagagctgaaaagaagctttgagggctggaagaggatagcggcagagcgttacggtaaagacgtgacgctttaa

SEQ ID NO: 396376 - DNA, 534 bp, Salmonella enterica
gtgattgatgcaaaagtccttgagggcgtcaaagtcctcattgccacttacggtcgtctgacctgtggcgtactggccgacaagatgcggatgccgccctcttcgatggtgtattttctgcgcgatgccgtgggggccggcgtgctgaccgaatgtaacggcttttatgatgttccgcgtccccgtccgcaaccaaccggtaaaacgtcgtcggccgtcagtgaagcgccgataaggtggtgtgagtaccgtaaggtattaccctggattaaagggtacaccgttccgtcgctcgtcaaagagtttgctatgggcgtactgacctgtgaatccgtttatgtggtgatggaaatcgataaagacatgcagagtaagggcgtaccaccgtttaccctgggttatatcgatgtccggctgggtaaatttattgacggtaacactggctggaacgtgacccggcacgtggtgcgctatctggttgtggacagaacgccggttccgtctggtaacgtcaaatccggggaggtggcataa

SEQ ID NO: 396377 - DNA, 579 bp, Salmonella enterica
atggcaatgcaacggcgttatttcaaattaaatgaagcggactcggttaaatatcataaggagtaccaggaaaaaatcggtaaaccccgcaaaaaggctatccgtgattttttgagcgcgtgtaatgcggtcgggtatttgtcatataaacattttggtactgagtgtatcaatgcgctcctagtgcgcgggggtgtggattacggcagaaacaaacgtgtttccagaaaagagttcgatgacgatggtcaggtgctttttgaggtcaggccagaccgccgctacaacgaagggaagcggcttgcggctcgtctgaaagagataaacgaacagctacaggaattaccgctgttcagtgactgggcggtcagaaagctgggttgttatgcagacgcaagttacgttaaccacggacagtatttaaccacctggtctggtgctggcttttattctgagaagaaagcgctggttgtgcgtattccggtcggtgagaacggcgaaaagcccctgcctgccgatatgagtaaggcgcttattgaaattaaacactccgaatttatcgctattacggaggaataa

SEQ ID NO: 396378 - DNA, 297 bp, Salmonella enterica
atgagtaataaagcgcaggttctttttacgtttgaaatgaaaggccatactgaaacgccgcgtcatgggggggtagatgttatggatcttgtcgcggttaatgtacaaagccgagggatagatgtagatgaagaagctgatggcccgcacaccgtttatgcgcatattctgagacggaacgcaccggcaattatcagttttctgaatgatgagtttaaggaagcggtaaaggctatggggggtgaaatgcatgtacataatctcggcgagaatgttacctcaggtgatatacattaa

SEQ ID NO: 396379 - DNA, 273 bp, Salmonella enterica
atgaagtccactattacggcgtactgctgggcgtcggggttgattgagtttggcaataccctgccggaaggtgcgcttccgatcgtaaccggcaatgaaaagcaagtgcgtgatgtggtcacagtgctggctcgtcatgcatataacggcgatttgctggttccgggtattcccgaagcggccagccaggatgaaggacgtgaggcgctggtcaggttctctcgcgtggtatgcgagcgagtaaaacatcccaacaaaaggaaatttaaatga

SEQ ID NO: 396380 - DNA, 231 bp, Salmonella enterica
atgactaacctctttgattcactcaatgcggcttgtcgtcttactgagttgtccggtgccgttctgcaaaagagtaagcgctatccgcaacgttacgcattgtgtaccactccgccgcagcatgaaatgccgggcgaagttgaaattactgtctgtaacagaggtcagcgccgtcgcgttcgtgcggctcgcgtgggtggctgtacggtgtactgggaggatggtgcatga

SEQ ID NO: 396381 - DNA, 411 bp, Salmonella enterica
atgaaagcagcaataaagcgtgaaattaacgccctgaaccgtattcgtatgaatgtgttcgaggcatccgtgaataagttcgaccttattccgttcgtctatgctggcccccgtactgctgatggtcgtcgtgtggtttacatcgacgtactggcgtggtatgccgctaaaagtggtcagcctggtctgatgtatgaaaagtgcctctttcctgatgtatgggaagatttgcagctcagggctacctttcatccggggtatccccgttcggtctggaagcgcgtctggcgggattttcgctgcatcctgggtaatcacaactgggttggatttgacagttaccggcgtgaacttcttgataaagcccgccgcctggtggaatccgaattactcgcggaggctgcggtatga

SEQ ID NO: 396382 - DNA, 2079 bp, Salmonella enterica
atgtgggttgcaatgactgacttagtgtcgctttgtgggttgcctaattcccttcctggtttgcataaaaaggctaaaaaggaactttgggggaccaggtttaagccgggtgttaaagggaaggttttagagtgtaactcggagagtctacctctagccatacagagtgcattacgtgagcgctacgtgactcagttgatggtcagtgaagctccgcaggagtccgtaaagccagtcgtaagacgtcggcgcgatcctgatgcgatatcaccccttgaggcttatcgcggttcacctcagttgatggaagagcgactgaacgcgctgaccgagaatcagcgacaggttgctgatgccagggcggcgctggtgcgggaggtttttttactggaggaccaggggaatatcgggcggcttaaagcgattaattatgtcgtttcaaaggctcgctcgggtgagttacccccgcttttgcagacggcagcggtgacagccaacgccaaacgcggtagcggcagaacaatcagccgtgatccactgtatcagtgggtgttgaagtacagccaggcgcagaacgccgccgagcgactgctcttactggcccccggtaagcgggaagagatgaaggtggaggaaattagctggctggctgacttcctggctgaataccgacagtcgaacggtcgccctatgaccgaggcttacgaggattttgtggcggagtggaatcgccgacacgcggaggagccctatatgttgcagataattccctcatacgacgcgatccgccgtgtgatgaagaaattaccggaggttgtgaagcagaagggtcgggtgacgggcagcgaatatcgccagatagagggctttacgcgtcgtgactgggacgcaatgccggtgaattacgtctggattggtgacggccacggtatgaagctgaaatgtgcgcacccgatacacgggcgcccgttctcgccggaagtgacctttgtgattgatggtgccacccgttttgttgtgggctggagtctggaccttgcggaaaacgtcttcgcggtggctggtgccattcagcacggcatacgcaaccacggcaagccgtttatgtactactcggataacgggtccggtgaaaccgctgatgtgatggataaagaggtcgtcgggatactcccgcgtcttggggttagtcacccgacaggtattcccggtaatccgcaggggcgcggcattatcgaacgtctcaaccgcacattgccgatgcgtattgcccgcaagtaccgcacgtacttcggtaaaggggctgaccgcgagacgttacgtaaaacgaaccgcgatttacgatcggcttttaatgcccttcaaaaagggaaagaacttaatgcagtacagcgggcagccatgcgcgatttgccctcatgggcggaactgatagaggcgattcgcgacggcgtggagtggtacaacaaccgcccgcacagcgagttaccgatgaaggctaacggcaaacactacagcccggccgagcaccgcaaaaagcgtctggcggaagaagatacagaaattgagtggctgtctgaggtggagctgcgcgacatgttccgtccgatggtggaaaaaccggtgcgccggtgtgagatccactggctcaataacatctactacgcgccggagctgcgtgacgaacatggccgtaaagtgcttatcagctatgacattcacaatgcggagaaaattattgtgcgccgcctggatggttcctttatctgtgaggctatctggaatggcaacaaacgcgctgccttcccggtcagtgcggagtaccacaaacagcagcagcgtattaaagggatgcgtaaacgcgccgaggagaaaatccaggatgccgaggatgaaggtatcaatgttctggagcacaaacagccggagccgtgggttggcaacatataccagcctgtcggtaatgtggtgaccgttcagcaggcggagccggaagccgaagaagaatatgcaggagctaaagaagattaccgtcgcgggctggcgctgattgcggcgcgcctggaagaagacgagtga

SEQ ID NO: 396383 - DNA, 513 bp, Salmonella enterica
atgatccatgagaaagaatgggttgccacaaagtacctattaggtgtcggaggtcttccctcgacccttgcagggctccataaacgagccaaaaatgaaggttggcagaagcgctcgattacagtacccggcgtcaggggccgtacattcgcctatcgcctacaggatctacctctccacgttcaatcaatacttggagtagaaggagagcagcccataaaagtaagccaagagaaccaaaatacgtcgacgaatgagctagtaaatatcattgaagcgctaaccaaggaggagcaggcgaaaatcatccatatacttaaaaggaaaggagttgagaagttaattgatttttgtgatgaagaaaatcaagaacttatcagcttgacgggagtccgacgccttgcggcactcagcttaaaaaactggactgaggaacgaattagagagagtttcgaagaatctgagaccgaggccgatcacttcaatttaaccgacaagcaggctagtgcgtaa

SEQ ID NO: 396384 - DNA, 243 bp, Salmonella enterica
atgatgccacgacacagcgatattgaaatagcctggtatgcttcgatacagcaagagccgaatggccggaagaccgtcaccacacaacggtttgtccaggaactgagcaaggttaactggaactggacgatgaagcaggccaacgaatggatcgagtggtatgtgacaacattccgcgatgtatcaacgcaggaaggcgagaatcgtaccttccagctgttcaatccaaacggaggactatag

SEQ ID NO: 396385 - DNA, 951 bp, Salmonella enterica
atgaaggtttcggtcgttataccatcgtataaagttaaaaagcatatcataggtgttattcgtagcatcccagcctgtgtagaaaaaatctatgttgttgatgattgctgccctgatggatctggtgattatgtattatcagaaaacactgataagagagttgtggttttaaagaatgacgaaaacctcggtgtaggtggcgctgtaatgcatggttataaaaaagccatcgaggataatatggacattgtgattaaattagatggcgatggtcaaatggacccaaatttaattccaaaattcatagagccaatactcttaggtgaggctgattatactaagggtaacagattttttaacttagataatatatctcaaatgccaaaaataagactatttggtaatgcggtactatcattgatgactaaattttcatctggatattggaatttattcgatcctaccaatggttacaccgctatacataccgatgtaattaatagtcttccgcttgaaaaaatatccaaacgatatttttttgaatcagatattcttttcaggcttaatacccttcgtgcagtagtggttgatataccaatggatgctaaatatgaagatgaggtcagcaatcttaaaatttccaaaataattggggactttttatttaagcattctaggaattttataaaaagaattttttataactattacctacgagatatgtcacttgcatcattcgagttaccagtaggtgtagcaatgtttacatttggtttcatcaccggtctttttaaatggtttcagagttttgaaactgggattatcgcatcttccggtacagtaatgctcgcgggactacctatgattcttggactgcaattaattctagcattcatcggatatgatatctcaaatgtacccaatcgggtatttcacaacaggattaaataa

SEQ ID NO: 396386 - DNA, 1278 bp, Salmonella enterica
atgaatcggcaaccatttacttcatctgcacttaaacgaaatctaagtgaaagtgagaaggcttattattttaaaaaaaacaattttgctgagttagaattattaattagtgatgccgttttaattgctaatgagaattttcgttctggcgtaagcgtaaagaaattaaatattaaaggtcgctgcgtttacactgcctcatgtttgaaggaaaaaataatacttaggcattgtaacgcaaatttaaaatgccttgaatcacttcttcccaaacaaagaaatacaataattaatgagctgaaaatttatttgaaagaaggtaccccattcaaaatatatcgtttggatataagatctttctttgaatcaatcgatttaccacaactttttcagtgcttacataacgaaacacgattgtctagacatacaaaaaatttgttagaatggtatcttaagtcgtgtgagaggcttcactcttcaaaaggattacctcgagggttagaaattagccctatgttatctgaattgtacttagcacaatttgataatagtgttcatagacacccagatgtattttattattcaagattcgtagatgatatggtaatcgtttcaagtagttatgaatgtgaaacgtcctttatgaaattcatacaagatgcattacctaagggattggttttaaataaaaacaagttaaaaatctctccaagtataccaaaaagaagcaaaggtattaataagcaggataaaacgcttcatgaatttgattttctagggtactcgttttctgtaatagacacacctttgaacaaagatggtgaggttaatagctgttacagaaaggtaattgtgaatttatctaagtctcgcctaaagaaaattaaaacaagaatagccaggtctttctactcttatcatattaatggtgattttaaattactgctagacaggatttcttttttgaccagtaacagggatttaaatcggaaaataaaatcgttaagctctttggaaaaaagcaagataagcactgggatttattacagtaatgcgaaattagacgctgactctgtatccctaaaacaattagatgactttttgctatattgtgtacaatctaatactgggcgtttgaacagtgttataaaaaaaccttttaacttgaagcaaaaaaaagaactgctaagaaatagttttagaaaaggctttgtgaatagaatatatagaaagtataactttaagcgctatactgagattacaaaaatatggctataa

SEQ ID NO: 396387 - DNA, 1221 bp, Salmonella enterica
atgccgcgcactgtaacacataaaccggatagccccaataatgacgatgttttagccgcgtctgaaaagtgggatgcctgtaaacccccctataccagctcacacatgaaaatctgtgttgctgccgccaaaattatcctctcagcctccggcgtcgcccgccgttccaaatacgaaaaagaaaattatctccgcattgattttagtaaagcaggtaaggtgacattttacgctgagttccctaaaaagatggggctgaaaggtaaaaaacttggcgaatggccggaactcgcaattcaaatagccagagagaaagcatcagaaatggcagagggtgggttacgtgctgaatctgtccacgcagctttggaaatgtaccgtgaagaccttaaagcaaaagtagacaggcagaagttgagtcctgatagcttcactacctatggggtacgtatcgacagaatcaaagcaacgttcggagagcgtgaagtattcagtgatgtgacttacagtcggctggtggatgttctggatgagtggatcgcaacacgttccaataataacgcgttagagttatttggtgagcttcgtcggttctggaaattttgtgctcctacactttgcaatgggcgtaacattgccgccagtttgccagatgattatgtttcttctcgtgtgcagaaaccaaccccaacgcgactatttacggatattgaatcaatcgcccgcctttggctcaatgtggctgcctgcacctctatacaccagaaaaatgccgttagattcatgattattactggcgttcgcccgataaacattaataacttgcgctgggattacgtcaacgaggatgcagatgaaatcgtttatccagaaggcgtgatcggtatgcgcggggcgatgaaaacacaaaaggctttccgcctgccgataacgccagagatcaggcggattatcgacgagcagaaagcctggcgcgattcagttcctgaatgcaataaagattatgtgttcttgcagccgcgcgaccctatgcaagcattttcaaaacgatcactggataaactggtgaaaacatacagcccggaaggggcggtaaagggtatgaagcatgatgggacaataaaagggaaagagggggcatttaatacgatgtgccgtaaattccttaagagcaatgttattgccctgatgaaggtaaagaggttactcccgatcagatag

SEQ ID NO: 396388 - DNA, 201 bp, Salmonella enterica
atgagcgagcaacccgacgatctgctcactccggacgaggtatgccagaaactggggattacgcaaaaaacattatgtaaatggaatacagaacaccggcaccgttctacactggcccctgtaaaatttagcgctaaagtcgttcgctatgagcgccgtaacgtagaggcctttatccagaaatgtcggagccagtattaa

SEQ ID NO: 396389 - DNA, 507 bp, Salmonella enterica
gtgattgctgtttattgcgctaagctttctgagccggtagttgaagctttacctggttgggttacttcacttcttggagctgtaatcggagcaattattactggtgttattgctttttatttacaacgtaattcacatagaaatgccttggttctagaaaggaacaaaagaaagtctgagttcgtgaataaatttgtaagcgacaaggtgtttgtatttctcgatcaagagattgattttcttcaacaactatccggttcatctactattgtatacgcgaaagatttaggctttgaacatcggagttcgatggcaatgatgcaggctttagtttcagtaatagatgatggtggtgaaattaagaattcatttaatgatctgatgcaaataaaaacatcaatggagaatagtattataaacaactctggcagagataactttaaactgcttggggatgccattaaattatgtgcaaagattaaacttttgattagcaatttggactaa

SEQ ID NO: 396390 - DNA, 204 bp, Salmonella enterica
atgaaatacatttttatggtcatggacagtcgagcgcagctcgatatagacagcgccgcaatcctggaatgctgcggcgataaacaaccttcatggcgcaccctgcgcagagactggggcgatcagggtgcagttctggtccgcttccgtctggttaacagcgatatggctaccgaccccgaggttgtcggcaccatcaactga

SEQ ID NO: 396391 - DNA, 213 bp, Salmonella enterica
atggcacaaggcaacgtagaaaatttcgcaatcattgtgttagtcaacggccgcacatcacaggtcgaactaaccacatcgcaaaaacgtttgttcgcaaaattaacactcggcgcgctaaatgatagcggcccactgaaacttatgccaatcgacgacatggtccagttacaacccgacaccgaagcattttcagacggaggtccgctatga

SEQ ID NO: 396392 - DNA, 960 bp, Salmonella enterica
atggattattttcccggcagcgataataagcaattggttgaagaaggtatgccctgcaccgtcaccattggtgatgatcttgccgttaccggttatgtagatgactgggaaccagcaatttcccgatcccggcatgaagtgcgcgcaacaggtcggagtaaatgccaggacctggttgattgctccgctgagtggccaaacaacgccatcaatgaaagtaatgcactggaaatagcttccaggctcgcatcgtattacggcatcagcgtatcaactgacgtgagcgaccttgtaaaaacacctcaatttacgctcaattggggtgagtcaccacaggaagtgattgagcgtgtagcaagatggtcggctctactctactacgatcaaccagacgggaatctgctgctgactcgtgttgggatacgtcgcgcggccagcggtattgcagaaggtttgaatgttgagcaggcgtattacaggacttccatggctgaacgattttctgattatgtcggcgtatccatgggaatttcctcgattgctgggtatgcgccagatacggcatatgatgcggtgacccttgcgacggcgagagaccctgaagcagctcgaatgcgctaccgaaagcatatttctattgtggaaagtacattgatggcgtctaagcaagcgcagagtgcgattgactgggagatgaaccgtcggtatgggcgctccaaacagctttccgtgaccatagactcatggcgagataaagacgggaagctatgggaaccaaatacattactccctgtaaaccttcctacattacgccttcctgatactgaaatgcttctgtctgaggtcacttatatgcgggacgacaacggaacgcatgctcgacttacgctgatgccgcctgaagcgttcactgttcagtcatatgccttctatcagcaattagcagggtttaacacatga

SEQ ID NO: 396393 - DNA, 585 bp, Salmonella enterica
atgaaccagaatttgaaaaaagcagccgggcgaattgctgggatgctggggattgggcggatcacatctcagaaagacagtggggaaattcaacaagctcaatatcagactccattggaggttgccagtgcgcctcggatgtctgacttcggtttttcctccgggcttccggtaggtactgatgttgttattgccttcatcggcggtgatcgttcaagcccagtaatcattgcatcaaatcatcaggggtatagacgaactgggcttaatgaaggggaaacagtcttctataacaaatgggcgctggaagtgttgcttactgaaaagggtgtctttattgatgctaaagggaaagacgttgaagtaaataacgccacgaacgtaactataaatgccagcgagggaatattggcaaatactccggttttaaagtgtaccggagacattatagacaactgtgagagcaatacccgaacgctcaaagagctccgtgatgcccacaatgatcatgaccatgtagttaaaaatgttcagaagggtaacgacgacgctaccagtgagaaaacagaggagcaggttaaatga

SEQ ID NO: 396394 - DNA, 438 bp, Salmonella enterica
atgagtgattttgcctccttctggaacgtggatgaaatgattgccgactggcaggaaggcgcggggatgctatctaccgattatgaccttcaaacggtaattctaatcagtctttttaccgataggctggcgcgttctgatgatgactatggagatagcgatcgtcgtggctggtggggggacacaggtgaagatcagcagcttggctcacggctttggttgttacggagggaaaagctaacgacgaatgtggcaatcaaagctgaaacctacgcgctggaagcccttaaatggttgaaagacgacggtgttgtaaatgacgttgtccctgttgcccaaatcgttatgccaaatcgcttgaacctcactatccggtatttatctccgggacaaaactggcaggaaagcaggttctactggatatgggagaaactttaa

SEQ ID NO: 396395 - DNA, 519 bp, Salmonella enterica
atgccctttaagcgaaagactctgactgagttacgagatgaaaaccgtaattttcttcaggccgaactaaaaaacgttggtgcacttctccgttttgccaacctaaaggttgttgccgatatggatgcggggatggcccacctgcattacggctaccttgattatatggcgctgcagtccaacccgttcacggcaactggtgaatacctggctggatggatggccttaaaacgtgtctacaggaaacccgccagcgccgctaaatcaaaagatgtgaaagctgtcggggccggaaaccgcattattcccgccggaacgattttgaacaggggggatggctatcagtacacagtaacatcggaaatcaaaattcaagataccggggaagggcatggaggaattaccgctgttttgcctgatgtcacggatgatgttaccggtggtggcgctaatggcaatgcagatgcaggaacggtactcacgcttgatgtaaacatcgcagagttgaggctcaattaa

SEQ ID NO: 396396 - DNA, 423 bp, Salmonella enterica
atgtgtgatggaaatcttaatgacggtttccctgttggaactgatgggatatcacagcttgaggagtgggggtcagtgaaggcatccggtgatcagttgtctgtagccgatcatatctatccgcttcagacagacactgcgattatttttgtttgttcaccaatcaggaaaactattaattttgaaatagcaggtattaaagatgctgatagtactgtcgtcagtagtattaaagaagcattaacatccctgttttttgatgagtcgaatcctgatggttccgggaaaattgatttatccgatatcaataaaagtattagtaacgtagatggaacgaaggggtatatccttaacattccatcatcaaatattacttttaaaattggtgagattccggtcttgggtgaggttaaatttgtatga

SEQ ID NO: 396397 - DNA, 594 bp, Salmonella enterica
atgagcctgtattcccaaaatgattatgctaccgcgctcggtgcgttgttgccgactgggagagcatggccgagagcaagcaagactgtacaagctgccgttttacgggcattaggtaattcctttcaacgatctgataacgatgctgtgaatctcatcacaggtgcttttccagcgactgcaactgtcatgctatcagaatgggagagttctctgggtttgccgaatgactgctctattggtgaaataggtggcatcagtgatagacaacgctcagtcgtctctaaattaataagcaccggcggcttaaatcgagactattacattcgtgtcgcagcagcattaggttacaccataacgatcacacagtttcgtcctgcaataagtgggatgtctgtgtgcggtgatgcgttgaatggcgatgagtggccctttacctggcgaattaacgcgccgggaacaactattaaatatgcgttatctggtgcttcgtattgtggtgacccattagcatcctggggtaacaagcaacttgaatgcgcaattaataagatcgcgccatcccatctgaatcttatctttagttattcataa

SEQ ID NO: 396398 - DNA, 1146 bp, Salmonella enterica
atgctcagaatcgggcaagttgagccatctgcaacagcagacggtaaatatacagacggtagcgttgctggtggcattgcagcaacacgactccgagcggctgcttttaacgctattcaggaggagctggcgcatatcgttgaatcaaccggtacagcgcttgatgctagcgatacggctcaggttcttgttgcgcttcataaaatttttgcaggaaatagtgatgccttagggggcctggctgctcttacaggtgcggctaacaaactcccttatttcactggatctaaagctgcggaattagctgatcttaccgcttttgcccgcgaaatcctggcgcaaaccgacgccgctggcgttctcacaaagcttggaatctcagatgaaattgccagagccgcagcagcaatcgtgcattctggtgatcctgtaacagatttaaataatgcgcctaaaaacagttcatcttttgcgtatggctccgctgcaaactcccccggattcaacgccacagttcttaccgtaagcagcctgaatgatactttcgatatgcaaattgccattgggtacaacccggtaaaggtcgcgtttcgcgcccagaacggggacacatcagcatggcaatcctggttagttttaggggctgcggcatcaaagggggtaggtaaatcagccgggaacctgattcaggttgagggtggctcattctatgcaaatgctgaaacggtcagtaacagtaatctgaacagtgaccagtatggttctaaattcattttgcagggtggcggctcaggtaatgacctctttggtggttacggagcaggaattatcgcggggtatgacatctctaccaaaattaactctgcggtatttgtccggtctgatggctctattacgtcagggttcagaaacaatggtacatggactgttgtgtataaccccagcgggttccggcgcggtgctatcacatccattgcaacaccaggtggtagtggtggagagtcaaaatcttatgacgcccctggtggttcattcctgtgtgggctaaccaatctgagtaatgatacctacatcacaatttcagcaatacgcgtggcgccgatgcaggtgagactgaatggcaattgggtaacaattgatggataa

SEQ ID NO: 396399 - DNA, 303 bp, Salmonella enterica
atgctgacgttaaaaaatctgactcgttacacaccagaaacatacatttcaggagtcatttaccttcgtgatgatgaaggcaatgactggtacgaatcacaaaagttattcagagaagatacctggaaaattgtatatggggatgacggtattatttgttcgtgcgcaaaggatgtatcaatgctgtacccggttgatatgtcagtgactgaagttgaagctttacctgctggttttgacgctgatttaacctggcgatttgatggtacctcaatcgtgaaaatcccacagcaaagtgtataa

SEQ ID NO: 396400 - DNA, 288 bp, Salmonella enterica
atgagcggaaagacagttgaagttacctgcaagtgctgcccagacaaatttatggctcgtgtttctgacaggaaaagaggatgggcacagttttgcagtaagtcatgtgctgcattctggaaacaatacggccgccgtcgtgggcatcaatccatagagatgcgagaggccgcaattgacagaaattcaattgaacggctgcaacgagaaaatcatgtgagccaaccatctcgcggtttcgtttacgtgggtggatttgggccttgggatgatcataaggactgctga

SEQ ID NO: 396401 - DNA, 1062 bp, Salmonella enterica
atgataccagaagcctactacaacgaaatcgaccaatttgcagctcaatggctgcgtaaccttatcgccggcggtcatatcgcaccaggcgaagttgacgaacggagtattgaagatgtcacacctgacgatctcagaggttttacccaatgccactttttcgccggaattggcgtctggtcccattccctccgcctcgcaggatggcctgacgataaaccagtctggacaggctcctgcccgtgccagcctttcagcgcggcaggcaaaggagatgggtttgctgacgagcggcacctttggccccacttcttccacctcatcagcgagcgcagacctcagcatgtctttggcgaacaggttgcaagcggtaacgcaaacacatggttcgaccttgtacaagcagacctggaaggaatggactacgccttcgggattgtgccgtttacgtcagcgggcatcggtgcgccgcacatcagagagcgggcctactgggtggcccacgccagtagcgaatacgaatccgcagccagagacaaagcgcggattgcaacatgtctccggagtggttcgcttgacgggctggcaaacgccggtggcgaacgattcaacgggttcaactcactgctacagcgggaaaaatcaggatgggtcaccgaaagtctgcctgaaactaccgggctcggttctgcttgcgggatgggtgacgccaacaactcgcgactggaaagacacttctggaatgacagcgcagcgggatgggaaagagcggctggatcagttgcctcgtcaggcttatacagcaggccccttgaggttaacggtttttggcgagatgcggactggctcttttgtcgagatgggcaatggcgtccagttgaatccggcacattcccgctggttgcaaggtttgccaaaagcctgggacacggcaagtcctcattacgagcaatggcaggccgcaaccgcacaggccgacttaagggttacagtaacgccataaacgcacaggcggcggctgaattcatacgtgcttatatgggggttagctatggccggtga

SEQ ID NO: 396402 - DNA, 972 bp, Salmonella enterica
atggctctttttatacctgctgcgctcaggtatggtgtagggcttgatttttttaattatgtagacatattcaatagacctgattattataaaggtgatattgaaataggattttatttaattgtaaaatctttgtctattcttggatttggttaccaatctttatttgttctttgttctgctctaactatttttttctttattttatcaatagataaaagttcagtatgggcgtcatcactagttttcatatgtacactttacctttcatcttattgcttattaaggcagattttagctgtagctatactgatgtatagttgtagattatggatatatgacaaaaaaataaaatctattatatttattttacttgcttgttccatgcactactccgcagtattgtttataccaattgtaatagtatcaagcatattcaaacttactacttatcgcgcattatttataatgttttttattaccatgtttgtttttgctctgcatggcgttgatttaatatttaacaataagatatttttaaactcaaaatatggatcatatgtttcatctagctttaataaagaaactgatattggttcaggtattggagtcatcattcaaatgatgatgccaatatcagtagctataatgtcaaataaaatattagctttaaacaaaaaaaacaacattgtgatatttacaacgattgctttttttgcttcttaccttcttgctactcaagtatatatatttggtagaatggctgatgtgttttctttctcattgatttttgcggctcctcttcttcttaaatcagcgagaagtaaattatcaaaaatagctttcataggaataattattctttatgtacctttaatgcaggcaacaataaaaaataataattataatgataacgaattgtcaggatctggtcttggaatatctccttacaaaactgtttttgataaatag

SEQ ID NO: 396403 - DNA, 2265 bp, Salmonella enterica
atgacggtctcaaccgaggttgaccacaacgactacacagggaacggggttacagcttcattcccatataccttccgaatttttaagaagtctgatctggttgtgcaggttgttgacctgaacgaaaacatcacagatctgattcttgatactgattacacggttactggagctggtggatacactggcggtaatgtaatactgtcaacggcactgaaaaacggataccaaatttccatttcgcgtgagcttccggtgacgcaggaaaccgatctcaggaaccagggtaagttctttgctgaggttcatgaggatgttttcgataaacttactatgctgatccagcaggtgagaagtttgttttctatggcgttgcgtaatccgtcttttgtggctaattactatgatgctcttggcaactacatcagaaacctgcgtgatccttcgcgccctcaggatgcagcgactaaaaattatgtagatagccttgccaatacaaatctaagtcgtacgctaagaactcctgagccaataacttctttacctgatattgagaatagaaaaaataaaattgtagcaatggatagttctggaaacccaattatggttcttcctgagtctggctctgcttcggatgtaatgatacaactggcagcaagtgatggactaaaattaattggaaattgtccatccatttctaacttacgaagtatcgaaccaacaaatacacagcaaagaatatttgttttagagcatacattaggatctggtactggaggtggttacttttattacgacaatactgattcaacaactattgatgatgacggcgtaacaatagttacatctggtggtaatagatggaagagagagtgcaatgatgtagttcctgagtttttcggagcaaaaagaaatggtatagatgatgatactcacgctatagaatctgcgctgtcagcatcaaaaaaatattcacttccattaaatctttctggtccaacaatgcttgcctcgggtgtcatatatgtacccgagggaactaacggcatttattctatttctggtgctaaagttataatggctggaaattacagcaacccaagagcaaatagcattcttgcaccaggaagagggggggcatttggtgataatgatgtttttagaagattttatgaattcactatcacttccgtcccaacaactggcactcaaaaaagaccacaaggattagcgtatgatttctccaatggaaaattcatagttggatatgatattggtggtgttaatggacaagtatttagatatgaaagagacggtagcgttgacaactcatatggtcaggttacactgccattaaaacatgcaagttccgctgcgtggcgtaaattagatggtagagtatatgtaagctctggtggttcagaatttgatgctgaagtttacatccttgctactgatggaaagtcaattacagaaacatgggatttaactcagtacggcatgggagcaactatcagcatcgataatgatcatgatttgcttgttcttgcaactgggaaagtaggttcaccaaatgaatttttctcaattattgatattaattccaagcaactaattagctcctttgagtatccggcggcttcatttagtggtaatcctcaaggaatggttgcacatagtggatttattcattttctttccgataatggtatatatgtattcaaatatactggagagttagttgatttttggagcgttgtttttgatgaagaagcacagggtatggcattaatgaatgattcggctgtgccagctatagcaatgctaagagaagaggatactacaagcgttcctcacattctaacccttagaaaccctgaagctgtaaccaactttaaatctgtcggtgcaggaagcgcttatggaagcaactcttcacaagtaaaccctgttggaatggatctgtgcagtttcactttcaaggcaggcgagctatctacatcatatggaagcagtgtgtttggaactccagttattgatatatcagttccttgtatcagaataccaataaagaaaaactggtacactaaaactcacgtaatagctagccctacggtcgatacaatatattcatatatggcggttttggatggtgtaacttcagttgttataaaagttaaagattcatctggaacagtcataaaccccgcgacattaagctatgccgcttttgatataatgcttgctggaactcagaggatataa

SEQ ID NO: 396404 - DNA, 825 bp, Salmonella enterica
ttgctggcgcatgagttccgactcaacaacccaaatggcggttctgacggctggctgacggaagaggcgctgtggctggtcagcaagaacgctgccgatgcggtgcgcggctggctgctgcgccagggtattgacgccgtaccgcagcataacgtgcgactgttcgatgagatgcaggcacaccagttgctcattccctgtgaggataaagccatctggcattgccggattgaggccagcggtggctggagcagtgaactctcgctgttacgcttttccccttcactgatttgggaagatccacagcagcggcccgccaccttcggtggaaccgtcacaccgatagcggggatccgaaatgagacagaagcggtgattgaaacaaacaccgaagtagaacaaccatcccccctacccgaacaggacgatacaccactttcaggcgaagccttctggcagtggctgacccaaaacgtccaggcgcaacacctggaaatcaacgaacccaatgcccggatccacaccgtcaccggaaccgcatttctggtgactccgggcatttttaagctctggcttagcgcctgtggcagggatatcccggcagaacgctggcgggaggtacagaaagcgtttcaggacctgaatctgcaccgcaaacgcaaaaacggcctcaacatctggaactgcgccgttgtcggcccgcgccgctcctcgcgtttaaaggtgtatctgcttaacgatcccacgctgctgtttggcgatgacgtcccctttaataacccccatctcttgctgaatgaaggagagaatgaccatgacctttga

SEQ ID NO: 396405 - DNA, 246 bp, Salmonella enterica
atggtttcaggacttgaagatctgcttacggtgccagccaacgtattgttcagtgggccacagcgatgtgtcatgaggaagatgcaacagttggccgttcctttgccagaacaggctaaacagtataaacattggaatgtgttacgcaaaaaattacgtaaaataactataaatcgtaacacatcttacgtaaaatatcacgtcaccaaactaactcgatgtttatacggattactgtatggctag

SEQ ID NO: 396406 - DNA, 597 bp, Salmonella enterica
atggttgttgttaataactatttgaatgaaatttctagtgactatagtagtatttttatgactgcgttagtgaatactgcggaaaccattaactttggtgagaatgataatggattgtttattgatgatttcatttcaatcgaaaaggttaatttaatcttggctgctactttctttggggataattaccttgtaagtgacagtttttttcatggaattatacataaaaagaaattggattactttactataatctcattgctattctattttagaaatagaagatcattccagaagttgaaatgcataatagaggataagataaaggaactattaattcctaatatggatttactgcagtcatcggaaaaggctcatttatttttggatgttatgtcatgtccatttgtatcaatagatacaaggcgctttttatatagaaaatatctcaaaaactttgagccaaacctgaacagaagtcatctggagattgagaatgatttacaatccctgcttcaaatatattggtttgtcaagtgggatgagttagatattgtgaaaatgatcgagaaaaaagaattgaaagaaagctattaa

SEQ ID NO: 396407 - DNA, 1206 bp, Salmonella enterica
atgataacttataacacaattgtttacatagctttaatatttattatatcttcattttttgtatctagattgtttcatggttacatatcacaagaattggttaaagatcataaatttaaagaaattgatggattgagaggggttgctgctataggtgtttttattcatcattcattctatgtatatgaacaaagtataagcggagattggaatatctatcgtggagggcatggggaagtcgttaataccttgtataatattataattaatgctggccctgttgcagtggctatattttttatgataactggttttttattttttgataaattaattagtagtaaaggaagtttatctccaagggaattttttatcaagagaatatatcgaatcgcgcccatgtattactttgctgttgctgctgcattcttggcttcaagtgtttatgggttaagcagggttgatgatatatggggttatctttcattgaggttaggatggttcacattcaacttgtttccatacgaaggatttactgatcatgttaaatatgggcggataaccgcgggtgtattctggactcttgctatagaatggaagttctatttaatacttccattgctgacggtgttttgtgggggcttgatatctgcttctgtatttgtacttgtatcaacgttgtttataacatatttgttttgttttggagttataaacccacatgactcttctcttttgctgtgttttatggcagggatgttttcggcgtgcttaagaaattataacaatagtactgtgagtaatatattgaaatcgtggattgtgggtgttttttctgtgtatctaatttgcatagctataattaaatatcctgatgtatacaatccatatgttattgtttattactttctgttctttatttgtgtttcaaatggcaatacgctattgggagttatgcgtttcactccgctaagatttatcggattgataagttatagcatatatttgatgcatggaataatcttgaatctttctgttcattttatgggtaattcatttggctataagtcaatggtttttacggctataccaattaccatatttatctgcacgacaacatacatttttattgagaggaaatttagttacgcgtccaagtccaatatggtgactcgtattacagcgagtaaaattcatgaacaatga

SEQ ID NO: 396408 - DNA, 660 bp, Salmonella enterica
atggtattctcatttgcactgtacaatttattcttattattttgctacttggtgtttttctctgagtacgagtgcgtaagactggcatcttttgagagatactctgcgacatattcttatgcattatttttcatggcttcagccattttaataagctctttaccagaaaagaaaatagcgtcgctaatttacagtgtggtaattatcgtatcaatattttatctttcgccagaaaaaatgcttaaggacattcaaaaaatagttcctggagaatataactatcagcggagaatgaatgttgaacggctcgttgctgaactcaaggggtacatgaaggaaggggacacctcctactttatatatcagaactctaatgggtttgagaattttgtatatagttacttacaactaccctttaaaacatcacgagactgttggacaataggaaactcatatggaaacgatgatatttatacatgcaatcgtaacatatccgaggttgccagtggctataaatatctaaccatatataaagctgatgataatttttggaatgataacaaaaaattcttatctgaagggagttcagccatggaaagtggaaattataaaatagaaattactgatggaaagttttatttaaaaaacattactcagtaa

SEQ ID NO: 396409 - DNA, 216 bp, Salmonella enterica
atgccagttcatggcgatctggcggaatgtctgtccgtttttctttttctgttgcgcgatttttttgtcaacggagggatcgacccccgcacgcattttactgcgtgccgcattgcggagctggcgtgccgtaagcagggaaacatccgggtaaggaccaaaggccagcttcttctctttcccgtcaatgcggtacttcatataccagagttttga

SEQ ID NO: 396410 - DNA, 339 bp, Salmonella enterica
atgtaccaacgtcttatttcacagttagaccatcggcaggatgcgattgaaattacggtgtccattattgatgttaatgctgaagatcttggcgcattaggtattgattgggctgcaaacgctgatatagggggaatgaacttacagcttaataccaatttatccagcggcagtggctatgcgacttcagtgatcactaatgcgagcgattttatggtcagagtcaatgcactggagcaaaaatcccaggcaaaggtgttatcccaaccttcggtggtgacgttgaacaacgtacaggctgtattggcatcacggtcacgaacaaccactgcattttga

SEQ ID NO: 396411 - DNA, 618 bp, Salmonella enterica
atggggtcacgcttcgatttcgttgagcgtaacaatgatattgttatgcaatatcgcaaacaagatgtcattaaactctcgctacctgcatcattaagcggggagatatcaaagcaggtaccattgacagcatcggttgatacaaaaaatgggcttgatcatattcaatgggacccatcatcatccctgctgaaagccaatggatctgttacacagggtagcgacgcgacacatttcactgtcacgttacctcctgtcgcagggcagtatacccttaagggcatcgcttatgatcgccacaacaatgcctcaaatagcgcacaaactcaatttacagttattgaatcgagtgcaggaaacccacaaataacctttaaaacaccagaaacagcctggaccgatcgcgctgaacctcttagtgtgattgttaccgattccacgggtaatccagcaccgggcacttctatcacattctccaccaccagcggaatctgcggcggtagcgattgttcctttagcaaaaccgaagttacggcaaaagatgagagtggcatagctatcgcctcaacaacattatctgacactacagatgggccggtaagtgctggtggatcataa

SEQ ID NO: 396412 - DNA, 399 bp, Salmonella enterica
atggattacgtatataaaataaaatttttaaattcttctttggtcggtcgtgagctgctactgcgagaaggtatatttagtattgggacaggtgattgtgatgtctggctggctttatctgagagtgaagaaaaacagatagaatttgatatcagcagtcaggggattagtttaacgaagaccactaaactctggcgtaacggcattgaggggattgctcttgcgggtgagcttttacctttacaggctactcttgatatagcgggtatacagtttgcccttggggagatggatagttgtctggattcattgatagctgtcacccgcaagaatagtactatatcatcaaatcacaataatacggtcatctacacgttgaatgctcaacattggcaataa

SEQ ID NO: 396413 - DNA, 207 bp, Salmonella enterica
gtggttcgtactgtatcgctgatgcctgaaccattgagaaatagcttttttcacatcctgcttgtgcgcattgtcgcggtaattagcctgaaacgagcgctgacaaatacggcagtggtgttgtggctctccggtttttacgaaggcatgcttgtgcacgggttctatttgctgaaaatagcgacaatggatattattttcggctaa

SEQ ID NO: 396414 - DNA, 132 bp, Salmonella enterica
atgactcacctcgaaaaaaccgagcattcagcggtgattattcgaatagttttttattatgtaatcatgttaaatatgataacggtgtttatgtccactttcagtggttcgtactgtatcgctgatgcctga

SEQ ID NO: 396415 - DNA, 204 bp, Salmonella enterica
atgattgaaggatatgtagtatataatagtatttttcttcttgccttactatttggctttatgaagaattactgtcttcggaaatattttttattatgcttattccttgtcttatgggttccacttgccactcgttatggcattggtcgtgactattttagctatgttgatatttataaaaatgtgttagttaccagacaatag

SEQ ID NO: 396416 - DNA, 276 bp, Salmonella enterica
atgccagttcatggcgatctggcggaatgtctgtccgtttttctttttctgtcgttgggctggataatcgccctctggaacgctggtttttacgtcctctggtttcccttttatgaagataaaaatggcctgaacaccgggcatattccgcctgggcaagccatcctgctcccagatattccgggcttgctttaccccgaacatccgttattttcagccatctttcgccatcatgcagcagacagaattgaaccgttccccttatgcggccaataa

SEQ ID NO: 396417 - DNA, 240 bp, Salmonella enterica
atgcaacagggtgcatgcgcatttcttttttttacccgcctgaactccagttccttattggtaataaaaagcattagcgaatcatcttcatactacttccgtcatctgaaggtctggtttgcgttggctttgaatattttgtctctgaataaccttgttctctgcgcagagttagcggtcaaccatagaggtggagctttatcactgttcatcctggtgatgcggggcaggatgcattga

SEQ ID NO: 396418 - DNA, 258 bp, Salmonella enterica
atggggtcaggtgggaccaccgcgctacggccgccaggcaaattctgttgccggaaacgaatcttttacaccgatgctgcgttggctgcattcgcaaagtcagtcacatacttcagtatgctccttcctttccttcatttgccgccttgcctcagcgtaacatctttcgttcccgaaaatctggtatctaagctgaaaattctctcagtccgccaaaacagcttcggcgttgtaaggttaagcctcacggttcattag

SEQ ID NO: 396419 - DNA, 1152 bp, Salmonella enterica
atgaagcgtaataagatattaattgtaggtgctggcctttcaggcgcagtaattgcacgccagttagctgagcagggacatatagtcaatattattgaacaacgttcacacatcggaggtaacgcttatgatgcccgcgatgagcaaacgggtatcatggtgcacgtttatggtcctcatatttttcatactgataatgaaacagtatgggattatgtgaataaatatgccgagatgatgccttatattaataaggttaaagccactgtaaacggtcaggtattttctctacccattaatcttcataccataaatcaattttttggtgtcgcctgctcacctgatgacgccaggaaattactgcttcaaaaatgtgatcgcaccattctggaaccacagaattttgaacaacaggccttgcgtttcattggtgaagagttatatgaagccttttttaaaggttataccattaaacaatggggacttcatccttccgcgttacctgcttctgtattgaaacgtatccctgttcgctttaattatgatgataactatttcaatcataagtttcagggaataccaaaatttggttatacacaaatggtcaagtccattgtcgaacacgaaaatatcactgttgaactatgtcgctccttcgctcaggaaatgcggacagattatgatcatgtttttttcagtggtgcgctggatgccttttactcctgtcaatatggccgactggaatatcgtacattagactttaaaaaaatcctttgccagcaggattatcaaggatgtgcagtaatgaattattgttcaatagatattccttatactcgaattactgagcacaaatatttttctccgtgggagaaacatgaagcttcaatatgttatcaagaatatagccgggaatgtgaagctgatgatataccttactatcctgtccgcagagcggataaaatggatttgctgaataaatatctatcgcgtgctaaaaaagaaaaaaatattactttcattggtcgtcttggcacttatcgttatctcgatatggacatcacgatagctgaagcattacagacggcggacgtatacttaacgtcgctacatgaacaaaaagaaatgccagcttttacagtttctgtttga

SEQ ID NO: 396420 - DNA, 1983 bp, Salmonella enterica
atgtattttcagattcgaggtataatactttggccacgaaataaaaattttaaaccacgcacgattcattttgaactaggaaaagttaatgttatcagcggtgcctcacgcactggaaaatcagctgttattcccatcattgattattgcctaggagccagcacctgttcgatcccagtaaatacgatccgtaaacattgtgaatggtttggaatcgtagtggccactgagcaaggagaaaaacttctagcgcgaaaggaaccgggaaaccaacgtagcaccaatgatatgtacttactagaggctgagaagattacttcaatccccagccgcctagaaaaaaatactaacgtgatggcagtaaagagacagcttgatgagttggctaatctttcgaatcttgacttttccggtggtgatgaaaattcagggtttgatggccgaccagcttttcgtgatttagctgcctttacatttcaaccgcaaaatgtagttgctaatcccgatgtattatttttcaaaactaacacttatgagcatagggaaaagttacgaaaaatatttccttatgttctgggagcaataacatctgtactaatggcgaagcaatttgaattaaatagaactcgccaaattttacgccgcaaagagcgggaacttaagaatgctcaagatgtttcagcacaatggtttgctgatttaaaatcgaagtatagcgaagcccaagaacttgggttagttcctgggtcacaggagtatctatccagagagcaaatgatcgggaaacttgaagaggttatttcacaaacagatataactttgatggtgaccgtatcgacaatttcagatgctttaaccgaattgaataacctagacagcgaagaacgcttaatttcgcgtgaacttactacaatgcgtcaccgccttgaagaaatgaaccggctacagattggacttcagcattatgatgatgccctcataatgcaacgagaccgacttaaactctcgggttggttaataagtaatgcaagtgatgagtcagattgccctatgtgcggtagtcataccgattctgccaaacaaaagctgcaagttcttgtccaacggctgacagatgtagaggctgccgtaggggttaataagcataaagaaattccagctgcgtttgatagagaattgcaacgcgttactactgatgtaactaacgcgaccgaacgtctgagatctatccagatacgtaagcgagccttaacaagcagatcgaaggaggcgcgtgagcaacaattttctacgaaacgtactgagcgtttcatcgggaatatagaatcttcgctggagctgcatcgaaaactcggcaatgacagtgaacttgtagaagaagtacgccagctcaacgaaacagtgaaaaatttggaaaaagagctacgtgaaaaggatattgagtcacgaaagaaccaagcactaaggattattaacactaaagcaggtaatatcctccaggggttagacgttgaagatccaaacgcccctatctctctagaaattaatgatctcacaataaaagtgttaggtgatgagcgtgatgattatctttcggaaataggaagtgggtcaaattggctctcctatcatttagcagtgttactctccctacatcaattttatctaagcaaaaatagtaacccagtgcctagttttcttatccttgatcaaccaagtcaggtatattttccgaaatctactcagcttcaaaacatagctaatgaagatgaccctaaacttcgtgacgaagatgttgaagctgtaagaagggcatttaaagcaatgggaagtgtggtgatccaagagaaagggaaacttcagctgatcgttttggatcatgcacctcgtgaagtctggggagatattgatggtgttgttggattgccagagtggcgtgatggaattaaattagttccaatggaatggctgactgacgtttaa

SEQ ID NO: 396421 - DNA, 495 bp, Salmonella enterica
atgctggcaagagaagtccaaaatgttcaaaaccctgcgcttggtgctgcacttctatggcggttttgttgcggttatgtcgaaactcatcgcgtaagttctccccctcctcttccatttctcttcctagtacttcctattgttctgcatcaagagactgctgactttgtgaggcgtacctataagagttcgggactacgggcttttgcagcaaagtttggtgattcatcagtatctaagcaggatttactgtttcaaattcatgaacgttcaattcgttggcggcagctcagcttgcaatcaattgaacttgcagtcgcgggtaatatactcaagttgcaggatgatactaatgtaatccccctatcaagaacaaaggcgaaaggattatcgcaagaaataaagacactaatggatttagcagaaaagttaggtggttggtttggagagctatcagttcatgaggtcgtgacaactttaaaggtgaaactctaa

SEQ ID NO: 396422 - DNA, 1224 bp, Salmonella enterica
atggctggtggaaagaacaaattaagcgattcatcgttgcgtaagatggtaggcagggaaagccccgcagataatttttacgccgatggcgacggcctgagcgtcaaggtgtcgaaggctggcgtaatgacctggtattttactttccgtattggtggccggactaatgcgccgcagcggataaagctgggtaactatcccgatctttccctgaaagcagcacgcgaaaagcgcgagcagtgccgcgcatggctggcagaggataagaacccaaaacaccagctaaatattactacgcaggaatcattaaagcccgtcacagtaaaagaggctatggagtattggatcagcgaatacgcatcacgtaaacgcgctaatgttgagaagcacaccgagcagttaaaaaagcatatctacccctacattggagattacccgctagctatgtgtgaaacgcgccactggctggaatgttttagccgggtacgaaagagagcgccggtagcggcgggctatcttctacagatgtgtaagcaggcgttgaaattctgccgtgtacatcggtacgcgataagcaatgcattaaacgacctcgctattgatgatgtagggaaaaaacaggagaaacgcgacagggagcatacaaggcaggaactggccgacatatggcgggaaagcacagggctaaaattcaaaccgtactacgccacgctattacatttactcgttgtgtttggctgccgaacgcaagagctacgactttcccggatcagtgaatgggatttagaagaatggatctggacggtgccaaaggagcacagtaagcgcggggtaaaaatacagcgaccagtgcctacagctatccggccttatatcacggcactgattgaacggaacaaaaaaagcggcctgttactggccgagatcaaaaggccggaggcggtcagtcagtggggcagggggctttataaacgtcttgggcattccagcccctggacgcttcacgacttgcggcgaacattcgccaccacgctaaacaatatggggatagccccgcatgtagtagagcagctattaggccacacgttgggcggtgttatggccgtttacaaccgtagccagtacctacccgaaaaactcgacgcgctgaataaatggatggaacgcatagagattatttctgatgaaaattcaaatgtagctattttaagggaggttaaatga

SEQ ID NO: 396423 - DNA, 717 bp, Salmonella enterica
atgaaattacctcaaagagagttttacaaattagatgaagtggcggcaattttggattgtagcttttctgatgttctatattattgttctgttgatgttcttcatgcgtatacttatatcgataaagaagataaatatgagtttttatttcaaattaatatgcatagagatatacgtaaaaaaattgattgcttcaaattattatgttgtggtgattggtgtgcttacggcgtagagtttaatgaaagaactgataaattgcctgtaaatggaatgtacgcaaaagcagtaaaaggtgttttttttattgatggttataatttagaacccttggtctttagtggagaagatagttttaaaatcgattgctttacagatgttcatagagagataacagagaatgaaattgatttcaattgcttagatttctgtttgactataaaaacagattcattaaggataaaaagcaacgaagttaatgaccttaaattaaaacgcatggatgaatctgataaaacaacagcaaaaaaagctgagatcatttcctgcttaattaaattaattcctgaaatgagcgatattaatctagacactacaccagtagcaaaaattgcctcattgatcgaagctgtagcagcaacaagagcagttgagtttccaaaaactgatattggtacgtggtcaaaatatcttgggagagggaggcacaaaaagtga

SEQ ID NO: 396424 - DNA, 219 bp, Salmonella enterica
atgaacaaacttgaacaaccatttgcagatcgcactatccgcgagcctgaatgccgccagattaccgggttgtgtcgttcaacccgctacatgatggaaaaagaagggacattccccgtacgccgcaagcttggaggccgcgccgttggctggcttctgtcagaggtaatagcttggcagcatagccgcagcaagcagacaccgaaacaggcggggtaa

SEQ ID NO: 396425 - DNA, 168 bp, Salmonella enterica
atgtcacataaaacaaaggcgaccccgaaggatcgccagtgcggtaacactaaacccgtacaggataactacatgagcaccatttctgcaatgtgcgcaggtaaagaaaaagcgttgcacttaacgatctgcaataagtacgttgggggcagccatgcggggaaataa

SEQ ID NO: 396426 - DNA, 141 bp, Salmonella enterica
atgaaatatcgcaatttctcacaattccattataaagcccctgcattggggcttttttgcatctccctgatactggcgtatttgagaacgccagatccggcgaacgtaaaccttaaccagtttcccccaaaacgggggtaa

SEQ ID NO: 396427 - DNA, 270 bp, Salmonella enterica
atgaaaactaaagggcatggcataccagagtatttaaatagtgaagaagaaatgattgcgcatcttaacgaaactttaaatgatagcgatcccgcttcgtttttggttgcgttgggggatattgccgcaagcagaaacatcaaccagatttcagagattacaaggataccagtagatgaattgaacgttatattttcagggcgtagcgatcccttattttttgacgtcctgaacataacaaaagcgctgggtttaaatcttcacttttag

SEQ ID NO: 396428 - DNA, 351 bp, Salmonella enterica
atgacaggactcattgaaatctattcccggcctgaggctattgacggattattagcgctaatgctgcaacagcccgacagctaccgcgaacgaatgataagcgaacgcattaccgaactggtggaatacattgatcacgttaacaccgcgatgtggacgcagcaggaacgggacaggctttcggattttgatgcacgctacatactgcccgctgtttctgaaatatggctacaggtcaaacaggaatttacagggagcagcaggccgctatgtgagttagccggtaacatccacggggctaatcagtctgaccagtttttacctttcccgcatcgagggcatcggcgataa

SEQ ID NO: 396429 - DNA, 2529 bp, Salmonella enterica
atgcaagggaataaaacgttgaaatattccgtactggctttatttgtcagcgctgcgttattgccgctgtcagcatctgcacgccattacacctttaattcagccctgattgatggtggtaaagggaatgtggatgtgtccctttttaatgaaggtctgcagttacccggcacttataacgtcactgttacggtgaacggtaataccgtggacagcgatgtagctgtaccgtttcgcctgtccggcgaaggaaagcaacgtaccctgcatccctgcctgacggcggaacaactgacccgttacggggtggatatcagcggatacccggcgctgtctgcggacgcgcagtgtgctgacccggaagtcatcccgcagtccacggctgattttgattttaaccgacagcagctttccctggtgtttcctccacaggcgatgctgccggtgctgaagggtatcgcaccggaaacgctgtgggacgacgggatacccgccctgatgctgggctgggatgcgagtacgcagcacagcgagtaccgggggccgtggacttaccgttcagactccagttatgtccgtcttcagcccggccttaacctcggcccgtggcggctgcgtaacgcctccacctggcagaaaaacagcagccagccgggaaaatggcagagtgcctggacgtatgccgaacggggcattaacagcctgaagagccgcctgacgctgggggaaagttacacctccggtaatgtgtttgacagtgtgccgttccggggcgtgatgctggcttcggacgaaaacatggtgccttccgaccagcgggattttgccccggtggtgaggggtatcgccaggactcaggcacgggtggaagtgaagcagaatggttacacaatgaccagcaccaccgtaccggccggtccctttgagattaatgacctgccttcagtgggctcgaacggtgacctgcaggtgacggtactggagagcgatggctcccgtcaggagtttaccgtgccgtataacgttcctgcggtggcgttacgacggggttatctgaagtacagcgtggcgggcggtcagtaccgtccttcagcggacaatgtggagacggccccggtgatgtctgctgaactggcatacggtctgccgtggaaccttaccggttacggcggtgtgcagacggctgaacattatcaggcagggtcggcaggagtcggcctcatgctgggtgcatggggagccgtatcggtggatatgacgcaggcccgctcacagcggtatgcgcaggactggcagaacggacagcgctggcgtctgcgttacagtaacacgctggatacgggaacctccgtgagcatggccagtgaggaatatgccactgagggttacggcggactgtcagaaacgctggatacctggtgtgacagccacagcgggtgtgaccgctacggctcttacagcagcctgcggcagcggaacagaaccagcgtctatatcagccagccgctgggcgggatgggcacgttaagtctgaacggctcccggcagacgtaccacaacgaccggaccagcaacagctcatggggagccagttacggcacgtcactgtgggggcgggtcttcctgagtctgaactggtcgcgtaaccagcggacggacagaaacggtcgtcagtatgatgacagcctgaccagcctgtacctgagcctgccgctgaacggctggtcatcggagaaccctgtgtatgcgacataccagatgaacaaccgggcgcacggggatgcgtctcatgagctgggaatgtacggcgacacgctggaccgacgcctgcactgggatgtgcgtgagcgctaccgtgacggggccggaggtgataaggccagcagcgcattatatctggattaccggggagcttacggcgaaatgaccgggaactacaactacagcagccaccagcaactgtcgggagccggtctgaaaggccagatgctggtcaccggagacggggtgacatcgggtcagccacagggcgataccctggcgctggttgaagcgccgggtgtgtccggcgtaccggtgggaggctggccgggagtgagaacggacttccgggggtacacgacgctgggttacctgtcgccgtaccagaagaacgacatcagtattaacccgtcatcgataccggatgatgcggcggtgtcacagacttcggtgtcggtggtgccgacgaaaggggcggtggtcagggcatccttcagtacgtcggtgggtaaacgcgtgctgctgacgctgatgcgtgaagacggaaagccggtgccgtttggttcggtggcgacggtggaagggagtgagaacagtaccggtataaccggagacggtggcgtggtgtatctgacgggtgtcccggaggacgggaaagtgacggttcgctggggccggggacagtcactgcactgtagcgccgggatacagataccagagaagcccggcccggcaggactgtatgtgtcacaggcacagtgtcgttag

SEQ ID NO: 396430 - DNA, 465 bp, Salmonella enterica
atgaaacgtcatctcgctatcgcagccattgccctcagcctcgccggtgcggcttacgccaacccgaacccaacctcgatccccggcagtaacaccgcaggcccggtatactcctaccagttcgactactccgccgccaactccacggttgcgccaaactttgtaacgaccgtgacgtccacgccggccggtaccgtagccaccaacactcccctggcgtacaccgtattccacgctccccagggaacaagcgccgtctataacctcaagtccgagttcagtgaccacacagaggaataccaagcatacttctctactggtaacacgcaaggaaatgctgcgaacacaaccgtcaccaacgtggtagccggggacgaagtgcatatcgtcctcgccacgaaaacgaccaaactcaccgctgggaccacgcatgttacttacacaatagacagcttcgtatcataa

SEQ ID NO: 396431 - DNA, 276 bp, Salmonella enterica
atgaaactgtcggaacggtggacgctatatgtgaaatggttcgttgtctggctggtggtgcagccggcgattcttaaccgcgtagagcggtgtgttcgcttccgcgtgggtctgtgcgacagtcgctggctttgtgtttggtttttgtgtcccgctggtgggtcgtgtgttttccttccgttgccagcgctggaagcagtcagtgctttcaatgtagcaccctgttcgtatcgttattgccctcgatgcgggaaagataaaaacttaccaggctga

SEQ ID NO: 396432 - DNA, 348 bp, Salmonella enterica
atgagactcacctgccgcaaaaaagagatactaagccacttcgatccggctaaccgcgattgggtaacgaataagattgggccaccgccttttgatgtgtcctgtattacctggcttctttacatatctggaaatcgacataatcttgaatcgacgcgccgcaccctcgaagcgagggtaaaagatggattacttgagaagtccaccagctacgagcaacgccacaacagaaagtacgccagtagcaaagacggggtacggtgtaaggtgtcccgatatggcctgcccggtcagtgcgttgtaacgcgggattatttgggcgtggatggcgctttcggtggtgagtga

SEQ ID NO: 396433 - DNA, 543 bp, Salmonella enterica
atgacagggaatagcccggttatgggtaaaaccgagcaatacaggcggctaaaaaagttaatgatccacgttatcaatgaagcggtaaaaactggcgttattcccttaacgttcaggtacaggagaatgacaccagagggattcacagggataaccgtacacggtaagcacaccgctattaactggaaagaaacggggcttgatgagttcagggttacggtatggtgggactaccagccggagcacataactaaactcataaacggcagacctgaaaaccttaaagctttattacctgatgttgatcgcaatgcctttcggttagtcgttggcgcgtgtgcgagtttctattttgactacctacaaaaaggcatactgtcagacaagggaaaggagttttttgctgtttatgttcgggagtctacggccagcgatatagataatatgggagaggtaaagcctttttgttattccatatcagagctagccagaccattgcagagacttgcactaccagcaggcgggaagcgtgggaagtactga

SEQ ID NO: 396434 - DNA, 333 bp, Salmonella enterica
atgacaagactcaataaaatatatgttatgattctggacatacaaaaaaccagactaaacaaacataaaaaagaaaaaataacctcgcttattgattacgtggaacaaattaacgaggacctgaaaaaggtacgagaaaaccttaaacatccttacctgaatgaaaataaagtcattcatgcattgcttgagattcagatacaaacaaggctaatgcagattggcaagaccaggagattacaggaaatagccgtttatctttttaatatttgcgcattgatagagaatgtgggaagtccacggaaaacgcgctggtcaatgcttaccccgtag

SEQ ID NO: 396435 - DNA, 276 bp, Salmonella enterica
atgacaacagtccgtatcccgcatgacgtaatcgaaggtatggcagcggcaaggcgcaacggagagagtaacgccgcctttatcgttcgcgcagtacgcggtgaactggcacgccgtcagagcgaagggctagcaaaccctttgcttaattctcttaacgccctaaagcgagtggaggaaatcagcgcagaggctggtgaagcaatcaggaaaatcgtcagcattgcagccacagaacgccagcggagagagcggcaggagaagtgcggcaagtaa

SEQ ID NO: 396436 - DNA, 369 bp, Salmonella enterica
atgacaaggatcattgaaatctactcacggcttgacgttcttgatgagtttttggcgcttatgctgaaacagcctgatacttaccgcgagataatgataaacgaacgtatagccgcgctggtggaatacgttgatcacgttaacgccgtgatgtggaggcagcaggaacggggccggctttcggattttgatgcacgctacatactgcccgccgtttctgaaatatggctacaggtaaagcaggagctaaccataaacagcaggccgctatgtgagttagccggttgcattacagggctaatcagcctggtcagtttttatctttcacgcattgagggtaacaatgataaaaacagggtattgcactga

SEQ ID NO: 396437 - DNA, 396 bp, Salmonella enterica
atgagactcaccagccgtaagaaaaagatactgagctacttcgatccggataatcgcgattgggtgactggtgaaattggcgcaccgccttttgatgtgtccggggttgcctggctgattaatgggctggaatctcacgataagcgccattgtctggaatccacgcgccgcacgcttgaagcgatggttaaagatgggttgcttgagaagtccaccagctacgaacaacgccagaatgtaacgcaatcaggcgatggtgccggggtatggtgtaacgtgtcccgttacggcctgcccggtcagtgcgctgtagttcgtgacaatgacgggaaaaaaggcgctatcgatggcgtgtgcgttcggctgtctgagcaagtggccgcaataagcagataa

SEQ ID NO: 396438 - DNA, 360 bp, Salmonella enterica
atgacaagactcacagagatatacaaccgcctggacgtcatagacgaccttatagagctacagaaaccgaatttttatcacggtcaggttatcagtgatcaggtaacggcgctgattgggtacgtggagcacataaccgccgttatatgggaacggcagcggcggcacaggctaacagattttgaagtccgttatattctcccggcactcgatgaaatttatatattgatgggtgagaagctgagtaaggacgagaaacccggtgacaagttaagtgatgacatcatggatcttatagggcttgttggctggtggctgctccacattgaaaaccacagcacagggagggtgaagcattga

SEQ ID NO: 396439 - DNA, 543 bp, Salmonella enterica
atggcaaggaatagcctgataatgagtaaaacagaacaacaggagcggatcagaaagctaatgatccacgccatcaatgaagcggtaatagctggcgttattcccctaatgttcaaatacagaagaatgacagccgagggatacacaaagataaccgcgtgcggtaagcccacaatcataaactggaaagaaaacgggtctgatgaattcaggtttactgtctggtgggactaccagccggagcacatacctaaactgataaagggcagacctgaaaaccttaaatttttattacctgatgttgatcgtaattgcttccggttagtcgttggcgcatgtgcgagcttctattttgactgccgacacaaatgcatattgtcagacaagggaaaagagttttttgcggtttatgttcgtgagtctacggccagcgagatagacgagatggaagaagtaaaaccttttggttattccatatcagatcaatcccgaccactgcaaaggcttctttcaccatcagatagtaagtgcaggaaatattaa

SEQ ID NO: 396440 - DNA, 369 bp, Salmonella enterica
atgacgactttaggtgtcagacttagagaagaacgaaaaaaaatggggttaaatcaagaagattttgccgccctagtgagcagttctaggggatctcaagcatcttatgagcaagataaaaaaattccaggcggggcctatctttccgcattggagggggtcggagttgatattctctacattcttactggaaagcgcaccccaaaatcggagggcttaacaactgaaaacccagaagaaaaagcccttctcgaaaactaccgcgccatggataaggcggcacagttaaatatgcaggcggttagcgctgcgttcgcgcaggctaacatgaacaaggatgaaattctgaaagacggcagtagcgagtaa

SEQ ID NO: 396441 - DNA, 216 bp, Salmonella enterica
atgcacacactcattaacgccgccatgagttcattgctgatgatgttcgtattttattccggcgtccttgcaatatacacctggaaaaaacgcagcaataaacgcctgaagtttggcgaaatcagacaggaatatgaagcggcattagctaaaggattacacccaatgcttttagcaggggttgtttattcactggtgctttggttactcaaataa

SEQ ID NO: 396442 - DNA, 687 bp, Salmonella enterica
atgaaactcactatcgaagatgtacaggtcgccattaaaggcgtagcgaaatacggcaatacacatatatctgaaaaactgcttgccgtcattgctggcaactacgccaaaggcaacaacattattacggtgcatttgcaatcgctgtatgaagacgagaacttcgactctatagtaggcgagattaaaaacctgtattacaccgaaactgacggacgttcccagttacgcggcgatattatttttgatacagaattgttggatttacaaagcctgcttcacagcctggcaaatggttgcgtgtacctgtcaccgtatttcatgaatctcgggtcactgaatcattgtttcgcctgtctgagttctgtcaccctgagtaaagccgaagacaccctctttgacggcatcgaaccgctggatatttccggtctgaatggactgattaacgcgctctataaagaaccagccaccgaaacgccagcagaaccgcagggcgataagccgtacatctacgcgccaggaatgaacaatgaagatatagctgtatgggtaagagacatttacaacaacttaactaaagaaatcaaagaaagagcagagttgcaggaactgaaaagcaacagccgcgtaatagagaacattttagacgagcgtgaagcgtttttgagtaaaactattcgggtttaa

SEQ ID NO: 396443 - DNA, 366 bp, Salmonella enterica
atgcaggacgaaaacgaaatgaaattcaagacaccagaacgtcacccctactatggcgacgatttgagaaatatctttattgaaattaaagataaatactcaccatgtggcgatcttcttttccgacttgatcacctgaccgccgttaaacgcaccggagagcaggcgtacttttccgttttatacataaaaaacgacacctacgaagggaacgttccatacgatgcttttatgagttacctgaaaaggaagtttgtagagattgcggcaatgccgtccactgatccaggtgtgccaataattttaacatttacggtaactaaggaaatggcaaccgcaaaggtgaggttgccaccagaagactaa

SEQ ID NO: 396444 - DNA, 528 bp, Salmonella enterica
atggctaaagcaaaattctttgtgttcaaaagcctcgacgataataaatattattgggagttcagatggcagaaacaaaagttctcaggtgggccatttgagaaccgcaaatctgctcttaaagatcttgaagttgtaataccgttaattggtgatacgccaatgtatagggtgtctggtgaaatagatgaaaaggataccgtttcgccagacgtaacagataaatgcccgctatattttatgctacatgccgatgacaatgatcgatgggcgtggtggtgtatgcataaaattgatggaactctcttcaaaagtagtgaggagttatcccttgcggatggtttttccacttttgaagatgcggttgtttcagctaaaaaactcaggagcataatagaatatgctgagattgttgatggtgctggggtaatgataccgtacatgcatttttctcctgagtttactgagaagtatgaaattggtgatatgcacccgtcatataaagctataaagaaaaataaactttag

SEQ ID NO: 396445 - DNA, 243 bp, Salmonella enterica
atgaggaaacatacggcagaacaggtaaacgggttcctggaggattattacttcgataatgaagaaaatccccgtggaaaaagaacgcattttgagactatgaaatgcggaatacttagcctgcggaacacgatattttgctcaaaggatatcgaagcccgcgaagaccttaaggaacttaactggatggcgaaacaattaactgacggcgtagtacccgccccagccagaattacggagtga

SEQ ID NO: 396446 - DNA, 330 bp, Salmonella enterica
atgctgatggattacctttgccatatcggtaacaccctgttctgcgcgtatcaactgccattcagtcaggaatgggacgaccagcttaataagcttctggacgaaggagtcttgctgttcacagatgtatgcacagcaaccttttctatcggtgaacactcagtagaaatctggatcgccaatcgctggtattcgttcggcgaagtgcatcgccttgatggggaatacccaccctcatcactcaattgtcgcccacgatttcgcaccatgcgccgcctgtatgccgccgtcaaagaccacgccgcgagggaggttaaatcatgcttctga

SEQ ID NO: 396447 - DNA, 558 bp, Salmonella enterica
atgcttctgaaacctgtgagagcgccgggaaaatgcccggcacatcgccgaccctggacagcagaagaagatgagttactgataaacctgtatggaaagaagacaacagcagaaatagcgaaacttcttccggcgccaggcagatctgcttatgccgttaaaaccagactaagtgacttacgtgagcgttttcctgagctgatcggttacatcagatattcgtggacgcaggaacatgacaacttcctccgcaagaatcgccacacgatgaccgcaaaagaaatcggcaatcgactgacaccgcgccggacagaaagcgcagtcatgagcagggcaatttatcttggtatcagtctctataaatgcggggataacctgtctcatacacgccacaaagacgaagatgtgaaattcatccgcgagttgcgtgacagattcaatctgacattccgcgagattggcgaaaagtttggcctcagtaaagacgtgaccgtatggctgtatcaccaccgccatactgccattgacgccatcgctagggagtacctcccacgatga

SEQ ID NO: 396448 - DNA, 234 bp, Salmonella enterica
atggcaaaccgcaaacagcgccatacccgcgccgacgttcagcgcatccatacccaaaccgaaatcaaccgcagactgcaccgcacccacacgctggcactattcctgccgtccgatctgcgtcgtctgccatacggcccgatgccgttatggttgccgtcagtcctggactacatcgccgacgatatcggcgacattcagaaactgtttaaccagccagcgcacaccgcgtaa

SEQ ID NO: 396449 - DNA, 354 bp, Salmonella enterica
atgaaatatttacctgttgttttccttgatctcattgtggctgcattgtttgcagccggtattggtctgaacatcgacggcgctacagctactgcgcatggtcttttatggctgtgtgcagttgccctaacactggcctttttgcttcccgatgttgtgaaaaagaccgaagagaaatacatgcaccgtccgttattgtgggttgtctacgacctgataacagatcttgccattatcgcggtaactgtctggcttgactggtatgtactggcagtctttcttttgtttggcatgggactaaagcaggaatttttccgtaaacaggaaaaacgcctgaaggaacaggcagcatga

SEQ ID NO: 396450 - DNA, 141 bp, Salmonella enterica
atgtcgcaaaaaccgttactggctatcacaattttaattgcggtagttctcgtcttctcagtcttgcgcggctcgctatgcgaggtacacatgaagctgggaggtgcggagtttgcggcgttcttacaatgtaaagagtaa

SEQ ID NO: 396451 - DNA, 1254 bp, Salmonella enterica
atgcatacatatataggaaaaccgagagcgaaagagaataaaaagagcgtggcggctaatgctgtagctcagaaaaaaggtcatggaaaacaaagcgtgggtctgatggataatcggaccgtggcggtaacgcagaaaaatattcagcgccaggccgtcgaccatcctaaagaaagccccattgatgataataaaaatgtggtgcaacgtatcgtcaggcagagcgactttctgaaattcaagcgcgttaaagatgaagaaggtgaggttgggatatatcgttcagctggagcgagtggcccatgggcaaaaattaacgataagaccaacgcagcttatcgggatgctgccgtcgaaatattagggagcaaagatgcactctattaccttgggtttcacgatgtgatcgtcgagaaaaataacggaggtcgtaatccctatactaactctcatttaataggtgcggcctttggtgggcaactaaaatatccaagcccagcggataatattcgttatcatcctgaggcggttgagtatggaaaatggcaggaagatgagagtaaagtagaaaaaaaaggtcgtttaggatatatcactgcggcaagttatgatagcagttcaggtgtggctgccaacatggcttcagctattattggcgttattcggggggatcattcatcgcatgaggcggatcaactggaacaggaattgaaacaaatgctgacgtgtgttgaatatataccgccaacggttgtttttcgctacgacgatattgaagacccaggtctaagctttagagaacaatgggataaagttaatgccggtcttcagttgtcatcaggtgtaacgaaagttggggtttatagggcactttttgatatgaaggtgataaaagatgaaaataaggtgccagtcgatattaaacctgcgacactagttatctcctctcgttcagatattgttaacttgctaaaaagaattaccgttagcaataacggtaggatgaaaacaattctcaaaggcttaaataccaagtttacacttatggcaagtataaggaataaagtgtttgtcgattatcttcttaatcaacaagaggttaaggctttaaaactgagtattgatattgcggaagggtttgatctaagtacagtaagcactgttactcctgatgatcttagtttatcgccaggcgctacgtcatcaggtactacgtcctcaggagctgtatcgagtaatcttggggacgagtaa

SEQ ID NO: 396452 - DNA, 162 bp, Salmonella enterica; identical to SEQ ID NO: 391745

SEQ ID NO: 396453 - DNA, 1257 bp, Salmonella enterica
atgaaactaacagatgttcagattcgcaatgcaaagtacgacccagaccgcaaaactcctctcagactcagcgacggcaacggcctgtcagtggagataaagaaaaataaaaaggtatggcgctacgactatttgaagcctggcaacaaaaagagtaagacgaaaatgatttttggtgagcaccctacaatatcactcgcggaggctcgcaggaggctcgcagaggccaaagagcagctagctaacggtatcaacccggcagacgaaaaacagcgccagaaacgcgaattgaaagcgtctattagtaatactttcggggctatcggctgggcgtggtttaatctaaagtcttctgactggtcagacgattaccgcgattatatagacaggatgtttaagcgtgacgtaatgccagcatttgaaaaccgccccataaccgaaataacctcaacggaggttttaaccttcctgaaagaaattgaagaccgccccgcgcctgaactggcaaagaaaacacgccagcgcatgagcgaagtatttcgttatgccaaagccgtaaaagtagcgacggaagaccccacaactgacctttccccgctaatgaaaaaaagagaatcgaagcattaccctcatttacttgagcgtgatttacccgcctttcttaaagcggcttcaaattatggcggtgaattattcactacagcatcattcagaatgttaatgcttactggcgtgagaactattgatattcggaaaatggaatggtcagaaataaactttgatgatgaaacgtggtttttatccggtgaaaaacgctcaaagaaaggagaacgtaaacgctcggtaacaattgcactaagtaagcaatctatagatattttaaaagaagtgcataaactatcaggaaaatacaagtatgtattccccaaccgtaacgaccctaacaaaattcgctcagaaaacacgataaccaagatgattgcggaaattggttataaagggcgaatgaccggacacggattcaggcacacactaagcacgatattaaatgagcgtggctataacagcgactacatagaaatgcaacttgcacacgttgacggtaataatattcgcggaatatataatcatgctgcatatttagaaaaccgccgcgaaatgatgcaatggtatgcagaccacatcgacagtttagagcatgatgaaaacgtggtttacgccgcgtttggtaacggaaaacaaagcggaaataaatga

SEQ ID NO: 396454 - DNA, 321 bp, Salmonella enterica
atgaaaaagaatgcgcttgataggcttgatgaacacctggaagaaattgtttatatagttgtgtttgtactgatggctgcgtgggtggctttttgttgttggtggttttttgttgactctgatttgtcgcttctggccgggttgtttttgttcatggttctgactggttttttatgctttgcgttgtttctgattggtgagccgctgggctttttgattctggctgcactggtggcggtgtatctgctctataagttgttagcgatgttatggcggggtatcgtgcgcactatgcgccattaccgccgccatgataaatag

SEQ ID NO: 396455 - DNA, 174 bp, Salmonella enterica
atgtcactcttagaactgcatgatgtgataaggcgtaccagcctttcaaaggcgacaatttaccggaaaatgtctaacgggcaatttccgaaacaacggcaaataagtgaaaggcgcgtagcatggtatgaggaggacgtaaatgaatggattaaaagcaaggtgacacaatga

SEQ ID NO: 396456 - DNA, 321 bp, Salmonella enterica
atgtcgaaacttaaattaagaccggggactatactcccctccgatgaagaagacgcaaaaatccgtaaagcggcgaagtctgacccggatacaatgctgctcgaagatgaaaatattaaacttttcccatacaaccaattaaaaactttgcgccgcaaaggtcgcccggtaactgattgcccgaaagtgtctgtaaatatccggtattcgccggaagtcgtggacgcattcagggcaacgggtagcggctggcaaacgcgcatgaatgccgcgcttaaagactggctcaggcagcacaagccggaagacgtcaaaatataa

SEQ ID NO: 396457 - DNA, 270 bp, Salmonella enterica
atgaaaatcacctttgatccacacaaggacgccatcaaccagtgtaagcacggtgtttcgctggctgaggctgaatccttcgaatgggaatcgtcgattataggtatggatacccggcgcgattacggggaagagcgatttatagcttttggctatctgaataaccgtatttactgcgttgtatttactgaccgtgacaatgacgaacgccgaattatcagcctgagaaaggcaaacagacgggagattaaacgccatgtcgaaacttaa

SEQ ID NO: 396458 - DNA, 546 bp, Salmonella enterica
atggctactacccctaccccgtcacaccctcaaatcgtctatttgccgtatgtatgcgccgttgacccggatgaccaccaacccggcaggtggatacgggagacagaaaaccagcttcttgaccgcgtaaagcgtgcgcttgatgaagctggtgtggcatggattgacccgcgcaccaaagagcgcagcaagcccgccgatagtgacataggtcacaattcgccaatggtggaagctggaaatactgacagcgcggagggatgcgaagatattcgctacgccatacgtcagcatctgtactacggcgacacgctaacccgtactatgtacatttcgcatgtcttcatctgcaagaacgccgcacaggaaaacgcggagaagttcaccgaggaatccaaagtcgggatgtttactactcaatgcgaagtagtggagctgacgccgaagattgtcaacgagatacgcagcgaacacggatggaacaccccgctaacggtttaccggagcctgcccgacaactggaaggaggggaaagacaatgcgtaa

SEQ ID NO: 396459 - DNA, 165 bp, Salmonella enterica
atgcgtaataatcgcccctgttttgtctggcggttttattccggccagaactcagcttatttaaccaccaccgccaccagcgaacgcgaagcgcgtttacagcttcccgccgttcgtctggtatttgttgcccgtattcgtgtagaggggatgcatcatgcataa

SEQ ID NO: 396460 - DNA, 363 bp, Salmonella enterica
atgcataaatttaaagcgctggataatagttcgcagatgtgcagcggaaacaatgtgcttttctttgatgaaaatgcagcccctaccgcattatatgaatgcgccgctaatcgcctttttgctgtagcaaaactgcacgaagaattagcgcttgtgtataaagataaaataaataacgacgcaatcagcgaagccacatcatttttactttctgatgttgtttctatattcggagtaattgggaaaaattctcaagaattagaaacagcacgtaaagaaatcgaccagtacaagaaaaccgttgccacgctttcgcgtgaattagccgcaaagcatgacgacacaaccacggagggcgaataa

SEQ ID NO: 396461 - DNA, 2352 bp, Salmonella enterica
atggcacgcctgataactgatattaaaaatcgcgctagcggtttgtggggcgatatattgccaagccttggcattgatataccgggcaaggataaacatggcccctgccctgtttgcggcggtactgaccgctttcattatattgacgaccatgataacggcgaatggcattgcagacattgcgataaaagccacggcgacgggctggatcttatttcccgcgtcaaagatatccccgttaaggatgccgctgtagaggttggtaaaattattggggccgatacccattcaccagataagccagccagaaaagaagcctcagacggccaaaaacccgcgccggatattgcggcattagtggcgaaagaactccgcaaaaccaccccgaaagagtcactttatctggctggcaaggggttaaccggcttcacgccgccgatgtacgatgatgggagaatgttccttgtaataaaggacgtaagcggcacgattcgcggctatcagaccatcgcccaggatggtgtaaaaaagcttatgcatggaatgagtaaaaagggggcgtttatcgcccctgacccgctaccagaagcgccggagacgattatcattgctgagggggtagcaacggccattagtgcgggcatgttgcattctggcgcggttgtggccgctatcgatgccgggaacctgaaacccgtcgcgctggcgctccgtggccgttatctgaaggcaaaaatcatcattgcggccgataacgactaccacgcgcctgaagaactggacaaaagcggcaaaccgaaacaaaacacgggcaaaataagaggcgaggaagccgccaccgcttgcgggggctggctggcgttgccgcccggagaggctaaaaccgactggaacgattaccaccagttaaaaggactggaagcggcgcaagccgcttttaaggccagccttgtaaatatggggaaagaaccagaaaaagcggcgtctcattccgcacacctgaatttagagcaaatgagctataatcaggtaggcgatatattgatagatcgctacaataaaaatcttgcattaaatactgataactggacggtttaccattattccggcgttgcctggagtacgattagcgatgataagttaagcctaaaactggctaaaatattccgtgattcagattgtaaatactcaaaggcaaaaattactgccattattgagacaatgaaacttgcattgcctgaaatgggaaagccacgacgtgaattcattggatttaataacggagtttttgatgtaaacgcaaagatattcagggcgcacgataaatcggactggcttttattcgccagtagtaaagattactcacccatgcagcaaggtgaatcactggagataaacgcgcctaatttcgtgaaatggcttaatcatgccgctggcgatggtattaataaaaaagaggcgatattagccgcgctttatatgattcttgcgaatcgttatgactggcagttgtttttggaaatcacaggcgacgcaggaagcggaaaaagcatgttcactaatatagcaacaatgctagccggagaaggaaacaccgtcgcggccagcatgaaatcatttgagaatggttttgaacgcgcgtcactggttgacgcgtctttaattaccgtttcagatataagctactaccaaggagagggcgcagaaataaaggccattagcggcggcgacaaattaataattaataataaatacggtcgtatttattcggcacaaataagagcggttattctggtaacaaataatcgcccaatgagctttagcgatatcgggggaggaatagcgcggagaagggttatttttcatttttccgatgttgtgccggaagatgaacgcgatccagagttaaaggaaaaaatagagagtgaaacggggtttattattcgttatttaatgagccgttttagtgatgagcaggacgctaaagccatcctcacaaatcagcgtaaatcattcgaggcactggaggtaaaacgccaggctagcccgttgactgacttttgcggttatctggttgcggttgatgatggcagggggatgcctgtaggggatatgaaccggagcgcgttcagcccgcgtcgttatctatatcacgcttatagtgcctatatgcgtgcgcagaacctggacaaacttatatcggtgaaactgtttaaggacgcgataaaaaccgcgctcgcagaatacggcattaattaccgtgtacaccgttttaccgcagggatggtgtctaacgtcacgttaagcgcacacgctgaggaatggctgccagccacagaaaaaccaaattaa

SEQ ID NO: 396462 - DNA, 615 bp, Salmonella enterica
atgaaagcaaacagcatgacccggactatcaacatatttcgcaccggaagttttaccgcaatgaacggaagcacgcacagctattcagagcgcgaccttgacggaatggcggcagcgtataacagcgccgcaaaaggaggccgctacagcgccccgctttgcattggccaccctgccagcaatagccccggatatggccatgtaaacgcgttgacgagccgtaaggggcgtttgtatgccactgttacccctgacagcactttaataagcgcggtacgcggcaagagatacaagaaagtatcggcggcattttatccccccggacatcaaaacaatacgacgccgggcgcgtggttactgcgacacgtcggatttttgggcgccatgccgccagcggttaagggactcgaagccctggcattttcggaagcgttcgacctgtcgctattgttcgcaggacccaccggaaccgccagctttgcggaatatacagacccggacgaaaacaacccacgatacatagcgcacagcgttacgcaggatatttcccacgtcatgggcgtttcatattccgaagcgctgaatattaccaattcttttatatggagtgattaa

SEQ ID NO: 396463 - DNA, 708 bp, Salmonella enterica
atgaatctgattaaaaaggcacaagccgccgttaatatcgttaccgatttaactgcaaccctgacagaacaaaaaaagaaacttgaggcgcagatagcagagaaaaacgacgctattcaaaaactgcttaatatgccaatgaatcttgatgatttttgttctttcatttctgagtatgtacgcattaaaggtgatgatttctattaccgccttagttatgaaaatcgcgagagcaatttgatgccgtggggtgcggttgaaagtgaaagcggtgaaattaccccaacccctttttatataaaaggcacaagcggaaggcttttcagtgatgtaaatatggcggcatttgcccgcgagtgtttttttcatcctgaaaacaccgttaaacgcttaacggataaattcagagcagaactcgctaaatcgtggggcaatgagcaattaccaaccattgcagagcgtcgggtaacgattaaaacgctacagaccgaacgcgacgcaatacaggcagatttagacgatataaacgccaatattaacggaatactcagcgccgccaacggcataaataacccccgcgcggcaattaaagcgccacaggctgaacgtgacgaggtagaggccgagttaaacgatgatagcgtcagcgatggcgaaatacgggacacctataacaccacggacacaaccagcgcggccagtgattaa

SEQ ID NO: 396464 - DNA, 387 bp, Salmonella enterica
atgaaagacttcagaaacggaagaaaagcgctaaattcaaacactggcattattgtaaaaaatttcgttggagaactgacggaagaaatcggcattcaccttgaaaaacgcaatataaaaaaagatgatgcgcataaaatagcgagcgatgttgtagacacgttgcgtcagtcaatgggaggttgtcagctatatttccccaaactcaaccagaaagacaactcagagcgtaatgcggagatattcaaagaatacaagcgcggcgcttttgtgaatgagttagccataaaatacaacgtatcactacaggctatttataacgccatcaaaagagaacgcgaacgactggaggcaggtgcgaaaaatgataataatggggatagttaa

SEQ ID NO: 396465 - DNA, 219 bp, Salmonella enterica
atgaggccttttggtttttataaaaatacaatcgccataacatcaacaagttacaatcttaattcgatgtatgcaggggacgccattgatgtccaggggattttcttattgctgcataacgtttcgagcagttctcctctcatgttacttttattgccccatgtaatgtcaccggacatgccatatattcagcaaaaagtcgtcatcggcctgttttga

SEQ ID NO: 396466 - DNA, 1461 bp, Salmonella enterica
atgagtggggggaaactgccggaggggtgggttggccctcaactggatgagatcgctactgatattaactatggctataccgcttcatcaacatctgaaaatatcggtcctaaaatgctgcgtataaccgatattcaagataataaagtggactggaactcagtacccttctgtaagattgaggataatcaaaaaaataaatatttactttgtaacggcgatcttgtgttcgcacgaacaggggctactgtaggtaaaagtttcttaattaatgaagatatatctaatattgtatttgcatcttatttaataagagttagatgcaacaaaaaaataaacagccattacctttcttattttttccgctcgcctacgtactggagtcaaataacagaatttagtgcagggattgggcagccaaacgttaatggttccaaacttaaaaaattaaatttaccattgacatctgtctatgaacaaaaaatcatcgccgaaaaactcgatacgctgctggcgcaggtagacagcaccaaagcacgtcttgagcaaatcccgcaaatcctgaaacgttttcgtcaggcggttttagctgcggcagcaagtggacgcttaacaaataaatggagagagaactatactccaaaagaagaaataaatttaatagcaagtaaatataagccgaccgatagcctttttaaacaagctaaactctctcttccagaaatacctcaaagctggtacgtagttccatctgcccatttaatagactatgtcaccagtggttcaagaggttgggcaaattattattctaccgaaggcgctctctttcttcgaatgagtaatgttcgttacaacacgacaagactagatctacaagatttgcaatttgtaaatcttcctggtcatgtagaaggtaagcgctcacttgtcaaaattgatgacttgattatatctcttaccgcggatgttgggcgcgttgccagaatagataaagacttaggtgaggcatatattaatcaacaccttgcattattaagaccaaataataatattaattccgaatattttgctttatctattgcggcacaaaatataggtgtaaagcaaattcaatcacttaaaagaggggctaccaaagttggccttggtctggacgatatacgcagtttagcaattcctttaccatctttagaagaacaacacgaaatcgttcgccgtgtcgaacaactcttcgcctgggccgacaccatcgaaaaacaggtcaacaacgccctgacccgcgtcaacaacctcacccagtcgatcctggcgaaggccttccgcggcgagctgaccgcccagtggcgtgcggaaaacccggatctgatcagcggtgaaaacagcgctgccgcgctgctggaaaaaatcaaggccgaacgcgccaccagcgacggtaaaaaaacctcgcgtaaaaagtcctga

SEQ ID NO: 396467 - DNA, 684 bp, Salmonella enterica
atgcccgaccatgcgccaccaagacccgtgcatcgccccggactgctcggctggatagcattacttcccggcgtgctggttggcttttgcctcggcgcatggatgctggcaatagcgctggagtggctgggcgatgcgtttttctggcggaacacctgcgccagccacagtgaacaggtattgcaggcgacatggcagtggtggcaaggctctgctggcgcactggtatggctagagacaaatctggcgcttgtcagcgataagctgcaacaagggatggcggcgctaattgtttcactcaacgggcaaagcgggttgttctggacagagacggtcactacggtgatccgttgcgcattgctgtcttcgaaaaatatcaccctcacctttctgctgcgtctgacgattctgttgcaggcgctaccgctgtttgctttggctatcatcatcgggctgattgacggactggtacgccgcgacttacggcgattcggcgcaagccatgagtccgggtttgtttatcaccacgcaaagcgtatgatttcatccagcctgatagcaacgggactggcgtggctggcggtaccggttttttttgagccggagtttgtattagcgccgggagcagtggttatcggattaatttcgtctttagctttttcagcgtttaaaaaatatctgtga

SEQ ID NO: 396468 - DNA, 963 bp, Salmonella enterica
atgtacgactattcgctactcattggcaacggtatcaataacctttccgaaggatattcttgggatgatgtattaaaggggctaggagataagtacaaagtcgatattaataccaatgaaaaacctttccctctagcttacgaagaaatttacttcaagatactcaaaagaaaaggtaatggaaataatgaaaatgacattaagaattttatcgctgaaaaaataagaaagataacagccaatgagattcaccaagcgatactagaactcaactgtcagaatataatgacaacaaattacgacctcgcttttgaagacgttctaagaaaggagactaaaacgacacaccttaataataagggaataatcaaggaacaacgctacaatgtcttcagacaccatgaactaggtgaaaaaaagatctggcatatccatggagatatcactgttccgaattcgattacacttggctatgaacactacagcggccatctgcaaagcatgcggaattatacaacctcagggagtcattacaagaagagtgattttgaccagagttcgctgataagcagacacaagaaaaacgttctcactccggaatacagttggatcgacaatttcttcctcagagatatctatattattggtttaacgctggatttcgtagaaatagacctctggtggttattaacctttcgagaaagaaataaatatatgaaaaaattggcaaaagaaatcaataataacattacctattatttgcctgcctgtttcctcgatgcatctcaatgtaaagaagacgacatcaagcgcctaaaagtcaaaacagagcttcttgaaagcgttggtgtacacattaacaagaatttcggcatggatttcaaacattccaaagtacatgaaaaaaatttctatctacaggtggtaaacgatatccgtaaccaacgcgccctgaattcataa

SEQ ID NO: 396469 - DNA, 315 bp, Salmonella enterica
atgaaaaatactcttctttcatttttaattctactgtttggaggatcttcagccttcgccgcccccctcacagaacgcgaagagctaaccctgtccctcaaccagctaacccaaatcgaagcctcgcttcatcgcgcccagcaaagcgccagaaccagcaccagcgatcgctactacttcgactatccgcgtatccacagcgatatcaccaccttgcgcagcgggattgaaaattacctcacacccgcccgcgctcaaccgcgagatacggcgatgctggttggacagtaccgtgaggagaaaaccaccccatga

SEQ ID NO: 396470 - DNA, 1368 bp, Salmonella enterica
atggaaaaaatgaaatggtatgtattcccaaaagatattttgcccatggtgcttctatcttctcagcatcccgatgctttaggtggtataaatgttaaaaacccaagggttaatactgaaagtataacgcttggatattgtgatgatatttactaccagggagactacactcccccctcagctatttttctaccggaagaaaaagctgctgagattatggcatggctgaaagtttatgcaccagatacttatccattaagccagttcgccagagttttaaaaccgctagagctggaaatatatgatggaaatatagcaataaaaaagaaaaggaaacatgagttctattcccatcgctgggcatcggtaattttaggtgagatattagctcagggagaaagtgacgtttccttggatacattacctctttcccggagccaggctacgtactcccatgcgattgctcgtgtaaatgcatgccatgacggtaataagtataaaaatctatgcttggaaagattgagtttcctagagatagataagaattttgtacccagaaatctcttaattcaagatttagaacctatttggaattgtgtagattttgacttaaatgatgtgtctaatatgtctgatttaatagatatatttagcaatatttattttgaagcttcctcagctttattcgaacctaatatacggaaagagttgttgagtgattcaattgagtctagggtattgtcattcagaagaattagtactgaagaattaaattataatgtaacaagaaaaaataacaatgcagcattgaaaatagcaatggcggcatttttggtgggaagaggtacgtctcatgtttttcttttaaaatcaatagcaaagaatttcccttccgtgtatgtttggtttggacttatcgcaggcattataggtccaacttgctgggaagtcgactggacgagagctgtaaaaggtattgaaaaaagtctcaggattaaacttgattggtcagagcctagtcaatcagatctctcatggacagagtattcttggatttctaagacatttataaataaaccacctttcgtcgaacttcctaaactattaccgcgagtgctttccatagaaatactacctggggtcatatgccaattccgtttggcaatcgaaagtaccagcgagaaactaaaggctgatagtaccaatgctgctatgtatgagattaatacactaagaatgattctgtcagagttttatgtgttagcggagaaagcaaagaaccaaattagtgaaaaaaggaaaggtgatgactttgatatctcaaataaaagaaaagataattattatataaataaaagaagaaaataa

SEQ ID NO: 396471 - DNA, 1161 bp, Salmonella enterica
ttgaatactaactggtggcgtcagcagaagcaaatggatcaatttcaacgagagtttataaatctccctgtaggtgggaactatttcctgtccgggccgccaggatccggtaagactaatatgttacttctgcgagcagaagtaacaataggcagtggagagcgaaatgtgttatttataacttatacccgctctttggctgattttattcgaagtggtgctgtatcgcgcggtttgatagaaccgcatcaaataaaaacgttccattcttgggcatgcgaatacgttttgactaatttacatgagaagattgagtttaatgaaggggaatttgatgaaactgcccgtgctaagtttctagaaaaattaatcgatgctaacaaaagtcgcccatcggaatttatgtacagcgctattttcgttgacgaggcgcaagatctaacggtagaagaattggacgtattacttgaactttccgaagctgtttgtatatgtggtgatgataggcaaggtatatataatagaaatggtatggaggtagaaaaagctcggtcattcacatgctattcacttgataaacatttccgaataggctatgagatagcaaaggcggcagatagactgatgccaccggcaaaaggtattgccagtcttgaaagtacctgcaactatgatcaatcgatatttggccaatcaaccgctgaaatgcatgagtgtaaaagtcgtgaagctcagtttgaattgatgctcgaaaaaataaatctacagttggatgccttcaacggagataatattgggattttttgtccaaagcaagaggacagagaagtgcttcggagcttgtttgataaaacggatcttaccgatttagtctatgttcatggagttgatgatgatgcttcatttgtaacagaacgtcctattcacgtattaacattacatggctctaaaggaacagaattcaggtgtgttcatatttttggtgctgaaagtttagcaaaatttcctttaaataggaccaagcttagctatactgggattacacgcgcaaaaacatctttaaacgtataccgtacgggtaaaacaagcacaaaccttgaaaatgcctttgctaaaaagactttatttaatttagataatctgtttaaggatgatgaataa

SEQ ID NO: 396472 - DNA, 1410 bp, Salmonella enterica
atgccagatttagacagtcatatgattggtgacttaagtgctaggttggaaagagtgatttctttaaagactggttatcactctccagtctttcttgccgcaggaggatctgcggcagtgttcaaagttgagacacctctcggaccaagagcatataaagtatttgatcccaaatttataaatgaggaagaaaattctaaagagcgatatagactatctttacaagaaagattaatagggcatagctgcgaaactctagttcaaacctataatatctctttagcggaagatactgcatttgtggaaatggagtacattgaatggcctcaattaaaaaaaatcatccgcgatgtacctgataatgttattcagtcattaatacttcaacttattgaggctgttaagtatcttgaatcagttagtatagtacatcgcgatattaaacctgaaaatattcatgtatcgcctgatttcacaaggttaaaattgcttgatcttggcgtcgttagggaattcgatcctgatccaggtgtagaagaaacagatcatggtaatcttagattatttctcgcgacagctcagtatagtgctccagaatatctattcagattggatgcgccgtctaaagatttatggcgggcactgaatttgtatcaagttggtgctgttctacatgatctgattatgaaggaggcaatatttcaagcggaaatcaatacaggtaacagatggttggtcgcaaaagccgtactgcttaaacatcctcaatttattgatggtaatccagagcggcttataagacttaaatctgttgcctctaaatgcctaactaaagagatggatatcaggctaaaaatagtatcatgggatgatttctctattgtcgcaaaagatccattaattaatttacgcgagcggctaagctcaaggaatataagtagtgaggccaacttagagcgagagataaatttctatcgagaagcgtttaaagatgaaatatctgccaagatcagagagcgtttaatccctacatgcaaaaccgacttgccatttacactttcaagctcaactgaaaataagaaaacaattattgagctgaagttttctatagaaaaaagtattggtctcctggcgcacataactcttgattggcaggacggtctttataaaaaaaatggaagtattttaatgtcatgttgtttgattcactctgataaggaagttgatattgataggggggtaaaaaaaataatttgcacttatagcactgatgtaaatatcgatgaggtgagttacctaatatgtaatgttattgctgatgcaatagtatgcgcatttgatttagttgcagctactgacactggatcaatttcatgtttaaataattttgacctaatgactagtaattga

SEQ ID NO: 396473 - DNA, 1326 bp, Salmonella enterica
atgagtgagtggatcaaaacaacgctatctgaaattgctgatattagaataagtaatgtagataaaaaaagctatcagggtgaagaacctgtaatgctatgtaattatatggatgtatattctaatgattatataaatcataatattagctttatggaagcaaccgctaatattatggaaatagcaaaattcactgtgtcaaaaggtgatatcttaattaccaaagactcagaaagcccttttgacattggtattccttccgttgttgaagaagatatagataatttgatttgcggttaccatcttgcacaattgaaacctgatttaaagaaagtagaccctatttttctagcaaaaaaactggctttgcctgaggtgtcatcttatttttcaaaggttgctgctggttcaacccgctatgggttgtcacgtgggtcaattgctaatgtattgatatcattaccctctttagaaaaacagaagaaaattgctagcattttaaaaaagttagatgttgcgataacaaaaacagaagaaatcataaataaatataatcaaattaaaaaaggtatgatgtgtgatttgttttcgcgaggccttaacaaaaatggtagcttacgtgaaagttatgagtcttctccagacctgtatcaagagactgtaattggaatgattccaaaagaatggtcattgcaacctttatcatctattgcgtattatcagcatggacgtccatttccttcatccgattatacggatgagggaatttttttacttaggcctggaaatttagatcataatggctttgttcgttttgacgaagggcatagtataaaaataccttatcattgggaggagttagaaccaaactatgttgtaaaatatggtgatatattaatgaatttaactgctcaatcattagatgatgaatttttgggaagagtttgcattaatttagaaaaaacgaaatctttgcttaatcaacgaattgcgagattctcaactaataaaattgagcatgaatttctctattggcttttaagatcaaggcaatttaggaaacaaatagatagaacttcacagggaactaaagttcaacatctttataatcgtgatttgaatcgaatagttcttggcattccgagctgtgctgaggagcaaaggaaaatttcagcttcccttagaactatctctaagaaaataagaactgaagaggaacatcttcaaaaaatattgaaaaataaactagggctaatgcaagatcttcttactgaaaaggtaccagtgaaggtgaagaaaaaaaatacggagaaaacaaatgtctga

SEQ ID NO: 396474 - DNA, 246 bp, Salmonella enterica
atgcaaagagtctctggtaaaaatgacccggaaaaacttctttccactctggggctgatcatccgtgaaagacgcgagcacctctcgttatctcaggaggagcttgccagccttactggtattgatcgaagtcatatgggaaggattgagcgtggagaacgtaatgttactctgctcaatctgtcgcgcgtagcatatgcactggactggagccttgcagacatgtttgccgccgcccggctttaa

SEQ ID NO: 396475 - DNA, 219 bp, Salmonella enterica
atgacttcaggcatgatgcctgcatacccggcgctgatggaactcttttcaaatgttccatggacggtacaagcctgcgcgcccggtattatcttcttttccagaagaaacctggccgccgtcatggcggctttttcattcacgggagtgtcgatggataagaagatttgtgtcgtgtgccttagcgtcagaaagccagcaatgcgtatttataaataa

SEQ ID NO: 396476 - DNA, 183 bp, Salmonella enterica
atgctatgtagcataacatttcaaggaatactgaatcactttactacctacgtgaaggtgaacctcttcgtccggtatcacaggtttgacagcttcaccaatttcagtcagaaactggaaaagtggttagttcactttgctggctggcgggaaatctgccagttcatggacacaccggaatag

SEQ ID NO: 396477 - DNA, 174 bp, Salmonella enterica
atgatttttttgtttaatgtattttttcgttttttacatatgctgatgatgttcctgccgccgcaaagcgcagtcacaccgtggctgcgtcaaagggcggaagatgcactgctgatgaggcgtgttgccgccgatagacaatatcagccacatgacggcgaaggattacggtga

SEQ ID NO: 396478 - DNA, 543 bp, Salmonella enterica
atggaaactaattccagtatggttgagattaatgttctgtgtgtgattgatactgaacttgtaaagaaaaaatatcctaacccaagcaaggaccaggcgaacccgacggggattgtgcatgacagcgagtatatgctggtaaccggtgcccggggagatgtccgtggacaggggaccgcagacctgagttttcgtgccaatgtaggggacaaagtttcatttaccgggacatcaatctatgcaaacgctgatgatgctgtgattgtttatggcattaaatttggaagtggaacagaggttttcagccagtttattcctgaagtctttacccgtgaaagggctgttatgccagacccggaaactcagactgggatcccgcctttaagtcgcgagattatattttcaaagtacagttccagtgttaaactagcaggaacagagaattttattatctattttgccttatacacactggatgacaccggagagaatcaaaatttatttgggtactactgttgggatcctgccgttactgtattataa

SEQ ID NO: 396479 - DNA, 477 bp, Salmonella enterica
atgaaaaaactgattatcgcagcaggtattgcagcagcaacgatggcatcttttggtgcaagtgcagcaacatatacttcttatgcaagtgtgaacactgaagtgactggaaccactggttttcttgtcactgcgtcaaataaatcaataaacgtggacgcatttaaggctgatacgactgtactcggtacatttaatgtaactgctccggttggagcaactacattcacactttccgatattcatgcccataactatccgtcaggttataatgttaaaattgggggcggtacgtgtgtagctgctttgggcgcgaatggtcaagatgctacctttggtgatagcaactcatgtgattttgcgagtcagtccggggttgctcaagatctgaatgtgacaaataacggtggatttaaaggtgaagtagcgccgggggtcagaacactcactgtcaagttcacttcagaagttaactaa

SEQ ID NO: 396480 - DNA, 153 bp, Salmonella enterica
atgacccttgatattacagtggtgaatgtagcgttaccaagtatgtggcaaaggtttcaaactgaattggcccatctgcaaggggttataaatggttatacgcctagctctgctgttttttgttactatcagagtcattatcttatcggttag

SEQ ID NO: 396481 - DNA, 393 bp, Salmonella enterica
ttgcaggggctatggtttttgggacggctggggtctcaggtatgcggcaaactggcgtcggggcgcgatgcctgggatgcttttgatgtgctgttcccggcgatcaccgcatccggtattcccaagatcccggcactggctgcaatcctccgcctggaagcggcgccgcgtgaactttactccggcgcgatactgatgctggaaggcgatcgatccttcgaagcggcacttgttttgcgcagcgcatttcaggatgcgcagagaagctggatccaggccggagccggagtgattgctcagtcgaatgcattacgcgaactgacagagacctgcgaaaactttccagtgtggcgccttatctggtggtttcgccaacgaaatgagagatggtag

SEQ ID NO: 396482 - DNA, 954 bp, Salmonella enterica
atgcaatccactcaccagttacattctctgcaacagttaaccgatatggcgcacaaatggggctacgactacgagctggcaaataccaactgctcggctcgtcagtctggcgagtttgaagggacaatcaaaacggtcacgctgccctatggcgtcaacctctgcctcaatgagctgaccgccaacggggacgaccatcgcagcggcacgcttcaccattgtttgactattttactgacgctcggcggcgatgaacccaattattatcttgatgacggcagcccgttgccggcggaaaggggtattgcgaaagtgattgccaccaaagaccgtatgcgcctgtggtgccgcaatccacgcggacatcattgccgcagcctggtgattcaggcggctccggaccggattagtgataaagagctggcggagcaggtcgaacgtattttgcagcgtaaccatgtcttcagcttaattatcccgcagtacaccatcgatagggccaatgagctgtttggcttttgcgataactgcgtgattggccggctacagacccatagctgcgtactggatctgatggcccaggtgctgcgcacggcgaatccggatttacctcagatgggggtgatggtgccacatcgcgatgtaacgcggatgctgaaagtgcgggataagctggtcaccgaactggactgcaaccattgcctgtgtgacctggcgcgtgatgttggtatcagcgtcagcgcactgaaaagtaagttccaggcagtcatgggacagtcggttttcgctttcctgcgcgatcagcgcctgacccgtgcccgtcagggattagagtcagaagggtggacggtaaaacaggccgcctactatgttggctatcagcatccaagtaacttttctactgcctataggcgcaaatttggtatgcctccgcgcgattctctttgtctctga

SEQ ID NO: 396483 - DNA, 2187 bp, Salmonella enterica
atgcgcaccagttcacaacaattttttttaaaaaaaatctgcctaccaccatgcctgctgtgcggtctggcgatttcagcccctgcttttaccgcggaaccacccaccgatagcaaaagagaagaaaccttggtggtgacggctcgtaaggttaaagaggatccgttgaaagttccggtaagcatgaccctgttcgatcgccagacgctgggagatcgccgaattgatgatgtggagcacttaatccgtgacgttccaaatatcagttttagctcattgggggatatgcgttctacgtatatgtcgatccgtggggttgggccgatggcccagccgctcggttttgatgatacgtcggtcgtgacctatattgatggtgtgccgcaaccggccttcggttcggatttgcgtttcctggatattgaacggattgaagtcttgcgcggcccgcagggcactgtgtttggacgcaatgcgcaggcgggggcaattaacatcaccacgcgccagcctggcgatacctttgaaggtaagttgcgtgtggaagcgggcctgaacaatgaatccgaaaatgttggtcaactgacagtttctgggccactgatcgatgaccgcttgggtgggcgtttctctgccgcctattctaacttgggcgccgatgtggataacaatgcgccgggtggcaagctgggtaaggtggaaaccggggtgttccggggttcgctggtttttacccctgatgatcgtacccgcttcgtgttgacaggcaactacgagcgtgacaacaacacaccgtcaaactttattctaaaaaatggcccaaacttccccacggtagaagttactcctaaaggttgggtcgatcgtgagatttccggtctgtcattaaccgccagtcgtcagtttgatcggatgcagttcacctctgtatctgcggtgaaccattacgattttaaaaacctgaccaataactccgaggcgctgacgtttagcaaagtgtttggtatgccgacgtcggcatttattccagctactgactggagtacatatgacgaaaaccagaacagcctgtatcaggagctgcgtctgagtagccttgatgatgcggatattgtctgggtcggcggcatcaactatctacatgacagctacaagttgactaccaaatataattccgcgttcttttcttccaccaatggtacgcgtaatggggattacacaaccaacagttatgccgcctttggtgaggtgacagtcccactgtttggttccgaaaagctgaaagggacgttaggcggtcgttacactcatgaccgtaaaacctatgaatcgctgtatcgctccaacggattccccgggacggtgacctccttcaatcaaagcggggtgctgaattacgacatggtgacaggccgcgtggcgttgagttatgaactgaccgatgactccacgatctatacaagcgtcgcacgcggcgcgaaaagcggtggtttccctaattttaccaacaacgcacccagtggcttgaaggatgatccttatgaggattcctcctcctggagctacgagatcggcagtaaaaaccgtttcctggatgggcgtgcagaactgaatgcctcgttgttctataacaccgtaaaagatgaaaacctgttcgcgatggattccgcatcattcacctttgtaccgaagccaatagatacccgtaactatggcgtggaactggatggttcgctgcaactggcagagcattggaaggttagcggtggggcgggttatacccatacggaattgcgtaatgtttcggatgatgtcgcggcttcatctggcgctcgtgatggcaaccggatacctgctataccgaaattcaacaccaacctgacactgcaatactacgattctgccgcctggctggggctgccggaagccaatatcttcgccctggcgcagcatcagtacgtcggcagtcgtgaagctgatgtcggcagccacttcaagcttgatgcctaccagctctacaacgccaaagtgggtctggaattcacctccttcgatgtctacgtctttggtcaaaatctgacggatgaacgcccgcagtacattggtctgtactacggtccgggcagcgaggcggtcagcgttggacatgggcgcgtgttgggcgtcggcacgcaaattaaattctga

SEQ ID NO: 396484 - DNA, 1488 bp, Salmonella enterica
atgatgaaattacgactgccaggttggctgttcctgggggtggcaatggctctgcccaccgcgcaggctgcaggtgaccgtactctccgggtggtgatgttgggtagccagagtgaaacgctcgattacgggcgcgcgcaaacctattacccctgggtggtgaccggcaatgtctgcgatgtgctggtggcgtataaacagggcaatctcgactatcagttgagtcgggccattacctccaatcaggatgccacgcgctggactatttcactgcgctcaggggtgcgcttttccgatggatcgccgctgaccgcagatgatgtgctggctagcctgcgttttctggccgcctctcccggttttgccggattcttcagcgatgtcgatatgcaggccagccatgttgtgaatgccgaagagctggagctggttcttacccgtccacgagccgatctggtcaccaccgtgctgaccgccgccagtatggtatggaaacagggacggggggatgtggcgatcccgatatgcagcggcccatatcaagtcacctccttccatgcgcagaacggggcgttgctcagccgcaacccctacgcatggcatccagcggcgtggtttgatcgtattgaaattcgcccgctggcggatgccacggcgcgggtaaatgcgctgctgagcggggcggcagactatgcctttgatattccggttagcagcgcccgcagcgtagaaggacgtcagggctggcaaatcatccgcagcggtgtggaaaatgccagtggttattactttgccatgaataccagggtaaaaccgtttgacgacgttgaggttcggcaggcgctgaaaacgctggtgaaccgtcagcaactgcttgatgtggtccttgggggctatggttaccgggggaatgatgttttcggtcaggggctcagtggttttgacaaccagctccctcagcgccagaccgatgctgctctggcgcaggcgctgctgcggaaaaaaaatatcacgcagctaaccttgctgaccgccgacctgactcccgggctgaacgacgcggcagaactattacgccagcagctggccgacgtgggcattaccctcaggattgagacggtggctgcggccgattatctgggtgatatttcacgtctccatcaggcgcagatgctgtcgatgtacgcgctaaatcgcccattcctggcggcgatcccgatgctgttcggcgatgacaacccctataactatggcgggtggtatccggacgattttgcggcaggggtagagcaggcgcgtaaaacgctcgatccacagcgccaacagcagcagctcaaccagttgcaacaacagttgtggcaacaggggccgtatttgctctgggggtatcgcgatcagctttcggcggcggtgacggctttgcagggcgttgagctcaaccaggggagccctctgttccgcagcgcccggatagagggcggccaatga

SEQ ID NO: 396485 - DNA, 948 bp, Salmonella enterica
atgatggccagatttgtcctctggcgtctgcttagcgcactgctgttgctgtggctggcgagcatgttgatcttcttcactctgacgctggcacccggagatgccgcagtgcaggcattgggtgaacactccaccccgcaagcgttgcagacgctacggcatcagttcggtctcgataggcccgtcgccgcaaggtactggcagtggcttaacggtattctgcgcggcgatcccggcatctctttgaccagccaacaaccggtagtcgatattatcgctcccgccgctcggcggagtgcgctgctggcgctgctggccgcctgcgggatgttgctgctggggggcacaggcggtgtactggcggcgatgcatcgggatcgctggcaggatcggctgctgtcatttatcgcgatgagtggattaagcaccccggaatttattgttgccacgctgatgatcctgctgttggcggttggggcggggtggttcccggcggtatccctgttgccggcttccggcaatatcagcgaccagtggtctattctggttctccccgcgttgactctggcgctgatcggcggctgttatttgctgcgtatgatacgcgcctcgttgataaggctgactgacgcgcccaacattctcagcgccagccttaacggtgttcgcgggctgacgctggtggcccgccattttctgccccaggccgcagggccgctggcccaattatttgccgccagtttaccctacctgattggcggtgccgtggtggtagaacgcgtatttggctttcccggcctcggcgagctgctgttgacggcgctgaatacccgtgatgccattttgcttcagggagtggcgatgctgctggcgctgattaccgccctgtgttggttcgcggcggatgtcctggcggtctggctcgatccctggcggaggcgctcgtga

SEQ ID NO: 396486 - DNA, 753 bp, Salmonella enterica
gtgagaatcatcgctttattgatgattgccctgattatctgtagcccgtggctggcaccttataacccacagcgtagcctcggcctggcctggcaactgccggatgaaactctgtggctgggcagcgatggtctggggcgggatgtcttgagccggctgctgagcggtggtcgcaatattctgcttttccccctgttgtgcgcattgtgctcctcatttttaggcagcctgtgcgcgctgctgctagttgctttgcccgatcgcggcagaaggctggtggtgttactggatccgctcctatacatgcccccgctgctggtactgattggggttatctatgtttttggcaacgggctggtcgcactgttgatcgggattactttactcaatatcccttttaccctgcgctatatacgttcgctggcggatccggtccttgataccggttatgtcgaggtggcgcgtgcggcaggcgatgcgctgccgttactgttatggcgtgaagtcctgccggtgattgttcccggtatcctggctgatgggactacccgtttagtcgctgcgatttacctgctcgcctcggccagttttctcggtattgccagccccggcgggatcgactgggcatcaatggtccgcgacgggttacccgggctgatgctcaatccctgggcggcgctgttacctgcgcttggtatcgcgctggtggtggtggcgatgagtttgcagactgaccgctggagcaagagctga

SEQ ID NO: 396487 - DNA, 1476 bp, Salmonella enterica
atgcgttgggtggtgcaggtttccggcctgacgatccgcaacccacagggcgatgcggtgctgcaggatattaattttgagctggctgcgggggattcgctggcggtgattggcagcagcggcgcagggaaaagtacccttgggcgtgtgctgctgggggacttggcctccgggcagcgccacgccggcgggcagattatctgctgtggctgcgaggtattgcaggccacgcctcgccagctccgtcagctcagattcaggtacaccgcctggcttggccaggacccggcacaggaactgacgccaggtatgtcagtgcggcgtcagcttaatgaatttcatcatggtgatgccagcgccattagcgagatgctggcttctctcggattgccgcaggataacgctttcctgcaacgtttcccccaccagctttccggcggacagcgtcgccgggtcgcactcgctcgggtgctattgaagcgcccacagctacttattctcgatgagcccttcgccggattagatcgccgacatcgtgagcagatgatggcggagctgcgccagctacagcggcaacatcggtttgccctgttgctgattggtcatgaactcaacaccgtggcggagatagcgcaacggatgctggtcctgcataacgggcagcagctggaatatggccgtacccggcagctttttgccacccccaaaagcccactgctgcgcgcgtggttgtcccctgtgacctggtcgcgaccggtcaccactcagggtgagccactgctgcgggtttcccgatggcatccagggcattcccgacagactgcgttgccagcgctgagtttcgcgctgcatccggggcagtgccttgcggtcaccgggccatcaggcattggcaaaagcactctcgcgcgatcgctggcgggtttaaatccatcccatcagggcgctatcacccttggcgatcgaccgctggcgagcgatgtgtgccggcgctcgggtgaacagcagcgcgccatcgcgctggtgccccaggacccagcccattcactgcacccgttacgcagcgttggacaacagctacaacaggcgctcgataggtaccgattatcccacccaggcagcgtggacgctctgctgcagcaggtcggactgcctggcgattatgcccgccgtctgccacgagaactttctggcggcgaacaacagcgcgtggcgctggcgcgggcgctggcaggtcagccctgtgtgcttatctgcgatgaagtcacctcggctctggatgtgctcagcacccgcacgattctgcaattgctgcatcagctactgacacagggcatggcagtgctttttattacccatgatttaccggcagccagacagatttgcaccgcagagctgcatctcagcagcggtgaggctgattcaggcgctgtgtttgataaggagatttgtgatgacttcaacatgcgagactga

SEQ ID NO: 396488 - DNA, 1764 bp, Salmonella enterica
atgacttcaacatgcgagactgaacctcagcaggtcgggctattacgaccggttcgcggctggattgcgctggccgtggtacttcaggtgggctcatcggcgctggtactggccccgctgattggtctgactgaactggcgcgggtgctgatgagcgcgcaggcagaccgcgcggccctggcctggcatatcgtgaaaatatccgctttctgcctggggggaggactggcattgcgggggctggccgacctcacgacgcacctcgctgataatgcattctccttgtggctgcgccgccagttagcgcgtcgtatggcgcacgcgccgctcagctggttcagcgccaacagcagcggcagaattaagcagggtatgcaggatgacgtgacggcgattcatcatctggtggcgcactcctatctgaatctggcaaacgctgccgccactcttgtgtgcgtctacggctacctgttgttcatcgattggcggatgacgctgatcaccctgattccgctcccgttcttttttctgctctatcgccagattatgcgtgccagtcaggccaaaatggtggaatacggccaggagctggagcaggtcaatcgctcggtcgtggagtttgtccagggcataccagtggtgaaaaccttcggccagccgggcattgctcatcaggcatatcgccgggcggtagacagctttcgcgatttctttctcgactgggtgcgtccgcttatcaaaccggaaagtctttcaggggtgattatcgcgccgctcaccttattgctgttggtgctggttggcggcgtcacctttattcatcttggctggatggatatctggcaactcctgccgtttgcggtgttgggactggggatctcggtgccgattggcacgttaagcagcagcgcacagtcactgcagatggcgaagggggcttttacacgcctggcagggttactggcgatccctcaacaaaaggagccggagcgggtgatgctcaatacgggcaaccaggtgtgttttgatcgcgtcagcttcagctacggacccgatcgccagattttgcatgacatatcgctgaggctggaacccggtacggtaacggcgctggttggagcatccggggcgggcaagtcaacgctggcgaagttacttctgcgctttgccgaacccgatgctggccggattatgctgggaggggtcgatctggccaatatcatgaccgaccatctctatcgtcaaattggctgcgtctttcaggaagtgcgactgctgcgactcagtatcagagacaacattgccctgggttatccgcaggcaaccgatcggcaagtgattgccgcggcgcaggcagccaatatccatcaacgcattatgcaattgccgcgtggctatcagtcggtttatggcgaagatgcttgcctgtcgggtggggaagcgcagcgcctgagtattgccagagcgctactcaaagagccgcagttgctggtgctggatgaagcgacggcccaggctgatgcggaatcagaagccgccattcaggacacgctctcccggctcatttctcaacagggtaaccgctcgctgctggtggtggctcaccgcctggcgacggtggttaacgccgataatatcgtggtgctggcgcagggacgtattacggaacagggaacgcatagccaactgctggcgaacaagggtgaatacgcgcgtctgtggcaggctcagttctcaccatcaaaggaggatgtatgctgctga

SEQ ID NO: 396489 - DNA, 1737 bp, Salmonella enterica
atgctgctgacccgtctctcgtcactgttgggcaaagacaacgcgaaggttctgcaacgttacctgagcctgatggtgcttttctgcctggtgcaggggatcgcttttgcgatggtcgtgccgatagttcaggcgtttttgcaggatgatatcacgcaggcggcatggtggttgttgccgctcacgctctgtacgttgctcgcctggtatcttaactacgttgcctcgttgggcggcttcaaggtggccatagcgttactgaataccttacgtcaccgcattggcgaccatgtggtgactctgccgctgggatggttcagtcccgccaatacaagccagcttggcgtgctgctcagccagggggtgatggaaatcctggggctgcccgcacatcaattaagcccgttaatgcgcgccaccttgacaccgctggtggtggtggcgattacctttttcttcgactggcgtatcgcgctgatcgcgctggttatttttccgctggtggcgctggtttattggtgggcgggcaggctggggcgcgccgcagatgaagccgttcaccatgctacggcagaagccagcgaacgtatgcttgagtttgcacaaaaccaaatggtgttgcgcactcacggctgcggcgaacagggacatgccaattttgatctggccttagtggcacaaaatcgggccagtaaacgccagctgtggctggtgctaccgccgttactggctaactcctggctggcgcagctcagtttcctgacgttgatggcaagcgtcacttggctggggctgagcgataacgatccgcagcagctggtcacgctgctggcgctgctggtgctcattaaccgggtgattgatccccttaccgaagtagccgcctatggatccgggatccgtatggcttctgcccaaatggatgcggtggagcgtgtactggccgagcaaccgctgccgcaggccgatgatccgcagccatacagcggcgaggctagcattcagttgcataacgtgacctttggctatcaagccgagcggcccatcctggaaaatgtgtcggttacgctgcccgccaatactaccacggcgctggtaggcctctctggcgcgggtaaaaccaccattatgcgtttgattgcacgtttctttgaccctgacagcggcagcattacgctgggaggaaccgacctgcgacagttaagcagtcgggagcacatgtcactgatcgcgccagtctttcaggacaattatctgttcagcggcaccctgcgggaaaacgtattgattggcaatccgcacgccgacacgcaggaaattgagcaggtagtcaggctggcacggctggacgagctgctgcaacgtctaccggatggctggcaaagccaggttggtgagggcggcggcctgctttctggcggtgaacgccagcgtgtcgccatcgctcgcgcattattgaaaaacgcgccgatattgctgctggatgaggccaccggcgctttggacgcagagaatcagtccgcgattgccgccggattacagtctctacaccatcgttgtacgttgctggtcattgcccatcagctctcgaccatccaaaatgctgaccagattctggtgctggatcggcagcacattgttgaacaaggcaaccaccagaaattactggccgcaggcggtcgctatgctgatttctggcaggcgcgtaaccatgctgaaggctggcgtctgcaataa

SEQ ID NO: 396490 - DNA, 201 bp, Salmonella enterica
atgaatagagtctctctggctttatataattcatatttccttcaaatggagcttaaccagaaaaccagcccgccgttgcagtatcaggctgcgatcccccttaaactcagcattattacatcaaattgcacatacgcggctacatccctgataattcatctggcgtttaatcgcacccttcgccaaatgcaagaaacgtga

SEQ ID NO: 396491 - DNA, 225 bp, Salmonella enterica
atgggggaatccccccataaggcatattttccactagtgaaaatgctaaatgaagtatgcacgttgtatatcattaattccgttaacgatatctttaatacgtatgagatcagctgttccaccagttcgttagataatgatacctttaggcagttaagtttcccacagttctttatacgattgggttgttttatcccgaacgggccaggcactggattaaggtaa

SEQ ID NO: 396492 - DNA, 249 bp, Salmonella enterica
atgttcaaatgtccacattgcggcgctacggcccgcacccgcaccagtaagcctctcagtgaagtcacgatccgtcagtaccatcagtgtcagaacatggaatgcggcttgtcattcacgacgcttaacagcgttgaaaaaattgtcaccaagcgtgagcggcgcgataaattagcgcctgactttattcctgcaggcgtctttcccgcctcgcactatggacgcgatcaactaaatttagcgatttaa

SEQ ID NO: 396493 - DNA, 264 bp, Salmonella enterica
atgagcgcgcaagcccgtaggcgcgcagcggcggcaaagtggcagcagttacagcgcggcgcggcggagttttcgatcaccctggcgcgcgggcgtgcggagttgtacccggaaatgcattcgacggtgaccggttttaaggcagatattgacgcccaggactggataatcagcaaggtacagcatgacgttgatagcaatggatttactacacagcttaactttgaagcaaaaatatctgactggattgcagaaactgaatag

SEQ ID NO: 396494 - DNA, 513 bp, Salmonella enterica
atgccggaatatatgggcgccctgttgtcagccagcctgtcacactcggcggatatgtttcgcaaaatgtactatgagaacggatctcatgctggctgcattctttacatcggcacatcacaggtagatgacgccggtgtaaaacagatacagcaaacgctggcaggagccaggaacaaaggcgcatttaagaacgtagtgatccacgccccaggcggcggcaaagacggggtacaactgatgcccttcagccagatatctgcaaaggatgagtttttaaatatcaaatcagctacgcgtgatgacatcctcgccgctcaccgcgtaccaccgcaactgatgggggccatgccggacggcaacggctcattcggtgatgtggagaaagccgcgcgcgtgtttgccatcaacgaactgatgccagcaatggaagcactgaagcacgtcaacgactggcttggcgaagaagtgatttgctttcgaccttacgccctgcttgaacccaccaaataa

SEQ ID NO: 396495 - DNA, 459 bp, Salmonella enterica
atggattttaaaaagtctttaactaatgggctcgaagcagcaaaaaaagcaaggaaaaataaagaggaaatacagggcgttattgatgaagttagtgaggcaattaatgattatagtaacgggctaatttctttagttgtaactaaagagcagagagtagctcaaaacattggctctttggtcggaggggctgcagcagcgtttggcttaagtccgtgggttcaatataaaacattatctcttttactaaaaaaagaccaattacagaaaaaagaaaaaattgccgaatggaggatagatgaaagtgatgggtatccttgcgtaatctcttataacggtgatgatattagttgtggaacaaaagaaatgcttgaaaaggcgttgggtaatctaatggcgaatgcgtctactggtgagcgattacttaaactcataactgaaggtgagcagtcagagtga

SEQ ID NO: 396496 - DNA, 909 bp, Salmonella enterica
atgagtaattcagtttccattgcttggtggaataccgggttgtcacctgctgccgctagaggtagggcgtctgatagtgattatcaactggctgtatctgtgatacttaaaattattgctgaatataacgttgatatcctatgtcttggggagatatcacctgaagaaataaataaaatacaatctttcgttggcctcttgggtttttttgtttatgacgggacttatacagaaggaagaataaaacacgatttatgcgcaataattagaatcgataaatttggtgtcatttcaaataaaagcgtaatagagcaaacgccaattggtcaagttagagctgggcaagagttagaattaatccatgtgaatagtggtgatgttttttttctatatatatctcactggccgagcagaaactatgaccacagtgaaggtatgccgcaaagagatcaacttggtcgaactcttaaacaagcaatagagcgttgtaaagaagaaaaacaaggtagatatatcatattggttggtgattataacgatgagccatttgatacatctcttactcattctctttacgcaacgcgagatagaaatgtagttctaaaaaacaacggttttttctacaatcctttctggcgttatcttggtattggcgcaaaatcagaatctgacgatgaggctgatgatcgatgtacatatgggacttactactataagtctgggaaaatcacgaaatggcatacatttgatcagattatgttctcatcttcattcctgaaggggggcgattggacattgttagaaaataaagtgaatatagttaacagtgatgatttacgtaatttaatattgagtaatgaaaccaaatttgatcacctgcctgttgttgcatcttttaagaggatatga

SEQ ID NO: 396497 - DNA, 285 bp, Salmonella enterica
gtgggcaagtattttgatgactatgaacgggaagctgactatcaaaactggctctattatcgtgagtcttctcatgaggaacgtgagtcgaaaagtcagtatgttcgctcccatgaggggctaaaagagaatgtgactaagccagtggtccaacaaactgaatggacagtagtagacgtgtttcgtgattaccctgaacacaaagctaggatcgctgcagcggaaaaaaaattttttgaggataaggtgaaatctcgccattcagaagatgatgaaagtaactaa

SEQ ID NO: 396498 - DNA, 2580 bp, Salmonella enterica
atgacttcagttcgccgcgcccatagcatgaccgccatgccggggggctctatagagccagcccggtatgcttacgcttggaatgagccaaaagcagccatcttcgttgataaggctcctgctgttgatctatatgaactgggccaagagcaggagtttttcgcgtgggtagaagataccctcaaaccgttacctactttcattcgccgccgcattgcttcttacattaatactgttcacgaggacaaaggacgtcatatcgcaaaactgaagctacgcgatatcgttaagcgcgagcttccccacgtccgaaatgtcacgaaacaatacgcggtgccagaagacagtgattggatcattttttctgaactaaacccactatttcacacgtttaaaaatctgcgtgagctagcgcgccgcttcaataatttggcggattacacggatgaagatattgatttgctcgctcaggacatagccatttatgccaatgctgttttggctgaggtgagtgaaagtgccagcgtgttcagtgatactgaatacagcaaacgtatggtgcgcgaaggctccaggctaattgcgtatttcaggttggtgccgccctgggcgatgaagcgtcggatggcgcttgatgaaatggcggcagcaatacaaaaaaccattcatgaccgcttttggtcgcgccttctgcgcaagtacgcccgccgctggcgcgagcatttgcacattgcttatggtgatgtacgtcgcgatgtctcaccgtattgcagcaaacaccacgttacgcagtgggattcccgccgtaagcgtagccgcgcaatcatgagccgccttgaacttgaagatcaggtaactggcgagcgtatttctctgatagagcagattgataaaagtatttctaaccctgaaaagcgccgcgttgagttgatgacgcgcattggtggctttgagaaggtggcaacagaaagcggttttgccggtagtttcttcacgttgaccgcaccgtctaaatatcatgcttttacagcgttcgggcatcgtaaccataaatggaacggagcaagtccacgcaaaacacagaactaccttaatcacgtctggcagctgatccgcgcggagcttgcgcgccgtgagattcctgtttttggccttcgtgttgctgaatctcaccatgatgctactccgcattggcatgggcttctgtttacggccccggaacataccggcgagttgttggaagtgatggaggactacgccacacgtgaagatgcaaacgagctaaccggcaagagtggcaagcaaccgcgttttgagcttaagccgatagatccggccttggggagtgctactggctatgtcgttaagtacatatctaaaaatattgatggctacgcgctggatggtgaaagcgacgatgaaagcggacgcccactgaaggaaacagcaaaacacgctactgcctgggcttcatgctggggcattcgtcagtttcagtttttgggtggtgcgccggtgtctgtctggcgcgagttgcgccgcctgaagaatcaggaaatggcagatcgtatcagtccggttttcggtgagttacaccgcgccgcacatgcggggaactggcaggactacatcaccttgcagggtggcccgttcgtggcacggaataggcttgtgttgcgcgcctggtaccagtaccgggatgagccgagtagctacggcgagtttcagagagtcattaaaggcgtagtcatgccagcatcgaccattcctccggtcgaaacccgtctccattcttatcgtattgtcagaatgaagccaaaagcagacgacgacgccggtcgaggttttgaccttaagggcgcgcccgcgtcctcttggactcgtgtcaataactgtactgagtacaaaaaacatacgaatcgcggagtgaaaaatctgccgactgaagatccagagcaatatgaaattggtcaaatgagccgtgaacagaaaaagcggcttaatgagagcatcagaaactacaaaccagagcggcaaaaatcaccggctgatgtatttgagtcgcttgccaatgctattaccgcttcagattgcgataaggcagatcaggcacgcgctgaaaattacatgaaagtggctgcagctatccgcgatgaagcggcaactaggcggagcagtgctgtggaggctgtgccaatgacggatcaccttcgctatcagctttcctactggggtataaaatctaaaccagatattcatgctcttcggtgtggagcatcgatttcttttggtgatcgacgagtttacctgaaggatggctatctggtagaaaaggtcaaagcgatatactgtagggctagggattgtaatgctaagttaaatgaggatgacataacctatggtgacgaaaaactctgtctgacttgtacattgaagctgaggggcgccgaaatagttgaacagcgccgctatgagatcaggcaaaaacttaaagcggaaagaaaacaggaaaatgatgcgcttctggaaaggctaagggttgcgctgatcaaaggagggcagcgtgggcaagtattttga

SEQ ID NO: 396499 - DNA, 174 bp, Salmonella enterica
atgaatcccgttgaggtcgttgtgacaaaggtgctggatgtgctcccgcgccgtaattactggataactcgtgttgaggttctgggcgaggggggttacagcaatacagatctgatcacctattcagaacgtgacgccagagcaatacagccaggcgacatggtttccatctag

SEQ ID NO: 396500 - DNA, 984 bp, Salmonella enterica
atggttaactcccctctgatctgggcgggcggcaagtctcgcgcgatgcctcatgtactggaggctttgccaaagggtgaatgtctcgttgagccttttgtaggtagtggtagcgtctttctgaacactgactataaaacctatattctgtgtgatagcaacgcagcgcttatgaacttctattcaatattgaagagcaatactaaatcgttgttagatgtcgctgctagtctatttgatggcggtaataatgaagaggtatattataaatgccgcaatgaatttaatgattttaatcgtgattttccccagcataataaaaaaacttctgatggaaaagtttattatcagagtgagcttgtaaagtttgcagcattattcctttatctaaaccgtcattgctataacggtttataccgagtgaatgggaagaatgaatttaacgttccatttggtcgtcgccgcaagccaattttcccagttgcagagatccagcactttgcaaaacgagcatatgaaaaaggtgctcagtttctttgcgctgatttccgttacaccatccctgttgctagccgcatatttgagcgcacagtaatttactgtgatccgccttacctgccagcgagcaaaacggctgattttaccgcgtacggtaaacccttcactgtcgatgatcaccgtgacctggttgagtcgttgattaccgctcataacaacgaaggatgccagtctgttttttccggtagcgataccccggaaacccgcaaaatttactacccgttcacccttaattcattcgaaatccgccgatctgtaggggccaaatctcgcaatttggctggcgaggtgatcggttctctacgcgtctgtggttgttgtgggcgtactggcggcggttgtcctgattgcggtgctgtgatgggtggtgcgacctattcagaaatgattgcctctggtgcttttgatgatcgggaggtgttctga

SEQ ID NO: 396501 - DNA, 168 bp, Salmonella enterica
atgacaattcaaacaaatgaacgcgcgcacctgcttgggttgttacgtatcaaattaaccttactgaaaaaagaaaagctgtccaccaatgaaatttatcgcagcctggaagactggatctacaacagagaacaggccgcagaaatcaaggagcaaaaaaatggttaa

SEQ ID NO: 396502 - DNA, 282 bp, Salmonella enterica
atgactacttcaaccgcagcaattctgaatgcccgccaaagcgtcaacgcttcccggcaggacggaacccgtacgccgtcccgtagtggctatagtccaaatcaccaacacagcaagtcgcgtaatgttgttcagggaatggcgctgtctgatattgcgagaaatggttttgaggtgcgatgtaaagagacgggcattcaattttctattcttccgggcggctctatttgtgacgccttcagtgttgaattagaaaaatactggaatagcggcgttcgctaa

SEQ ID NO: 396503 - DNA, 186 bp, Salmonella enterica
atgatgcttatccaaatcaacagtaagacagcaatctatcgcggtttcaccatcgtgaagctaccgcgcaaaaaaccatattcgcgccagcgctaccaaatcaccaaaggcgggaattatctggggttggacttcggtctatctcaggcccgccagacgattgatctgcttcatcgggggaaataa

SEQ ID NO: 396504 - DNA, 273 bp, Salmonella enterica
atggaagctgctgattacgttattcagtacccgcttgatgcggtacatcctgataagttcgcggaattgctaggtaaaccacgcacagccgtacaaaccatgattgaaaaaaataagctgccgattattgagtttcgtgatccgtcgaagccaaaagcgcgcgcgggtgaaaagctggtttttgttcctgagttcaatcgaggtgtacgtgaggcgttttataaccgccctgtagaacagcgcgatgcctggttgctctggatgggcctttaa

SEQ ID NO: 396505 - DNA, 294 bp, Salmonella enterica
atgaatcttgctcaaaaattacgagcgatcaggaaggcagaagggctaacacagtctaaattctgtgaaatcagtgggatagcgttaggaacgctgaagaattacgaaggagggcatcaagagccaggcatacaagtgatcatgcaggtaactaacacggcgcattttgaaaaatacaccctgtggttaatgaccgataagacagcaccagaagccgggcagatttccccggccgtcgcacactctgggcaagacgaaacaacctcgtcaccatcaggccgcaaaactggctaa

SEQ ID NO: 396506 - DNA, 981 bp, Salmonella enterica
atgactatcaaaagactcgatgatgggcgttatgaagtggatatcagaccgcgcgggcgtgaaggacgtcgcatccgccggaaatttgagagaaaggctgaagctgttgcctttgagcgctacacattagcgaacgctaaccagaaggaatgggcgggccagagaacagatcgcagatctctatctgaattactggatgcctggtggaagtatcacggtcaaaaccatgaacacggtgagaaggaatttaaccacctcacgaagacgatcggcggcatcggtgacatacccgttagccgcgtgagcaaacggctcctgatggactaccgttctgtgcgacttcgtgacggtatcaaggcatcaacaattaaccgtgatatgtaccgtttttcaggcatgttcaccaagttgattcagttggaagagttttccggcgcacatccagtgcatggactaccgccactggcagaagaaaacccagaaatgacatttctggaaaaggaagagatcagcagcttactaaatgccttaaccggcgatgcaagattgattgcccttctgggcgtcagtaccggcgcgcgatggtctgagttggcaacgttaaagccttctcagatcgtcaattgccgcgtgactttcctgaagaccaaaaacgggaaaaagcgcacagttccaatttctgcggaactggaaaagctgatcaaaaaggaggcaagtgcgaaactgtttaaagtggactatgaaaaattttgtctgacgctgaaggcggtaaaagctgacattccgccgaaccaggcaacacatattctgcgtcataccttcgcaagtcatttcatgatgaacggaggaaacattatcgcgttacagcagattttaggacatgccagcattcagcaaacgatggtttatgcgcatctgtcgccagactatctgcaaaatgctgtctcactaaatccgcttgccggtggcgtatcgctttga

SEQ ID NO: 396507 - DNA, 846 bp, Salmonella enterica
atgtcagaacacactaatgccgaccccgaagtcttaactgaccataccgatgtgatttgctccaccagcattgaacgtatcgtcaccggacgtaacgctgcacttgaacagatcagaaccgtgactgagcggattgcagaaatatcaacgctgaccagcagcattggcggaaaaacagccctggactgggctatgaagcaggacttccgctgcggctgctggttgatggaaaaaaccgaaacagcgatgaaagccatcacccgcaatctcgaccgcgacatatggcgggacctgatgaagaaatcgggaatgttgtcgattatggacgctcaggcccgtgaccagtggtacagaaaccttgaaggtgatgatattcctgccatcagtgaagcgaatatactcaatacctttgagcaactgcaccagagcagggatgaggtgtttgaacgtggtgtgattaatgtgttcaaaagcctgagctgggattttaagtcgaactcgccctgcaaattcggaccgaagatcattgtgaatgggctggttaaatacgacagatggggatacagccttaactggagctggcagcgtgaccgacttgctgacctggagcgtatgctgatgctgctggacgggaagcccgtccctgataaccgcgccgatgtgacccgacgtctgggtgatcacattcatgagaacagaggaggtaacagtttcgaggacgggatgtttaaaatcaaatactttcagaagggaacagcgcacatcatctttaaaagaccggagctggtggacaaactgaatgacatcatcgccaggcactatcccggaatgcttccggcaaaatga

SEQ ID NO: 396508 - DNA, 885 bp, Salmonella enterica
atggttaagttaacgggcggtgaccggagcaggatacagcatctggagaaacgactccgggaggcattaaacaggaatggttatcatcctcctgccggggcaggagaaaacgactatcgttcatatcagcaaaaagtcattatttatcttcggagtattaacgagcccgaaaataacattaacgcctttctttctgaaacagatcgtctttattcagggatgtttccatctgaaagtgatacagagtggtatcgaaatgatccacgggcgagtttatggctggtttgtgaactctgtgaggaactgaagaaaaataaaattgagcataaggccgactttttatcaccggcattattacagccagaccataatgtaagagttgatgccatgcgtcggtgtattaacgactggcctttattattcatcacacagaatgaattcatcagagacaaagggattgaatgggctgaccttctggataaccataatttattcagggacgtaagttccggcaaagtggatgttggttcatggctgaaaggttacattaaagataatacaccaacaggtttaaaccgaatttgcggtgagtctccggaagaggtcatggcctggtgctatgccagctatttcatctggagaaaaaacaacctgcacttacctgattcagttgagctgtttaacaggaaattcaggagcgcctgggcaacccagaaaaacagaatcaaaaataaggttgaaaaaaacctcagaccactgaacgtgcatatttcacaacaggcgcatgatatgctcagagagatgtctgtgaaaggcggcgtatcaaatgaccggattattgagagcgcactcaccctgatgtatgacagtaaaaaacgtcagtaa

SEQ ID NO: 396509 - DNA, 654 bp, Salmonella enterica
atgtttttattcgatgacatccacccaatggtgcttgatccgaagcatcatcctttcaacgtggcttatctgccacgtattgcacaagtactctgtaatgctctgcaggagcatccacgcaccacggttatcagagtggatttgcacttaccggaagacggggatgtgggcgacagcattgccagtgaggctgatttaagccaggggttaatgtcccggtttatcgactcactgaaagcgcagttggtcgcttaccgacaccagaaagtccgggaaggtaaacgctgccatcgctcttctgttcgctacgcctgggtactggagtggcctgagcccgatggtaaaaagcattaccacctggctctccttgtcaacaccgacacgttcaatgccctgggaggctacgatgaacaggggaaagggctggcctccctgatccagaatgcctggctgagggcaatgcgggtccgggactggtcggaatacctgacgctggttcactttgctgataatcctctggcatacctcgacctcagtaaagcggatttcagggataaactgaatgcactgactttccgtctgagctacatggcaaagcatcgaactaaacgctacagcagtaccgaacgctcattcggctgcagtcagggctga

SEQ ID NO: 396510 - DNA, 411 bp, Salmonella enterica
atgtacgccaaatctttcatcgctctcgacggtaacggtcgtctgaccggtgcccgtaccgcgcagactgccccttacgaccgctatacctgccacctgtgtggtagtgcgctgcaataccatcctgaataccagaccgaacgcccgtggtttgaacaccggcacgacacgctgacggagaacgggcgacagcactgcccgtacgttaacccggacgccagcgaagtccggctggtgaagcgtctgcaacggtgggtaccgcaagcgctgccagtggtacgcaaagccggatggcgctgtgcaaactgcggtactgattattatggggagcgctactgtctgaactgccataccggtgaatacagcactgagattaacactctggcggaggtgacgtcatgcgtatgctga

SEQ ID NO: 396511 - DNA, 405 bp, Salmonella enterica
atgcgtatgctgaagtgttatctggcaaataaccgtgaaggtcgttttgtgacggctggcgaagcaatgcgtgctccgggacaggtatggacctgcacctcctgtggctgcccgctggtgttacatgccggttcgtccgctgaggccccgtggtttgaacatgatcagcgaacagtggcgacgggggttctgatgcagtgtgcccatcttgatcccgaagtgaaagccgaagcccggcacagaaaactgcgcaatatcatcggcgggctggatatgccagtgacggtacggtcctggtactgtgtctggtgcggacaccactacagtgggaagaagctttgccccgtctgtgacacgggactctacagcacagagctggcgaactggctggtatccggtaactga

SEQ ID NO: 396512 - DNA, 609 bp, Salmonella enterica
atgtcgacccgcccccgaaaaccaggccttctggatccctggcatgagtggctggaggaacagcgtgaaagcggtaaccacaatggcagccagatatggagggagatggtggcaaaggggttcaccggtagcgaaaccacggtcagggatgaggttgccaaatggcgtaaaggtgggagcacatctgttactgcgccagcccgtcttccatcagcttcgcgcgtgagccgttggttggtgccctggcgaataataaggggcgaagaaaattatgcctcccgcttcatcgggctgatgtgtgaaaaagagccacaactgaaaatagcacaacaactggcactggacttctaccggatcctgaaaaccaaaaacaagcaacaacttagcagctggttcactaatgtcagcgaaagcggcccggttgagcttcagcgtgttgctgccgggatggaagctgatgcagcagcaatatgtgaagcgattaccaaccgatggagtaacggtgtagtcgaagggcatgtaaatcgcctgaaaatgctgaagcggcagatgtacgggcgtgcagggttcgagttactgaggcgacgagtgatgagtcctctggcctga

SEQ ID NO: 396513 - DNA, 840 bp, Salmonella enterica
atgccctcacttaagacacttttgcagttgccttgcgggtggcaatccagccgacaaaatgttagttctgatgggataaccctccatcttcgtgccacacgtaaaactgcactatgtcctgaatgccttaagcgcagcaaatcggttcatagttgtcggcggcgccgaatacagcatctaccttgttcaggccaggcgctatggctggtatttgccgtccgtcactggtactgcagtaacccagcctgttcacgcaaaatttttgccgagtcgctggctcccttcgcaggggcacggcagcagtcttcacaggcgttacaaaatttacagcgtcagctgggattaatagccggaggtgaagctggaagacgggcggcaacggcagcgggtctccgtagcagtgcagatactcttcttcgcagagttatcaataccccggagacgaaaccgccaggaaagcctcatgttggtatcgacgagtgggcgtggcatcggggccaccgttacggcacgttaatagtcaatcttgatactcaccgtcccctcgtcctgcttcccggccgcgatcagcgtacgctggctgcctggttcagaagatatccggaaatacaggttgtctcacgcgatcgcggcggtatctatgctacagcagcacgtgaaggtgctcctcaggccaggcaggtggccgatcgctggcacttgttgaaaaacattggtgatgcactcgaacggatgatgtacagacatatgccgctgatacgtcttgttgccggtgagttgtcaccaaagaccagaacgggtacaaccagctccatatatccgtcgcccggagcgacttaa

SEQ ID NO: 396514 - DNA, 1197 bp, Salmonella enterica
atgatagttaaacctttgattgaactttcaaaaaaaatatcaagcggactaactcctcttcgtagtaatcctgaattctgggataatggaactattccatggttaaagacggagcagcttggcgaaaaatatatttatgaaacgaatgaacatatttcagaagtagcattggaaaaaacagcgattcgtctttttcctgttaattcactatcaattgcaatgtatggtgaaggtaaaactcgaggcaatttgtctatcctaaaaaaatcaatggctacaaatcaggcctgttgcaatgttgagattgattctgataaagctgattatgaatatgtttattattttttgaagacacaatatgatgagcttcgccagctatcttccggtgttagaaaaaaccttaattctaacgatataaaaaactaccctattcggttaccatcttctctggacgaacaacgaaaaattgcatgtgtcttaaaagtattagatgacaaaatcgccctcaacaaccgcattaacgccgaactggaagcgatggcgaaaacgctgtacgactactggtttgtacagtttgatttccctgatgccaacggaaaaccgtataaaacctccggcgggaagatggaatataacgccacgctgaaacgagaggttccggtggggtggaagataaaaaaaattagcgaaattgcattggttaaagccggaggtgataagcctagcaattgtgtgggttttcgctctgatgaatattccattcctattttttcgaatggaatcagttctgaaggtttatatggttatactaatatttcagttgttaataagccgagtattactgtttccgccaggggcacaattgggtatagtgtactaagattaaaaccattcttccctataataaggctattagttttaacgccttatcaagataatgcacttaagtttctagaagaaacaataaagagattctcttttgagaactcaggctctgttcagcagcagctaactgtacctcaaatatcagagatgagtattttatatccaattgagaaattgttaaatatatatacaaagcgaatatggcctttaatcaaaaaaattgaattaattaaggaacaaaactcagagcttcagcaacttcgcgactggctcctccccttgcttatgaacggacaggtcacgatcaaataa

SEQ ID NO: 396515 - DNA, 459 bp, Salmonella enterica
atgggcgtgtcgcgtgcgcagttatcactgcgggttaatcgttctgcctgttggcaggacaggcgctgtcaccgtcgggatgaggaagctgacgtggaagtgctgtcgcgcatcctcagtatcatcagtgacatgccttgctatggatatcgtcgggtgtgggcgacgttgcgcagacagcttcgtgatgaaacactgccgccggtaaatgccaaacgggtttaccggataatgagtgagcataacctgctgttactgcatgacaagccagagcgtccgaagcgtgaacataaaggccgtatagcgatggcagaaagcgatatggggtggtgttcagacgtcttcgagttcgggtgtgatgatggtgaaaaactgcgtgtcacggtttcaggacgatggcgtgtagttcacttattgaatcaggattgtggtcgagggatgcagtggaacggcagatga

SEQ ID NO: 396516 - DNA, 192 bp, Salmonella enterica
atgcaggaagccctgagctggatgcgcagtaatggagaagaaaccggggttgaagatatcgcccggttatccccactgatgcacgggcatatcaatatgctggggcattatacgttcacgctaccggaggatattttaaagggagaactgagaacattaaattacaatataaacaatgaattatcttcttaa

SEQ ID NO: 396517 - DNA, 1227 bp, Salmonella enterica
atggaagatgtcagcgttttgaatgaaaagattttcagtgcatcaacggaaaatgaactgcaggaacgatttaaagatatataccaaagtattaataatgaaagtgaatatgatgattcaggttcagtctcatttttgccactttcaaggctgaactcccgttctgaacgggcagaagcaaaggacatcatttcagttgtgattgaaagcggatgttttaccagtggcccctatatcggagaagtagaagaaacattaagaatattttatggtgctcatacctgtattgccaccagtagcggcaccgatgcgttaaaaatagcccttaaatctgttggtgtaggacccggtgatgaggtcattgttcctctgaactcctttgctgctacggaaaatgcagtgatggccgtgggggccgttccggtcttcgctaatatcgacagttctttcaatatgcttccggatgaagtggagcgcctcagaactacaagaactaaggctgtgttaccggtctgtctttatggctcatgcatgtatattgatgccattcaccgaattgcccgcaaagccgacattcctgttatcgtggatgcagcccagtgctttggtatcaggtcactcatcggtcactgtgatctgctggcgttgagttttaatccgttcaagaatattggttcttttggtaagtccggtgcagtattgacccgctctcctgaactggcacttctggcgaggcaatattcctatcacggatttgctgaaggtaaaaagaatattaaagctcaggactggggattaaacagccgtatggataacctgcaggctgccacgcttagtgtcaaacttcgccactttgagaataatgccagaaaacgctgcctgcttgcagcccgttaccatctgttactggcagacctgtcacataaaatgatacttccgtcagatatccttcagaatacatggcatcttttcccggttctgctctgccagggcgagcgtgattctctcttcgcctttgcgcgtgaaaggggtgtggagttagatatttattatcctgtcctttcacattgcggagaacatccgctggctaccggatattcccgtcgggagcagttcagtgcttctgaaagaatacattctgcattattccatctgccactgcataaccatatgtcgttccaggagcagaacatcattaccggggtattgcatgactattttaaataa

SEQ ID NO: 396518 - DNA, 834 bp, Salmonella enterica
atgactattttaaataaagactggccggttgaacttccgctcccgacagtaattcgcacgatagtgtgctgtgatcttgatgaaacttatattccttcggacaccgaaaaaaaggcactgggaggggttgaactgctggagtcctatattacatcccatgcagaagaaaagggcattctcgctggctggatcacaggaacaaatctggattctgcctggcgaaaatccaggggctatatttcgcgaagccctcactttatctgctgcagtctcggcaccgaattttactgggtcaaaaatggcaggcttagaccctctgaaacctgggcagagcggatactccgttcaggctacagccttcagaacgtcaacagcctggtcaggatcctgatgggaaaagggatgcccctgcagagacaaccggaggattatcagggcccctttaaagtgagctattactaccctgagggagcttcgatggccggcgattttgccaccatccaggctctggctgacgaacgaggaattcgtgtcgtttttacccgctgtaacccggcggcaggagatccccctgactgttatgacgttgaatttatccccttctgttgtggtaaggatcaggcagtgtcttttctgatggaggaaaccgcgctgccgaaagaagccattattgcctttggagacagtgcgaatgattttgccatgtttgcacaggccggaaaaggctatctggtggggaatgcggacccgttcgcgatcagacagtatggcagcagcctgaacgctgcttactgccacgggatacttaacgtacttaaggagctacagggatga

SEQ ID NO: 396519 - DNA, 1017 bp, Salmonella enterica
atgatcatcggaattgtaggctgtggggggattgcccgcgcccatgtcagtgcactttgtctgaatccgctggtcaccggactggccctgtacgatgtgagtgcagataacgtgcggctgctcagcgaaatcagcaccgtgccggtgatatgctgccaagatctgaagcagcttgccggagtcagtgagggtttcgttatctgcacaccaaaccatctccacgtcagcgtggcagaggaagtacttcgctacaaacagctcccttttgtgtgtgaaaagcccctctcaacggatctggactcagcacagtatcttcaggaaattgccccacaaggcagtatcgtgtcttttaactaccggtataaccgtgttatcgacacgatgatgcgtctgagaaatgagagggatttaggtgaactgcatttcttctcagcagagtttaataaaaattctgcactgacccgccatcacctgacctggcgtgactctgcacggcagagcaaaagcagcggagcactgggcgacttgtcctgtcatctgcttgatttattttgttttataggggaaagtccggttgtggttgatgggatcaggacggtgaagggtacgcgcgtgggtgcaaaatcagatggccgggttgaagtggatgataacggctatgtgatgggcagctcagagaaaggggcttatttcagaattcatgccagtaaatcggaaacagggcaggatctggggctgcatatgcagctcgtgtttgaaaagggtgaaatcagatattcaactcatcatgaaaacagtctgctcttggtcctgtttaatgagacggacgcggaaaccgtgggcttcgacggcctaaagcgtttacccgatccaccacgggagcttccgttctggtctgattcgtttattcaccttcatgacgactggtgtgcccttattaaatatggccacgcagccccgaagctggcggatctgtcatccggccttcatatacaggaaataattgaggcattctga

SEQ ID NO: 396520 - DNA, 270 bp, Salmonella enterica
atggacaccattcttttaactgggctgtttgccgcatttttcacgacgtttgcgttcgctccccagagcatcaaaacgctccggacacgcaacaccgaaggtatctccgttgttatgtatatcatgttcctgacaggtgtaattgcatggatagcatatggcattctgcgatctgattttgccgtactgaccgcaaatattgtcacactgtttctggctgcaccggtgctggtaatgacacttctcaaccgcaggaaaaaacacgtatga

SEQ ID NO: 396521 - DNA, 1533 bp, Salmonella enterica
atgaatattgcgatcatcggcgcaggacctgccggcatcatttctgcccgtaatgcgattaaggcggggcactccgtggttctgtttgagaaaaatgcccatattggggggatctggaacccctggagtggtggagcttaccgtaatgcctgtatgcaaaactcccgttgtgcattccattatactgactttcccccaggcaatattgatgaatttccgggtgtggcgcaggtattcgcatatctttcggcggtgaccggagaggatgccctccgtgcgtctacccggcttaatactgaagtggttgcactcagaaaagactccgggcactgggttattcgcagcacctctgcaggaaatgaccgggaagatatttttgaccgggtcatcattgcaacaggggaactctggcaacctcgccggcctaccctgccgggtgcggaacacttctccggcacgctgatcacatccaaggattatcaggagccggaggtatttaaagggaaaaatatcctcatcataggcggtggtgtcagcggggcggatattgcctcagaccttgttccctttgccagaagcgtgagtctgtccgttaaaaagatggggctgtatctgccaagacaattccggacgggtccgaacgacatgatgcattcctatctgggccggtgtctgctgagtcgcttgagttatgcagattttgtcggttatctcgataccacgatgcctgactacatgcagacctaccgggcatccggtttgttgcccaacatggcgaacaataacgcggtgcatgttaacgaaaaaatcataccgaatgtggccgccggactgataaaagttaaaccccaggcagagcgtttcaccggagaaggggtgattgagttcgtcgacgcaacgcaggaaaaatatgatgtcatcattacctgcaccggctatgaaatgcctgattattcgttcattccggggtttgacagggcacagctgtatgagcactttttctggacggaagatccttcgctggccgtcataaatccgccggtagatactgccggtttcggggccgcgttcccctattttgacatcatcagccagtgggtcatcaacgtattctccggagagtcgcctcttccggaaaaagaagccatgcgcaaatggtgcgctgagcacatggcttcacttcatgttaagcgcttttatgacagttggctggaaaccatccggattggactgctggcgggccttctcccggatccagcccgcgacttttccctatactggaacatcatcagcagtgtggtcaagcctgcctatctggccagtcctcccgcagctccggagccgggtatgatggacagcctgtttgatttccgggccgccagaatacgcatactgtcaggactgggaaacgatgcactcggttatttgctgaaaaaaggtgatatcactgacgcagaataccaggcggcactggaaaccgatccccggcagtcgctttctgtacatctgccgtattcgcagacctacctctga

SEQ ID NO: 396522 - DNA, 453 bp, Salmonella enterica
atgaaatttatggaatgtgctgttcgggatgtgatttacggaaccaatgtccgtattgtcaaaccggccaacatttatgaatgtgaactccgggataacgtgtttgtcggccccttcgttgagatacagaaaggctgtctcattggcagtggaagccggatccaatcgcacacgtttatctgtgaaaacgtaacactgggtgagaactgtttcattggccataacgtgacgttcgccaacgaccttttcaggtctggagcgccggacccgtcaccggataactggatcaccatttccctgggggattcggttactataggcagcggagccaccattctgtcaccatatatctgcagcgggaccgtcattggcgcgggtgctgttgtggttaaaccgatagaaatcaaaggtatttatgcaggaaacccggcgaggctgattagatcattataa

SEQ ID NO: 396523 - DNA, 573 bp, Salmonella enterica
atgcgactttttggttatgcgcgggtctctaccagtcagcagtctctcgatattcagatcggggtgctcagagacgctggggtgaaagccaatcgtatatttacagataaagcatcaggcatctctaccgacagagaaggtctggacatgctgcgaatgaaggtggaggaaggcgacgtcatattggtaaaaaaactcgaccgtcttggccgcgacactgctgatatgattcacctgataaaagcattcgatactcaaggcgttgcagtccggttcattgatgacgggattagcaccgacggaccaatggggcaaatggtgatcactattctttcagctgtagcacaggccgaatgccaaagaattcttgagcgcacgaatgaaggcaggcaggaggcgaagcttaaaggcatcaaattcggacgcaagcgaagtgtagacagggatgccgttctggaactccatcagaaaggtattggtgcaactaatatttctcatcaactcagcattgcacgttccactgtctataaaattctcgaagagcagaatcgggttgtgacttcaacttactga

SEQ ID NO: 396524 - DNA, 735 bp, Salmonella enterica
atgcccgtcgattttctgaccacagaacaggaactgaattatggtcgctatgttgcagaacccaatgacgtgcagctggcgcgctattttcatcttgatgagagggatcttgccttcattaaccggcgacggggaaggcataaccggctgggaattgcgcttcagctcaccaccgcccgttttctgggcacttttctgacagatttaacccgagttctgccgggtgttcagcattttgtcgcggtgcagcttaacatccgccgtccggaagtactttcccgctacgcagaacgggattccaccctcagagagcatactgcgctgattaaggaatattacggttaccatgaatttggcgatttcccctggggttgccgggcacaggctaatccctcgcaaaagcggcatagtgccgccggaaacttcagcattttgctcaccaagccaatgaagcatatggtgcagatgcagcgtgttttccacctgcagcgtgacgcagtgtgctcctgcctttacgcttgcttgcacgacgggccagggattatccaccatcaggtgaacatccttaatcatctgctgcggcaactgcgcgacagcccaggggccaacggtgaactgagggcaaaaatgtccgtccatcagatccaggtgaataacgggttgttcaagcgcgcgaagattttgctgatactctccgagtctgagccactgaccggcaagaatgccgatgcttaa

SEQ ID NO: 396525 - DNA, 291 bp, Salmonella enterica
atgcatgtcactctggtggaaattaacgtccacgaagataaagtcgacgagtttatcgacgtatttcgcctcaatcatctggggtctgtgtgtgaagaggggaatctccgcttcgatgtgttgcaggatccggaagttgagagccgcttttatatttatgaagcctataaggatgaagccgccgttgcgttccataaaacaacgccccactaccttgcctgtgtggaaaagctggaatcgctgatgagctgcccacgaaaaaaacgcgtcttcaatggactgatgccataa

SEQ ID NO: 396526 - DNA, 876 bp, Salmonella enterica
atggctgatttagatgacatcaaagatggtaaggatttccataccgatacgcctcaacgcaacaccccgttcacgcttaagggatgcggcgcacttgactgggggatgcagtcccgactgtcgcgcatttttaatcctgagaccggaagaacggtcatgctcgcgtttgaccatggctattttcaggggccaacaacaggactggagcgtatcgatattaatatcgcaccactattcccgctggctgatgtgctgatgtgcacacgcggtatcctgcgcagtgtggtaccacccgccaccaacaaaccggtagtcctgcgcgcctcgggggctaattcaattctcaccgagttaagtaatgaggcggttgcgctctccatcgatgatgccgttcgtctcaacagttgcgccgtcgcggcacaggtgtatatcggtagtgagtatgagcaccagtcgatcaaaaatatcattcagttgatcgatgccggtatcaaagtcggtatgccaacaatggcggtgaccggcgtggggaaagacatggtgcgcgatcagcgttacttctcactcgccacccgtatcgccgcagagatgggggcgcagatcatcaagacctactatgtcaataaaggttttgagcgcatcgccgcgggttgtccggttccgattgttatcgcgggtggtaaaaaattacctgaacgtgaagcgcttgagatgtgctggcaggccatcgatcagggcgcatccggtgtcgatatggggcgtaacatcttccagtccgatcaccctgtcgccatgatgaaggccgtccacgcggtggtgcatcgtaatgaaaccgctgaacgctcgtacgaactctatctgagcgaaaaaaactaa

SEQ ID NO: 396527 - DNA, 1023 bp, Salmonella enterica
atgactgttcagagcattaaaaaaattgccgtaatcagtacccttagcctggtggcgtttaccctcaacgcttatgccgcagagcgaatcgcgtttatccctaaactggttggcgtgggattctttaccagtggcggtaacggtgccctggaggccggtaaagaactgggtgtcgatgtcacctatgatggcccgacggagcccagcgtgtccggtcaggttcagctcatcaataacttcgtcaaccaggggtacaacgccattgtggtttccgccgtttctcctgatggcttatgtccggcgttaaagcgcgccatgcagcgcggcgtgaaggtactgacctgggattctgacactaaaccggaatgccgttcgtactacatcaaccagggcacgccagcccagctaggcggcatgctggttgatatggctgcaaaccaggtcaaaaaagagaaagccaaagtggccttcttctactccagccccaccgtgacagatcagaaccagtgggtgaaagaggcaaaagccaaaatcgccaaagatcatccgggctgggaagttgtcaccacccagtttggctataacgacgctaccaaatcgttgcaaaccgcagaaggcatcattaaagcttatgccgatcttgacgccatcattgcgccggacgccaacgcccttcccgccgctgctcaggccgctgagaacctgaagaataccagcgtggcaattgtcggtttcagcacaccaaacgtgatgcgtccttatgttgaacgcggcacggtaaaagaatttggcctctgggacgtggtccagcagggcaagatttccgtatacgtggctgatgcgttgctgaaaaaagacgacatgaatattggtgacaaactggacattccgggtgtagggcaagttgaagtctcgccgaacagcgtgcagggctacagttacgaggcgaaaggaaatggcattgtgcttctgcctgaacgtgtggtgttcaccaaaaagaatatcgataaatacgatttctga

SEQ ID NO: 396528 - DNA, 999 bp, Salmonella enterica
atgactcgtttacatcgttacggctgggaactgacgctcgccgcgctactgatgattgaaattctgggattcggcgctttgaacccgcgcctgctggatctgaacgtactgctgttcagcaccagcgactttatctgcattggcattgtcgccctccccttaaccatggtgatcgtcagcggcgggatcgatatctcttttggctccacgatggggctgtgcgctatcgcgctgggcgtgatgttccagggaggcgttccgtttccgctggctattatcctgacgcttgcgctgggtgcgctgtgcggactgatcaacgccgggctgattatctacacaggcgtgaatcctctggtcatcaccctgggaacgctgtacctgtttggcggcagcgccttgctgctgtcggggatggcaggagcgacaggttatgaaggtatcggtggcttcccgcagggcttcacagattttgccaatctcgatgtgctgggcctgcccgtgccactgatcttctttctcgtcagcgtgctctttttctggttattgatgcaccgaacccacgccggacgaaatatcttcctgattgggcagagcccccgcgtggcgctgtatagtgctatcccggtgaaccggacgctgtacgcgctgtacgcgatgactggctttgcctcagcggtcgcggcagtactgctggtctcttactttggctctgcacgttccgatctgggggcctccttcctgatgccagccattacagcggtcgtcctgggcggcgccaatatctacggcggttccgggtcaattctcggtaccgccatcgccgcgctgttggtgggttatctgcagcagggattacagatggccggcgtacccaatcaggtatccagcgctctctccggcgcattgctaattgtcgttgtcgtaggtcgttctgtcagcctgcatcgtcagcaaattaaagactggctggcgcgtcgtcgcgctatccggcaggcctga

SEQ ID NO: 396529 - DNA, 1050 bp, Salmonella enterica
atgttgaaatttatccagaacaaccgcgaggtaaccgcactgttggctgtgctgttgctgttcgttctgccggggatactggacagccagtacctcagtgtacagacactgacgatgatcttcagcagcgcccaaatcctcatgctactggcgatgggggcgacgctggtgatgctgactcgcaacatcgacgtatcggtcggatcgatcaccggaatgtgcgccgtgctgctgggactgctgctgaacgcgggatatcccttacctgtggcctgtgtagcgacgctgctgttgggactgttggcggggtttattaatggcgtgctggtcgcctggctgaaaatcccggcaattgtcgccacgctgggaacactgggtctgtatcgtggcgtcatgctgctctggacgggcggtaaatggattgaaggactgcctgcacagcttaagcaactctctgccccggttttcctcgggctctccaccatcggctggctgaccctgctgctgatgctgctgatggcctggttgctggcaaaaaccgcctttggtcgctgtttttatgccacaggggataatttgcagggcgcacggcaactgggtgtgcgtaccgaagctatccgtattctggccttctctctcaacggctgcatggcggcgctggccgggatcgtctttgcttcgcagattggctttatccctaatcagacgggaaccgggctggaaatgaaagccattgttgcctgtgtactgggtggaatcagcctgctgggcggttccgggacgatcactggcgccgtgctcggtgcctggttcctgactcaaatcgacagtgtactggtcctgctgcgcattccggcgtggtggaatgactttattgccggtctggtcctgctggctgtgctggtatttgacggtcggctgcgctgcgcgctggaacgtaatatccgccggcaaaaatatgcccgcttcattccgcagcctcagccatgtccgtcggcaaaaagcgctgcggatactgtgcgcaccgccaaaaaacgtgaggttgcctga

SEQ ID NO: 396530 - DNA, 1548 bp, Salmonella enterica
atgagtcacgaaaagatcgcccccctactcagtgcacagtctgtctttaagcagtactctggcgtcagagtactgaaaggtattgactttatcttgcgaaaaggcgaagtccatgcgctgctgggagggaatggcgccgggaaatccacgctgatgaaaatcatcgccggtattaccccggcgggcagcggaagtattgaaattgaaggttcccggtgtacaaaactgacgccaattctggcacatcagttggggatctaccttgtaccgcaggagccgctactcttccccagcctgacggtaaaagagaatgtcctgtttggtctgcccaaacaccagagctcaacgcaaaaaatgagctcgatactgaccgggctgggctgtcagtttgatattaacagcccggcaggctcactggatgtcgccgacagacaaatggttgaaatcatgcgcgggctgatgcgcgattcgcgaattttgatccttgatgaacccacagcctcactcacacctgcagaaacagatcggttgttcagtcgtctgcgtgagttgctgaataacggcgtggggatcgtctttatctcccacaagctgcctgagatacgccagattgcggattacattagcgtgatgcgggacggaaccattgcgctctccggtaaagcagcggacctgagcacagacgaaattatccaggccatcacgccagcttcacgcacaaacacgctgagcccgacacagaaactgtggctggaattgcctagcaaccgtccgcagcacgatgcaggcacaccggtgttgagcctcgaaaatgtgaccggagaaggattcatgaacgtcagtttcgaggttcgtgccggggaaattttaggtctggccggtctggtcggtgccgggcgcaccgaacttgccgaaacgctttacggattacgacctctgcgggcaggaagcatcctgctcggcggcagggatatttccgcgcttcccactcgcgaacgtctgcaacacggcctggtatacctaccggaggatcgtcaattctcaggactgaatctggatgcttcgctggcatggaatgtttgcgcactgacccataaccacagcggcttctgggccaatccggcaaaagacaacgccacgctcgaacgctatcgccgcgcgctcaatatcaagctgaacgatcccgaacaacctgcccgtacgctctccggcggtaatcagcaaaaaattctgatcgccaaatgtctcgaagcctcgccgcaggtgctgattgtggatgagccgacgcgtggtgtggacgtctctgcccgtaacgacatctaccagttgctccgcagtattgcggctcagaatgtcgcggtgctgttcatctcgtccgatctggaggagatcgaacagatggccaatcgcgtttacgtcatgcatcagggggaaacaggcaatgatgccctgcagggcgacgagattaatgtcgacaccatcatgcacgtagcgttcggcgacaatacgtcagagactacaccacatatcggggaggcgccatgttga

SEQ ID NO: 396531 - DNA, 1011 bp, Salmonella enterica
atgaatgaacaattatgttcaggaattcgatatgttcaaagtgaagacagtatgatgactattaacgacccgatgatttccgaacaagggatgtgtgaagaagagctggtggcgcgcattgcgtggttctattaccacgacggtatgacgcagagcgatatcagcaacagactggggttgacgcggcttaaggtgtcgcgcctgctggagaaggggcatcagtccgggattattcgcgtacagattaattctcgctttgaaggctgtctggaatatgaaactgaattacgtcatcgttttgacctgaacaatgtgcgggtcatcccgggacttcccggtgcagatgcctgcgttcgcctggggattggtgccgcgcatatgttgatggaatcactccagccgcagcagattctggcggcaggtttcggtgaggcgaccatgaataccttaaaacggctgagcggatttatctctgctcaacaaattcgcctggtgacgctctcgggtggcgtggggccatacatgaccgggattggacaactcaacgcggcctgtccggtcagtattattccggctccgcttcgcgcctcctcagcagagattgcccggacgttaaaaaatgaaaacagcgtccaggatgttctgctggccgcccaggctgccgatgcggcaattgtcggtatcggcgcaatcaaccagaaagatgaggccaccattatccgctcaggctatatcactaagggtgagcagttgatgattggtcgcaaaggggccgtgggcgacattctgggctacttctttaatggcgaagggcaggtgattccggatatgaagatccacgatgaacttatcgggttaaccctcaataccctgaagacgatcccgacagtgatcggcgttgccgggggcgtgaataaagcggaagcaatcgctgcggcgatgaaagggggctatatcaacgccctggtcactgaccaggaaactgccgccgccattgtcagcgggctgtaa

SEQ ID NO: 396532 - DNA, 1593 bp, Salmonella enterica
atggcccgactctgtaccctcactgaatcagcacattacctgatggcactggacgccggaaccggaagcgtccgcgccgtgattttcgaccttgaaggcaaacaaatcgcggtgggacaagcggaatggcggcacttcgccgtaccggatgttcccggctcgatggagtttgatctggggaaaaactggcaactggcctgtgaatgcatccgtcaggcattacatatcgccgggattgtgccggaagcgattgcagccgtctccgcctgttcgatgcgcgaaggcattgtcgtctatgacgaagaaggaacgcctgtctgggcctgcgcaaacgtggatgccagagcagcacgggaagtcagagagcttaaggagatccacgattacaccttcgaaagtgaagtctatcgcaccacgggtcagacgctggcgctgagcgccatcccgcgtctgctctggctggcgcaccatcgttcggatatctatcgtcgcgcctcaacggttacgatgatcagcgactggatggcctacatgctcagcggtgaactggcggtggatccttccaatgccggaacaacgggcctgctggacctaaaaacacgggactggaggccgtcattgctgcagatggcaggattgcggtcggatattctctcaccggttaaagagaccggaacgctcctgggaagggtgacggcccaggccgccgcacagtgcgggttgaaagcaggcacgccggtggtagtgggcggcggagatgttcagttgggctgcctcggccttggggtcgtacgtccggcgcaaaccgctgtactcggaggcacattctggcagcaggtggtgaatttacccgagccgattgttgatccagagatgaacgtgcgcattaatccgcacgttattcccggaatggtacagaccgaatccatcagcttttttaccggtctgacgatgcgctggttccgcgacgctttctgtgcagaagaaaagttgatcgctgagcgtctgggggtggatacctacacacttctggaggagatggcctccagggttccggcaggcgcatggggtgtaatgcctattttctctgaccggatgcgctttcggagctggtatcacgcagctccttcgtttatcaacctgtccatcgatccggaaaaatgtaataaagccacgctgttccgcgctctggaagaaaatgcggctattgtgtcgacctgtaatttgcagcaaatcgccgatttcaccgggatccatcctacttcactcgtgtttgctggaggaggttcgaagggcaaactctggagccagattctggcggatgtatcagggctgacggttaatgttccggtcgtcaaagaggcaacggcgctgggctgtgccattgcagccggtgtcggggcagggatctggtcatccatggccgagactggtgagcgactggtgcgccgggaacgggagcatgtacctgataaagagaaacacgagctttatcgggagtcacgcgagaaatggcaggcggtatatcaggagcagttaggtctggtcgatcatgggttgacgacctctttgtggaaagcgccgggtttataa

SEQ ID NO: 396533 - DNA, 351 bp, Salmonella enterica
atgatgaaatcgaatgaagcgcagcatgagtaccgctttggcaacagtggcccgaagtatctcattcgcggcccggtctgtgacatgggcgtcgtcatgctccagcccggccagtcttttcccaaccatcgtcatatcgaagcctgtgaaattttttatactctggcaggcgaggtgacgctgtacctgaacggtgaaccctacaccttaggctcgggggatgttctgcactgctatcccggtgaagcccattttctggtgaacgaaggggaggttccgtggaaaggggtctttgttaaatcccctcatatcccgggagacagccatccggttgagcctgtgacgtattag

SEQ ID NO: 396534 - DNA, 1662 bp, Salmonella enterica
atgaaagctttctatccggcgtgggttttactggcagtgagtctgcccgttttcgctaccccgttgtcacccgctgatcgcaacagcatcgagcagcagcagcagcagttgctccttcagaaccagcagcagcgtgaatcgctggagccggcaatgccgctgaatcctccatctgaaactgaaccacctgcgtcgacatccggcccctgtttcaccatcaaccgtattgtgcttgatggtgccactcttattgatgcccgcaggcagcagaaattactcgcgccatggctgaaccagtgcctggatatagcccgcattaatcaactcacgaatacggtttctgactggtatatcagccggggatatatcaccagtcgtgcttttctgacggagcaggatttacgctctggcgaactgaatctggctgttcttgaagggcggttggggaaaatcaccatggacggcgcgccagagcgcgagctgaaaatgactttcccgggtcttgagggcaaaattcttaatctgcgtgatattgaacagggcatggagcagattaaccgcgcgcgtaccacgccggtacagattgagatattgccgggcgataagccgggatggtcggttgttcatttgacagccacaccagagttccctctttccggctcagtcagctttgataacagtggtcagaaaagcacgggggtcgggcagattaacgccgggctgaacggtaacaacctcctggggctggccgacagctggtttgtttacggcgggcgcagcagcgcgttttcgaattctgaagatgcacaaaattttgctgcgggcgtcagcgtgccttatggttacagtctgctggattacagctacagccggaatagctatctcagcaccatcgataacaacggctggctctggcgctcaagcggcgataccgaaacacatcgtgtgaatctgtcgcacgtgctgttccgcaatggcgatatgaaaacgggcgtctccctgggtctgagccatcgcatcaaccataattatctggatgatgtcctgctgcaaagcagcagccgtaaactcaccagcctgctgtttggtatgaaccacactcagaagatgttcggcggagtggcaacgtttaacccgacattcagccggggcatgccgtggctggatgccggacacgacggcagtaaaaacggtgatttaccgaaagcgcagttccgtaaatggagtctgagcgccagctttcagcgcccgatgactgaaaatctgtggtggctggcgagcgcctacgggcagtggtcaccggaccgcctgtacggcagcgagcgtctgacgctggggggagcgagttccgtacgcggttttaaagagcagtatatttcaggtgacaacggcgcgtactggcgaaacgagctaagttacaccctgtttacgctgccggtcatcggccaggtcagcgcgctggcggcccttgacggcggctggctgcacgccgacaggcttgatccttatgccgggggtacgctctgggggacctccgcagggttcagtactgccagccgttgggtatcagcctcgttcaccatcgggtttcctcttgtttacccggactggcttgagccggatcacgtcagcattgactaccgcgttgccattgcgttttaa

SEQ ID NO: 396535 - DNA, 9732 bp, Salmonella enterica
atgaatcagctgcctcctgttcgcttaacgtaccgtctgctcagctggctggtcagcgccctgatcgcgacgcagcctttgctgcctgccgttgccgccacgctgacaccagtgggcaacacttccacggataaagcagcgaatggcgtaccggtcgtgaatattgccacaccgaacagcgcagggatctcgcacaaccagtttaaggattacaacgtcggccaggaggggttgatcctcaataacgccaccgccaggctgaaccagacacagcttggtgggattatcaccggcaacccgaatctgactgcgggcagggaagcgaaaggtatcatcaacgaagtgaccggtggcaaccgctcacagcttcagggctataccgaagtggcgggcaaagcagcgaatgtgatggttgccaacccatatggtatcacctgtaacggctgtgggtttatcaataccccgcaggccaccctgaccacaggaaagccggtctttgacgccagcggcaatttactggctctggacgtgaaaaaaggcagcatcaccattgagggccagggacttgatgccagcagtagcgatgcgctgtcgatcatttcacgtgccaccgaagtgaatgccgccatttatgcgaaggacttaaaagttattgccggagcgaaccgggttggcgcagatggcagtgtacaggctcaacagggcgaaggcagcgtccccacggtggcggtggataccggtgcgctgggcgggatgtacgccagccgcattcatctggtatccagcgagaaaggcgtcggggttaacctcggtgacctgaatgcccgccagggggacatcaccctggatgccagtggcaaacttaccgttcacaacagcctcgccagtggggcgctgtccgccagaggtgagcgcctcgtcctgacgggcgatcataaaaccagtggtaatctgtcgctcaacagccagggcgacattgccctgagaaacggttcgctgaacagcgatggtgacctggtgctgaacgccgctggtgcgatttcgcacaccagggaaaagctgaccgccggacgcgatgcgacactgactgcgaaaaacatcagccaggatgcttccagccagattaacgcagcccgcgatatcgcagctaaggccagtgatacgctgaaaacgcaagggcagatgaccgccgggcaaaacctgacggcaggcagcaacaccctgacccaggagggcagtctgctggcacataacgctgttcagttgaatgccggcacgctgaataacagcggctccgttcagggcgcttccctgagtgtgggtacttccacgctcagtaacacaggctccctgctgagcggcggcaacctgaccgtcagtacgagagactttacccagagcggcactaccggtgccagggggaaagcggacatcactgccggcgggacgtttaacaacacgggttcgctggtcagtgacaatatgctgaccttgaaggcccgggatgtaacgcagaacggcgtgctgtccggcggccagaggctgacggtgaatgcgcagaccctgacctccggcaaaaactcggtgacccacagcgccgccgccatgacgctgaataccaccaccgcgacgctcgacggggaaaccagcgcgggcagcgatatgcagttgcagagtgacagtctcaccacggcggcggatgcacagcttcagagtggcaataatctcagcatcaacgccagagacgcccgtcttgcaggtacacaggcagcacaacaaaccatgacggttaatgccagtgagacgctcgcccacagcggtaaaagcagcgcggcatcactcagcctcagtgcgccggaaatgaccaacagcggtgtgctggtggccccgaccctgaatacgcagtcacaacggcttaccaacagtggattgctgcagggtgatatcctgctgggtgtgaatacacaaaagctggacaaccagcagaacggtaccctctacagcgccgcaaatctgacgctggatattccggatatccgcaacagcgggcttatcaccagcgataatggtttaacgctaagcgctggctccctcagcaatccaggcaaaatcctcgctgacacgctgaacattaaagcgaccacgctgagcggagacggcctgttgcagggaaccggggtgctgacgcttgccggggatactctctcgcagggtgccaacgggcgctggctgacggcgggcgatctctcccttaacggcgacacactgaataccgcggggaccacgcaggggcagaacctcaccgctcaggcggatagctggacgaacaatggctccgtgctggcaaccggcaatcttaacgccacgctgggcgcctctctgctcaacaatggcaacctgatgagccagggccatttcgggttgaacgtgcccgtgctgaccagccacggcagcatcctctcttcaggcgaaatgtcgctcgccggaacaaccttcaccagtgacggcacgcttcagggcaacacgctttcactgcgtcacaacagcatcgacaacagaggggtggtcactggtctgaacgacctgaccctgaacagcacgggccggcttaccaacagcggcgatctgctgagccagaaatcgctgacgctgagtgcaggagacgtgaccaacagcggccggcttcaggggcagaacattaccttagagggcaacagcctgaacaacagcggcgcgattcagagcgcgctggatttagccctgaccctgagcggcgacgttatcgccgccaccggcagcaaaattaccgccctgggcgacgcccgcctgacaggtaaagcactgagcaaccagggactggtgagcgccggaacgctggaggtgaaaggtgatttgctcagcaacgccggcgaaatcagcggcgttaacggcctgaacgtgacgctcagcggtaacctgcaacagcagggtaaaatgctgaccggcgggctgcttaacgtcaacgtgaaagacgtcagcaacagcgggcagcttcagggcgcggatacccgaatcagcgccagctcgctcaccaacagcgggcgcgtgcagggtgacagcggcctgacgctcactctgctggatgtcctgaccaaccaggccagcggcgtacttctcagccagaaggcattagacctcaccgcgcccgtgctgaccaacgacggcgccattcagggcaatggcaaaaccacgctcagcgcggcaacgcacgcccgcaacggcggtaaaattctctctggaggtgacctgacctttactacgccggactacagcggcagcggctggctacaggccactgacctggtgctgaacgtggcgaaggttgccagcaatggcaccgtgatggcggcgaaccaggcgacgcttaccggtaacagcctgaccaacggcggcaccgtccaggccgcacagttgaacgtcaacacgcagaccaccaccaacagcggcacgctgctcggcaatcagggtttgacgcttaaagggaacagccttagcaacgcgggcgggaaggtgttcagcggcggggatatgcttgccgaaatggtctcgctcagcggcgcgggccagctggtggcgctcggcaacctgacgctgaagctcaccaatggcttcaccccccagggcgttatcgccgcgaacaagcagctctcagtcagtagccagggcgatatcaccaacggagccacattacagggcaacggcatcatgctgaatgctgcgggcaagctgaccaacaacggccaactgaccgcaggcagcggcaacacggcattaagcggtagccagattgcgatgaacgccggtggcagcctgcaggcgggcggggatgtcagcctgaccagccgggacagtatcacccttgatggattcaccggtacgacaggcagtctgctgttgaacgcgacggggtcagtcatcaacaccgccctgctctatgccgggaacaatctttcgttgtttgccaacagtatcctgaaccgatacggcgatatcctcgcgggtaataatcttgtgatgcagaaagacgccactggcacggcgaatgctgaagtggtgaatacgtccggcaatattgaaaccacgaagggtgatatcaccattaatacccggaaattgctgaatcaacgggataatataaaggaatcaacgtcttatatccctgctgaaaacagccccggagcaaatggtggcagttcaatttcagtcagggttggtgacctggcagccgatgaatggggttactactttgtcttccacggaaccaactacggtggaagtcaggaagcttttgctgctccgaccgcaaagggagcaaccagacggtttctcgcaggaacgaaaattgttgatattactgcaacggggggcgcggccaggattacatccggaaataacattctgattaatgcgacaacactggataatctggggggaaatatactggcaaatgacgccattaatatttcaggctcccgtctgaataaccagtcatattttgggtatgctcaggatgaatacaatatatacacgtattacgggagactggccactcagctcaataatgggcatatggagaatggtaaggcaggcagcaatgacagagtcacttacagtctgtctggaagcccggaatatgtgctccgggattcgggacaagccctgcgttccgtcattcaggctggaaaaaaagtgctgataaatgtttccagtgatgtcagtaatacatccactacatcaaatactggtgggattactcacaccattgtcacacctgtggtaaacacgccttctgagcagaacatcggcggcggcgtgagtcagcaggcgctggcggatgccggtacccggaccatcactaatcccgactggaaagacaccacctccggccagactattggcagtggaacggggctggtgcccggtggtatggacggcaactatcctctgccttccggcaacaatggctattttgtgccgtccaccgatccggacagcccgtatctgatcaccgttaacccaaaactcgatggcctcggtcaactcgatccatcgctgtttggcgatctgtataagttgtccggtatgaacccgggggtggccccacgcgagacagacagtcagtacaccaacgtcagccagttcctcggctcgtcatacatgctggaccgcctcagcctgtacccggacagggactaccgcttcctcggcgatgctgcatttgatacccgctatgtgtcgaacaccgtgctgaatcagaccggagcgcgctacatcaacggtcttggttcagacctcgaccagatgcgctacctgatggataacgccgccaacgcgcagagttcgcttggcctgaagtttggcgtggcgctgaccgccgaccaggtggcggcgctcgaccacagtattctgtggtatgaaaccgtgaccattaacggccagacggtgatggtgcccaaagtatatctgtcggcaaaagacgtgacggtgcagagcggcagcgtgattagcggcgataatgtgcaactggcgggcggtaacgttaccaacagcggcagttctttactggcacagaatggtcttaccatcgacagcagcaacagtattcataacctgagcaacggattaatacgtgcgggaggggggctgactctcacctcaacaggtgacatcaataacattagttccggcattactggcaagaccgtacaactggagagtattgatggcagtataaacaatttcacccaatccaggcgctggcagtttgatgcgccggaagatggaattgctttaaaagatacatacaccggaagcattgcatccatcactgcaacggatgatttgagcatcagggctggtaacgatatttcggttacgggggctgaaatcagtaccggaggggaagctgtacttgtagccggaaacgatctgaaccttaacgctatcgacaacagcaccagtagccgtcatgtaaacaatgaatctcaccagcgcagtgctgaacttacggcaatcaccgcaggcgacaacatgacactggttgccgggcgggacgttaccagccaggccacaggcatcgcggcagaagggaatgtcggtattcaggccggacgcgacgttaatctgctggcggaagagtccgtgaccggcaacagctcacactcgaaaaagaaaaccgttatcgataaatctgtacaccagcagggcaccgaaatcgcaagctccggcaacaccacgattatcgccagacatgacgtgaacagtgaagccgcacaggtgaccgccagcggcgatatcggcgtggcggcaggccgcgatgtgaacctgaccaccgcgacggaaagcgactatcactacaaagaagagacgaagaccaaaaaagggttcctcagcaaaaaaacgacccacactatcggggaagacaacgcgacccgtgaagcaggcacgttgctgagcggcgataacgttaccattcaggcgggcaacaacctgctggtgaagggctcctccgtggtgggcgataacaccgtggcactcggcgcgggtaacaacgtcgatattgtggccgcgaccaacaccgactcctcctggcgctttaaagagacaaaaaagagcggtctgatgggcaccggtggtatcggcatcaccatcggcagcagcaaaaccacgcacgacctgcgtgaacagagaaccacccagagcgaaagtttcagcaccgtcggctcgacggacggtagcgtggcgatttcagccggaaaccaggcacacatcggcggcgcagacctgattgccgggaaagatttaagtctcagcggcaacagtgtcatcgtcgaaccggggcatgacaaacgtacccgcgacgaaacctttgagcagaagaagagcggcctgacggttgcgctatccggtactgtgggtagcgccattaataatgcggtgaccagcgcacaggagacaaaggagaccagtgatggtcgtctcagggcgttgcaggctactaaaacggcgctgtcaggcgtccaggccggacaggcggctgaggcggctgacctgacggctgacccgaacgcgatgggcgtcagcctctcgctgaccacgcagaaatccaaatcgcagcagcacgctgagagcgatgcgataacgggcagtacgctgaacgcgggcaataacctttccatcactgcgaacggaaaaggtaaaggcccgaacagcggcgatatcgtgattgccggaagccagctgaaagcgggcggcgacacgcaactgaacgcgaagcatgacgtcattctcagtggggccgctaacactcaacagtccagcggcaagaacagcagcagcggcggtggtgtcggtgtaagtattggtgcaggtaaaggtgccggtatcagcgtgtttgccaacgtcaacgcggcaaaaggcaaagacaaaggcaacggcaccgactggactgaaaccactatcgacagcggcaaaaccgtgtccattaagagcgggaacgacaccgtgctcaatggggcgcaggtcaacggcaataaaatcgtcgccgacgtgggtcacgacctgctgatgagcagccagcaggacaccaataagtacgacagcaagcagagcagcgtggcggcgggcggtagcttcacctttggcagcatgacgggctccggctacatctctgcctcccgggacaagatgaagagccgctttgactccgttgccgaacaaaccgggatgttcgccggtgatggcggcttcgatatcaccgttggcaaccacactcagcttgatggtgcggttatcgcttccaccgccacggcagataaaaacagcctggataccggaacgttgggcttcactgatatccagaacgaagcggatttcaaaacccggcactcgggcatcagtatcagcggtgcgggcagcttcggcgaccagttcaagggcaatatgccgggcgggatgattgcggttgcgggcaacagcggccatgccgaaggcacaactcaggccgccgtggctgatggcaccatcaccattcgcgacaaggccaaccagaagcaggatgtggcgaacctgagtcgcgacaccgaacatgctaacgacagcatcagcccgatcttcgacaaggagaaggagcagaaccgcctgaaggaaatcgggatgatcagcgatatcggtggtcaggtggcggatattgcccggacgcagggtgagctgaatgcgctgaaggctgcgcaggataaatacgggcctgttccggcggatgcgacggaagaacagcggcaggcatatctggcaaaactgcgtgatacgccggaatacaaaaaggaacaggaaaagtatggcaccggtagcgacattcagcgcggtatccaggccgcgacggcagcacttcaggggctggccggcagcaatattgctggtgcactcgcgggggcttcggctccggagctggcaaacttcattgggcacaatgctggaattaatgataacgatgcagcgaaagctattgctcatgccattctcggcggcgtaacggcggctcttcagggtaacaacgcggcagctggtgctgtgggtggagcatcaggtgaacttatcacaggcgcaatcgcgaaggttttatatccggatgtaaaagacctgtcgaagctgactgaagatcagaagcagacactgagcacgttggcaagtatctcgtcaggcatggcgggcggtattgttggcgggaatactgcgggtgtggctaccggagcggctgccgggaagaatgttgttgagaataatgcactgtcagccacagatgataagaaacggcaggatgctaagtggtcgctaccttatctggagggtgagaagaaacaacaggcagagaaacttatcagcgacctgaacgccaaagataaggcattcgatgagaagctgaatgcggcgtgccagggactgtcatcagcagcctgccagggaatgcggcaggaacttgcagcgatggcaaaaagctacgatgagcagcttgacggtcagtatatcggcaatatgggcagcatctataaggaaggtaaaggtcaggttgatgccctgatgtggcagtatgctacagcggatgcgaaagcccagcgtgaggctgatattgatcgtatagcagaaaactggggtgtgagcaaagaaacggccagtacactgtatgatgatatggctgttgtacataccactgcggcgataggcggtgcggtgtatgggatgaaaggcatcaaagagacaacggtagtgaaaccagcaggaaattctacttcgtttgatgctaatgaaattcgcttttcgcaaaataccgtttcgtacaataaaactgatcgagatacaggtgtgaaatacacttacgatgatcttgtttccagcatgaaaaaagatggttggaaaggagatcctgttgatgtcataaaaatgcctgatgggaaaatgaccagcatggataataccagaataaatgcagccagggatgctggtattaaagtagaagctaatgttagaaactttaatgatcctttaccaaaagatatgattgattctggtcgttttggttctgcaacaacttggggtgaggctattactggaaggattgtaaatcaaagtggtgggtttagtaaaaacaatccatatggttcatctgattcaccgagaataactggcaaaggtaaataa

SEQ ID NO: 396536 - DNA, 396 bp, Salmonella enterica
atgactgatagaactacgatgtatcaaaattatttatattcaggattctcttttcctgaaagctttatcaattatgtatctaaaatagagttagaggatatagagccgtggtggttgttttgccatgcttcaaactatgttgatttttggtgtgaaaaagttagggagctttatcctgaaaggaaattaattccttttgctaactggcgttattcggatgatatcgtttgctttgatggtacagatacgtcaggtgatccaaaggtatattatgtacacacctttgcttcagccggttgggaagacagaggatatattgaaaactttactgaatggttgaaaatggctcgccttgagtcagcccgtcataaagcagaacagactgacgatgaatag

SEQ ID NO: 396537 - DNA, 543 bp, Salmonella enterica
atgagtaaaaaaaacacagatatcagcaagtttttaagttatatattacgacatcaaccagaagctattggtttgtttttggataaagaaggatgggctgtaataaacgatttaatccttttatcaattaaaaaaggatatacactagacaataatctaattcgcaatattgttaatagcagtgataaaaaacgttttacaatttcagaagacggtttacgtatccgggcagcccaaggacactcaacgcaacacgttaatatcgattataaagagaaagtacctccatgtcttttatatcatggcacagctacccgctttatacctaccattagagaacaaggactactccctttatcacgtcagtatgtacatctttcatccgataaagatacggcaattcaggtgggacagcgttatgggaagccagtgctactaaaaatcaaagctctgaacatgtatgaacagaacttcaagttttatcaggctgaaaataatgtctggttaacggaacaagtaccttatcagtttattcaggagtaa

SEQ ID NO: 396538 - DNA, 405 bp, Salmonella enterica
ttgttctcaataatcgtgtcggatcgagttgttgttgagaataacacgctaggcaaggacaaaatctacgacatcaatccgatgctgaagattggggttgaaggggttgatggcgatccgctgaaaggtggtgggatagccaagtatacgattaataaaggacagaaaaacaaaaatatagagggtgcccgtacagataaactgaccgacagccaggggaagcatgatatctggcttctggacggctcgtattatacggccagaaacgtttcatttgtcgagtggataatgtcaggggataacctgtatcgcaggacattaccgattctcctcacgcacagatccggatgtgcgctgctaacgtatccggctcctgcttcgggtactggcgtggaagcgttgtaa

SEQ ID NO: 396539 - DNA, 390 bp, Salmonella enterica
atgaaacagtatattaaatggttctcggtcattgccgttattggcgcactggctggttgtgcgcgtactgcaccgattgatcaggtacattccagcgtcagtacgggtcacacccaggaacaggtgaaaaatgccattctgaaagctggcgtacagcgccagtggatcatgtcagaagtgagtccgggcgtgattcaggctcgtcagcaaaaccgcgatcacgtagctgaagttcgtatcacctataccgccaccagctatgacatcaggtatgacagcagtctgaatctgctggcttccggcggaaaaattcataaaaactacaatcgctgggtgcgtaacctggataaagacatccaggttaacctgtctgcaggtgcagccctgtaa

SEQ ID NO: 396540 - DNA, 1692 bp, Salmonella enterica
atgccgctgacgttttccccgtgcgtgttgatcccctgctataaccacggcgcaatgatgtcgggcgtattggatcgtcttcagccattcaatctcccctgcattgtggtggacgatggcagcgacaagaccacacaagatgaactggcacgcctggcggcagaatacagcaatctgacgttaattcacctgccggtcaacgcaggcaaaggcgcggcggtgattagcggaattcaggcggcggcagataccgggttcagtcatgccgtgcaggtcgatgccgatggtcagcatgccattgaagatattcccggactgcttgcactggcaaaaaaacatccggcagcgctcatttccgggcaaccgatttacgatgattctgttcctcgctcgcgcctgtacggacgctgggtaacccacatctgggtgtggatagaaacgctctcgatgcagctaaaagacagcatgtgcggcttccgggtgtatccggtggcacctacactgcaactggcacagcgcgtgacgctcggcaaacggatggattttgataccgaagtaatggtgcgtctctactggcaaggcaaccccagctattttatccccacgcgagtcatctatccgcaggacgggctatcccattttgacgcgctcaaagacaatctgcgcatttcattgatgcacactcgcctgttctttggcatgttgccgcgcatcccctcccttctttgtcgtcgttcatcgacacactgggcgcagcagcaggaagtcaaagggttgtggggaatgcgcctgatgctgctggtctggcgtgtactgggtcgcaaagccttctccctgctgctgtatccggtcgtcggcgtatactggctcagcgcttcaactgcccgaaaagcctctcaacgctggattagccgcgtaagggcgcaactgatcacacggcggatgccagtaccgccaaacctgaccagttatcagcatttcctgcgttttggcggcgcgatgctggataagattgccagctggcgcggtgagctgcacttcggtcgcgatgtgatttttgcaccgggtgcagaaacgacgctgaatatcagcgatcctcggggaaaactgctactggcttcacatcttggcgatgtcgaagcctgtcgggcactcgcccggctacagggcagtaaaacaatcaatgcactggtatttagcaataacgcccaacgctttaaaaaaattatggaagagatggccccgcaggctgggttaaacctgctaccggtgaacgatattggcccggataccgccatgctgctcaaagagaaactggatcgtggcgaatggatagccatcgttggcgatcgcatcgcagtcactacccaacgtggcggcgaatggcgtgtctgctggagccgctttatggggcaaatagcgccattcccacaaggcccgtttattcttgcctctattttacgttgtccggtggatctgattttcgccctgcgccagcaggagaaactacgcatccactgcgaaccatttgctgacccgttgctcttgccgcgtgccacccgacaacaggcattacagaataccgtcgatcgctacgccgaacgccttgagcactatgcacttcagtcgccactcgactggtttaactttttcgatttctggcagttgccggacaccaaagacaaggagtaa

SEQ ID NO: 396541 - DNA, 1170 bp, Salmonella enterica
atgatctacatttctgccgttggcatgattaacgcgttgggcaataacaccgatgaaatcgcagccaacctcacacgtggcatagcgccgggaatgcgaccgcgcgcgaactggctacaaggacatccccccgccgtattagcaggcgtagacggtgatctgcccgcgatccctcagcaatttagcgcacatcgttcgcgcaataatcaactattgctggcagcactggcacaaatccagccacaggtggacgatgctatcgcccggtttggtcgcgatcgtattgctgtcgttctcggtaccagtacctccggtctggatgaaggtgacgttcacgttgatctgatgctcaacgacaaagagagcaccgactggcgctacccgcagcaggaactgggcgatccgtcgcgttttcttagccactggctggtactggatggcccggcatttacgctctcaaccgcctgctcatccagtgcacgggctatcatcagcggccgccgcttgattgaatccggcctggtggatattgccattgtcggcggcgccgacacgctaagccggatgcccatcaacggtttccacagcctggaatcactctcccccacgcggtgtcagccgtttggccgcgaccgcaatgggatcaccatcggcgaaggcgccgcattgatggtattaacccgcgagccacagtccattgcgctcctgggcgtcggcgaatccagcgatgcataccatatttcggctccccacccgcagggagaaggtgccattcgcgccataggtcaggcgcttaacgacgcaggaatgacaccggaacacgtgggctatatcaatctgcacggaacggccactccgctaaacgatcagattgagtccaacgtcgtgagcacgctatttggcgacacggtcccatgcagttcaaccaaacacctgaccgggcacacgctgggcgctgcggggatcaccgaagcagcgatcagtatgctgattctgcaacgcaacctgccgctgccaccgcaggattttagccagtcgccgcgcgatgaaacattgccaccctgcggcatcattgaacagccgcagccgctgactcgcccggtaatcttatctaactcgttcgccttcggcggtaataatgccagcatcctgctcgggagaatctcatga

SEQ ID NO: 396542 - DNA, 477 bp, Salmonella enterica
atgagccactatttaccaccgggcgattatttaccgcatgacgcgccgatgctgctccttgaagaggtcgtcagtgtggcggacgaaaccgccacctgccacgtaacggtatcggcaaacagcgtactggcccctttcctcgaccccgatggcaatctgcccggctggtttgtactggaattaatggcgcagaccattggcgtctggtctggctggcaccgccagcaacacggtcaggcgagtatggcattaggtatggtgctgggcgcacgcgagttagtctgtgctgcgggtgttctgcctgcagggaagaggctgagcatccatgtcaaattgctgatgcaggatgcacaattcggtagctttgaatgcgtcattcaggcagacaacaagacgctggcaaccggtcgcgtcaacaccttccagccgacaacagaagaaattaacacgctatttcaacaaggagcgtccacatga

SEQ ID NO: 396543 - DNA, 180 bp, Salmonella enterica
gtggatcatattaccgaactttactgtctcgtcgatgacttctggcaatctgtcaaagaaaaaatagataaccacatgattttagatgataaaaacaccgatgttgccaacctctgctctcgatttcggagaccgcaacactgcttatcctctttatgccatgagattcagacaaattaa

SEQ ID NO: 396544 - DNA, 483 bp, Salmonella enterica
gtgcctttccctgatattaactttaccctgctgattacctttgctaccgggatagggaatgttttatctgctttctttatgctgaatgtgaaaaagcaggaagtggaagatacgcaacttgcggaagccagacgccgggcgacagagctgcattgtctcaagcttcaggaaagcgcctcactggctgcagagattgtatttcgggcagatcggggctatcccaataacgtctccctgtatgaactgatgtatgaagacagccgtccgacaaagcgcgtgcccgacgatcaaatcaaagaagaacagacaaacttcgaacatcaggttttcggtttgctgccctatcttcagcctgacgaggctcaggtcatgaagcagataactcttcagcatttcatcgtgacagccatgcggaccagcaaagttcctgccgaacgtcgtacatcccctgccgagggcggattcgatttcaatttgatataa

SEQ ID NO: 396545 - DNA, 516 bp, Salmonella enterica
atggatttagaaacaccccgcttaaagcttgaaccctatgatgactctcattacgaaggcttgagggtgatggatagtgatgtcgttgtgatgcgttatatcaccggaggtatcgttaaaacgcccgaagaaacctgggaaggtatcagaagagttcaggcacgttgggataagtacaacttctcatggtgggctatcaaagagaagtcctctggcgtgatcgttggtgcagcatgcctccagcacctggcaaacgtggatggcgcaccattagagattggctggcgtctcgtccaggaacataacggcaagggctatgcaacagaggcagctcaagcgatcattgattacgcggcggaacaggtaggagcaaattatctggttgctgttgccgatcctgaaaatatcccctcgcagcgtgtgatgcagaggttaggtatgacttacaaagcaatagagcagcattacgatgtgccatgtgtggtgtatgagcttaacatacgcaggcctgcttaa

SEQ ID NO: 396546 - DNA, 183 bp, Salmonella enterica
atggttactggtacgctgttagttttttctgcctccaggcttaccagcagtatttttcataccactattcgcaactatgtggtgtgtggcgattatttggctttattgtttcagcagatttaccagccactacactcagataccaacatcaaattcgtttttcttaaagactttttctgttga

SEQ ID NO: 396547 - DNA, 219 bp, Salmonella enterica
atgtggtcatcatttgctgctgggtttaaggggctgataccgaataaagtgaaatcacgtctgcaatgtaatgatgaaggcacgatggtagtatgcgcctgcattgccagactgaataagaataatactgatatgaacgagttgttgatggactattgtgggagaatagcttgtgacggaaattacgacattactcacgggccgtttatggtctcttag

SEQ ID NO: 396548 - DNA, 270 bp, Salmonella enterica
ttgtactgcaatgaacttttgctgtttgtttccatcgtgatgattctgacagtgcgttatttggcatacttgccatctgccggcattaatatccagaacaagcatagaataagtaatgaaaccagcgaggacatctctaaaatcactttcgtcgtcattgaggtaaaacgtgaacggttcgtgtacatgctacagacagtgtcgaacatttcgaaaatagcgagagttgtgaatctgctcatggttttttatctgctgcgtatgaaataa

SEQ ID NO: 396549 - DNA, 123 bp, Salmonella enterica
atggcgccagtccagcttatcaaagaacatggcagactgagaaccggtgatagtgattttaccgtcactgacagcaggccggatggactggttatcctcaaggtacgttgtgagcagatataa

SEQ ID NO: 396550 - DNA, 423 bp, Salmonella enterica
gtgttctgtaatcatgttattcccccgttattactgagcgtgttgttgctgtccccgtctgcccgggcgggaatggtggtgtacaccgaccatgcccacccgccatccggggtgaccggtgatacccgcgtggtctggctggatgcgccggaacaattacagcagtcgctgtttggctctctgacgtcagaccccagagaagcagaacgccgggcgcaggcggtgatccactctgccggctggcagcagaaacaggctgaactggctcaggcttaccggggggtgctgcaggcgtggtcgctggggctgcaaaaatatccggccgtggtgtctgacgaccagtacgtggtttatggtactgccgatgtggtggtggccgaaggactgctccacagtcacaggacgcgggagggggggcgatga

SEQ ID NO: 396551 - DNA, 1128 bp, Salmonella enterica
atgcgggcgatactgacagcatttccacaaaacggcgccagggtaacattactgaaatccggcaatctgacccaaagactccgcgatggccagcgcatcatgatctgcgatgttccccggcaacttgagaatgtacctgcgggagaaataccggaagcagggcaatggctggcccatgatgaagatctgcaaccgttctttgccgacagcagggtaataaatgctgccggtggcacggaaggggtgaaaacgtgggtaagcagaatagcggattgtcagtgcgctggcggtgatcatgtcaggaacctgacgacagcacagataccggacggcggggccgtgaggttgtgccatgcgtgcgataacattcactacatgaagggataccgcgatctgagtgaaattatcgccagtaaccgcgcggagtggatagtgggctacgccagaatgagcctcaggctgaatgccgatcaccaactgacgttgccggagttattttgctgggcggtattacgcggcgtggctgaagccatgcccgtgaacgtgatgcgccgttttgcctccctgccggaagatgaggtgctcaccggcactataaaagaagcggatattaacccctggcaactcagcgcccgccagatagtggagaaaaaagccggggagggcatagcagctatgctccctgatattcatacagtgccagacgcaaaaaaccttattaaggattctggtcttaatgagactcttaatgagaccgctacagaaagggtaaaacccgttctgacgctgagcatcgacagtgacccggtagcgggctatatgagaaagccaaaaatgatccgcctggaactgtcgggctatacgcggtgggtgaagcgccagccatgctgcggttgcggtaagcaggcagacgatccacatcacatcattggtcatggttttagcggaaccggaactaaagcgtgtgatttgctggttataccgttgtgtcgggtgtgtcatgacgcgctgcacgcggataccagagcatgggaagagcagaacggcagtcagttgttgtggctggcgagaacgctggcaagagcgacaggcattggtgcaataaccgcagcgagggcgaaagagtga

SEQ ID NO: 396552 - DNA, 234 bp, Salmonella enterica
atggcaaaccgcaaacacgctcacactcgcgctgacgcacagcgcattcatactcagacccaaatcaaccgccgcctgtaccgcgcacagcaactggctaactgcctgtatttcgaatccatcagcgataacagcattatggtggaattgtgtatatcgtccgttctcagctatctggctgacgatctacgcgacgttcacgacctgtttaacggcaaaaagcgcaacacgtaa

SEQ ID NO: 396553 - DNA, 270 bp, Salmonella enterica
atggctacgaccccagcaaaaaaacacccaaaatccgagatcccccaactcagctacgactgccgccgtaagatttaccgtgcgcagatggtggcgttacatcttcaccttgatttactggccgttgatttcaatgcgattccggtatatctgccgcacttactctcttacatccacgacgatattgagactatagacaaagaattaatttccctcggactgtttgacgaggcgatgggaaaaagaccgcgaaaacctgacgcgaaataa

SEQ ID NO: 396554 - DNA, 474 bp, Salmonella enterica
atggcttaccaaaaaatcatttacgaacagctaaaaagctatctctatgcgctttatggcattactaatcaagatcatgactcactacagttccacgatcttcttagctttcgcgcgatatccctcaccctttttcatgctgtactgaatcaatacagattcagggacgttaattacactgcgctgactgactccgagattattcttcaccttctgtacgaggatgccggtgaaatcatcccagcccctggtcaggtatctttgtctttggttctgaaaatcctggaacctcgtctgcaacgtgtcctccacagcaccgattcagaatttcaagcgttagttgctgacatgtattcacattttgaaaagcacatgaaagtaccacttcagttttgcgtaaatattccagttcttcgtgaactggaatgggacgatctgccgaataacttattttcactgactccatatagttaa

SEQ ID NO: 396555 - DNA, 519 bp, Salmonella enterica
atgcagagtgctattgcagaggaagtgttatctgattcaagtcagagcactagagacgcggaggtaggtgaagaatctccatgccttatggatctgataaatctactgagcgcggtagatctgcaatcaccacaagggggcaaaaaaaccaggttgcgcattgatggtccgattgcggcagtggcttttttggataaagcggctgcatacgttggattgacccgtgaggcgctagctacggctttaaggcgtggtgaaatgcccggacataaaaaacgcaaaaacccggaagatgagagttcggggggcgactggatatttaatgttaaagcctggaatgaattagcagatcaactcccggaactggaaccgcctgaatggcatcactggaaagattattggacgtataacagaggtgacaaaaaattccagaaggtgaacaaagaagactgtttaaaggttgatggtcgccggatttataagccacgcaaatccaggctggaacaggcaggcagatag

SEQ ID NO: 396556 - DNA, 342 bp, Salmonella enterica
atgactaactcgtcaatagattattcgcaaaaattgcgacaaataaggaaggccgaaggtctaacacagaagcaatttgctgaattaacaggactttcaataacaactgttaaaagctatgagggtagcaagcaaccagcaagggcaaaaatcgtagaaaccgtactccaggtcgatatgtttgaaaaatatatgttttggctcatgaaagataaaacgctgccttcagccggacaaatcgccccggctctctctcttgatgggtacgttcaatcggagggcgatcaggtttcaaccgaaacacctcaaaaatcatcccgatcacgccgcaatgctggctga

SEQ ID NO: 396557 - DNA, 1152 bp, Salmonella enterica
atggaaaataaatatctattcgcgcattacttacgtggtttagctgcaatatctgtagttattgcacactatggaactgctttttttaactctaatgatgttttagcaccattagttaacgcacctcaagtaaaggaccgaacatatccgtggatcattggtttcattcctcaggattttccaggttttcttggcgtttttggtgtgactattttttttataattagcggttttgttataccgttatcaattgaaaaatataacatcaagacatttcttttaaaaagatttttccgcttgtatcctacatacttttttatcttttcattaaatatgttagttgcctttattggatactgtgtgtttaaaaaaaatggagttgagtatgtctatagtaattatgatatttttacatcctattttatcggccttaacacatatattagtggctctaattggcttgatccagttgcatggacccttgcaatagaaattacattttacattatttcttccttattctttaatttatcctttctgtacaaaaaagaaaaaaagatatcatcatccgatataattactttaagtcttttaaattacacaatatgcttagttctttcaaagtattataacgaattatcattactactcccatacttgaacattggcacagttataaagtcgctacacctaatgtcttttatactttttggaacaagctttttcttattcacacagaaaagaataaaagtcaaatcacttatcacgttattagcaggtcagtatttttcattcctttatattagcatgaaaatagtcccacaaggtcaatacattcctattttactaacttttagctggttggctataagcattttagcttttagcatatgtatctcaacatctcataacttcaaaaaaaacagtgttgctgaattcatgtcaaacatcagctaccctttatatctttgccactcatacataggatatcttataattagtatagttatttattacgatttaatgccgagatctttagctatattaataccgatgcctattgctttattaatagcttactatgtgcataaacacatagaaacaaaaagttatatgattgctgacaagatattggttaaaatcaataagtaa

SEQ ID NO: 396558 - DNA, 432 bp, Salmonella enterica
atgaacttttactatacggccgaatttaattcatttatcagtgaaaaatataaaactgatggtacatatacggataagtcatggcccggtgatgctgtgctctgcactgctggagaagtgaatatatatcggggaacaacgtcgccagcaggtaagaaacttggttctgttgcgggtagacctgcatgggttgacgttcctccattaacgcgggctgagatgatcgctatcgctgaaaatgagcggcagcgattaattgttaatgctgacgctattatgctcgactggcgcacagaactgatgctcggtgaaatcagcgacgccaacagagcgaagttgtcggcgtggttggcctataaaaataaagtgaaatccatcccggcggaagaggctattaccgttgaatttagttggccagaccaaccagcatag

SEQ ID NO: 396559 - DNA, 312 bp, Salmonella enterica
gtgagcataaaattttatctccgcgatgatcgtattcgtcgcaatcttatcgactacatcaacagccagcctgttaatgctgattttccgcttgtcgtcagcttttcagatccgaagcgcacccttcctcaaaattcactattccatgccatctgcggcgaactggtgccaattcgtgaaagtaccgccgctatgggaataaagcgtatgaacagtctgattgagtacagccaggcgtttgcggtatctcagggtatccagttacgcgaggttcgctacagcggggattatttcgggcggctgagctggtga

SEQ ID NO: 396560 - DNA, 507 bp, Salmonella enterica
atgattaagtttcaagatttcagagaacgatacagcgaagtattaaaagctgaagatgaagaaagggagagtttccagcaggttgctggaatgattgtgcgtcatttcgaaaattcgctggaccttgagtactctcagtatcctgcgacctttagtggaaacccagcagaaaacaacatttcattaagttatgtttctatagtaaccgaaaaagaggaccgacatgttgagcttaaggaactcaggcctgatgaaaaaggtgatctttcattttatgtctgtttaacagtggataaatcaacgatgtcctatcctaagaagacgttatacgcacgtttgttgttacgttgtaatggtgatggatttacagtgacagtcggcgaagacgtatttgaaacagatttgagtaaatctccgactgaagcagatctggcgggcatctcagaagcggctaagcatgtcatgcttattgaattagacagtgatataccaaaaaggaaatactga

SEQ ID NO: 396561 - DNA, 735 bp, Salmonella enterica
ttggctcggtttaagagcatgcgtcatatttatagaagcacaagttcctttgaaaaagaaagtacactgaaaaacaaactgtgctgtcatattgccagcccgtcagcatctagatacttaaaccactttaatttatccattactgagcagtacagcccgcgcctggtaatcaaactcactgtgatcgcgccctttacaacaaaccgacttttctgctgcggcgcggatgacctccagtgctactatatgtttcacctgtcagtcgacgaaatcaacaagcgagcctttcatgccgtagttttcgcaaggcatgtcatatatatcggccttctggtgttattcaacgttcggcctccctgcgacctccagtttttccttaactcccttgaacttcttcgctatacgttggtaaccatcgagggctttgcttacctcgtctcgaaaattattttcagatgctcaagaacttccagaaaatcactcattcccacggcttttgaggtaacttctcagtatgtgctacgaattgaagtcatcaccataagccatacgggcagtaacttagcagctatcgccacatatcacgtttccattgcagctatgatagctacgtgctcagcattgattttttctgctcgttcgctcattgttaatccttccagtttaatgttctcgccctgtaaacagataaaacccgttgcatcgtcacgctgttccggcactccgtacagataa

SEQ ID NO: 396562 - DNA, 825 bp, Salmonella enterica
atgaagaaaacgtttttgttcttatccttaataacatgtagtgcggcaagttattccgcatcttttgactgttcaaaagccaatgccagttatgaaaagataatttgttcggataatgttcttagtcgaatggatgacgcattatcaaataactaccgtgcagttatgaactccaaccgcccacaaaaaatcaaagatcttcttaagcaagatcaaatatcatggttgaataaaagaaacgcttgtggtgaatattattgcatcagaagtttatacgaatggcgagtggatgaaatatgtgaacggtatggttcatctacagaaaaattaaactgtatatcgagtcaagatattagtaggaagattaatgaagaaagagaacttgctaaacaggaagaccaaaagagcagagtgccagtgagtgaggtattccagcagttagtcaataaatactcggatgaagtgatgaggcttgggttttctaaagcacaattatcatcatccatctacattagtttctcttccaattatgttcgatactgcactctgcaagaatatttatctttgatgtttgatacaccgggccttaaatcaattggcagaattgataatggcgattatttcggattcagaatcaagatcgcaggtagtccctctactggtttcacatttaaagcagaggatgatgaattatatttaaatggacttgtgactggagatgatgttgttgaagtagtaacgaaaggtcaggcaaatcagctttctaatacattctatgtttatgccgttcagacattatatagaaataacgccaagttgcagtag

SEQ ID NO: 396563 - DNA, 564 bp, Salmonella enterica
atgaaaaaacaggaaatattgattattgaatcacgtagcgatcaggatatttacgatggcagaggcgaaggagaaacattaaagcgcatacttaaattacagggtgtcaatgccaggtgcattgaggtgattaatgaaagaatgcttattaaagcctttaaaatcgctcagagagaaaatataaaatatgtccacattagtgcacatggttttgacaaaggctttgcactaacagatgacattgttcttacatggcgagatttagaccgaatggcatggccgatactaaaagggaaatgtatttgtttctcaagttgctctgttggtaatggcgtagaagagttattcactctgcacaaatcattttgtaatgcgattgttgcaccgaccagagatattagttggggggaagggttagtggcatattctgcattttatcatcgaacacaatcacgcgaaaagtcatctgtccagaatgtgaaagtcatgaatcatgttgttggtgctggaacatttaggcttatcgagtctccttatgtatcccgtacttatgcaattggttga

SEQ ID NO: 396564 - DNA, 378 bp, Salmonella enterica
gtggctcagttatcttcagaaagagcagacaagcagataggacaacgcatccagttgcgacgtaaagagctgggtataaccgcccaatacctggcggagcttgttgatatctctcaccagcaactctctcgctatgaacgtggaacaaacaagattaatgtggctcatcttgtgaatattgccactaaactgaatacgccaattagctggttttttattgattgcttttcgacattaggtagtgaatttaataatcagcacgattttgtgcctgtcaaagatgcagatttgaaaaatcgctttgatcagatatggcctcgtttgacacatgaacagaggcgcatattgattatgctcttagatgaatatacaaaatga

SEQ ID NO: 396565 - DNA, 624 bp, Salmonella enterica
atggcgttaaaacatagagaattgaatgagcttaatggggttgagcttttgatagctaaggcggttgaggaagcagcagaggttgacgaatcagaagagtttgacgaatcagaagagattgatgaatcagaagagattgatgaagacctaaaagcgcgacgtaaggccaatattcagtatcagaatgcacgcaaaaaaaaattgaaaaaattaggtgagcatcagattcaaattaggctcgatgatgaaacttttcaaagattgtgtgacttgtgcgaagtgctggggtacaggaaaccgaagaaaggaatgtgcaatcttgtagaaacatattcggcaatttttaaatatctcttaagaacaagtgagaaaagttttgaatacatcccgaacacccaacgatcaatcaagatattgagtatatataagtatgttgatcatcttagaaatgaacaacaattgcctaaagatatcatcatttcagaacttaggaaaaagaatgctaaaattccagtcagaaaagctgataatggaaccataatatttgggaaaggggtataccttgaacggtattttgacaaggttgaagttattagagcgcttagaatagcagataaaaagtaa

SEQ ID NO: 396566 - DNA, 897 bp, Salmonella enterica
atgaaactgctacaggccatcatccggcacgagaacggcgagcagccctacggctacaacatgttctacctgctgggcggtacgatagaaggtgtgggcagcggcggcattaagccagtgaaagcggcagggaatatcatcggcggtgcgctgggcgcgtttaacccactcggcagcgaagactccgaaacgcttagcggtacgttgctgaaaaatctgtcacccacgcttccacggcctttcattgactatgtgatgaacgagaacttcatgggtacgcaaatccgtcgtcagaatgcaccgtggggtacgccgaagcctgacagtacgctgggccgacgttcaacgccggaagtctataaatctttcgcgaactggctcaatacgacgacgggcggcagccagtaccgttccggtgcgatcgatatcaatcctgacagcatgaaatactggattgattatatttctggtggtacagggcgctttattggtcagacggtcgacgccgcggccaaaacgtacaacggtattgatattccggatcaacaggtcccgttcctgggtaaactgtcaggccaggttatgccgtacgctgaccagcagaagatgtacgaccatattgatgaactgagtcagtacaacgctgaactgaaatcgttaagcggcgctgaccgtgcggcattcaggaataaatacagcggacaactctcgatgaacggcatcactcatcagtcgcaactccagcttaaaaatctgcgcaagcaacgggacgaggtttactccgatccaacgctgactgccagacaacaggccgacagggtgctgatgattgagcagaacatgaagaaggtcgtggacaggttcaatcgggagtacagggataaggtgggaaactga

SEQ ID NO: 396567 - DNA, 465 bp, Salmonella enterica
atgaaccgcataactactggcgtaatagcctcgttgctgatagtggccgccgcgctggcgtggactacagaacgctatcacggtaacgcagtgcgctacaaagaccagcgagacaccgccactcacaacctgaagctggcgaacgagactatcatcgacatgcaaacgcgccagcgtgacgttgccgccctcgatgccagatatacaaaggaactagctgatgcgaaagctgagaatgatgctttacagcgccgtatttctgatggtggccgggtgcgcgtcgaagggcgatgtccagtgcccacccagaccgaaaccgccagcaccagccgcgtgggcgatgctgccaccatcgaactctctcctgttgctggacgaaacgttctcggtatcagagccggaattatcaacgaccaggaagcgctgaggtatttgcaggactatatcagaacgcagtgcaggtaa

SEQ ID NO: 396568 - DNA, 363 bp, Salmonella enterica
atggcgcgcggaacaaaaaagacggacgccggtgaagtcaccaacgaatccggcgttacattgccggaaaataccgccagttctgataccggttcagatgttgtattgccggagatgacgggcagcgcggagctgtcaacgacagacacagcagttactgaaaccaggggagcggatgacgttatggtgcagccagtgcgatatttcacggactcagcgacgggtgttttccgcacgccgtctgatgaggagttcagtgtaaaccggcgccggatggctgaattatacgaaaacgggctggtgagggaggttaaacctcagccggataataagatggcgccggaaccgcagacgaaggagtga

SEQ ID NO: 396569 - DNA, 513 bp, Salmonella enterica
atggaaattggttcaggctgggttggttcgcaggctgtggcagaaacagggcagcggtggatgtctgctgcggggtcggcgttaagagccccggcgccgttctggatgagcgcgcttgtcggaaagtcggtggtgagtgttgcgtcgtacgccaatcctgcaggccgggggtatgatacgagatattccgcattctatgactcagattatgttgatatcaccctgacagtgccattttccggcacgatagcaactaataatccgtctcttgtggtatccacttctgctgcgctctttaatgataatacgacggcaggggcgacttacgggacaagtatttctgtggcaggcgtacagaggtttttcattggattaaggtttgctgtcggctgggatgattcagtcgtaaatatgccaaatactcaatggcagttattgctgaacggcagtgttgtagcgacatatacgtcaaacttctcggcgtccagccagtttgacacaaccgactggtaa

SEQ ID NO: 396570 - DNA, 390 bp, Salmonella enterica
atgattattacaggaaaaagcttattacttcccggcgtaatgccgacagaacagcaggggagcagaaacgatgccggactcactagtgtaaagaccgatggtattaccctgaaaggcgatggagtaactacgccactggcaatgaatatttctacatcagattatccaggtgtgggagattatgttatcgcctgtgatatggggaatccggactatcagttttttgggtataaaatccccggtgcacagttaagggagaccgcactttcttttggtgataacggaactgcttatgccagtaaacatacttacaggatgtttctcggggcatttattgggacggggtatttttttaccaataatgttggtctttttcgtcgagttgcgtaa

SEQ ID NO: 396571 - DNA, 480 bp, Salmonella enterica
atgacaaaatacacagtcttatctggggttcttgcctccatgtttttcactgcttctgctgccccgctttcccagcctaacatatccctgctacaggctaataaacttacccaggcagcaataactgcatgtcaacagaaagggtacaacgtcagtgtgactgtcgttgatcggtcaggtattactcttaccatgcaacgaatggataacgcggggccacataccgttgatgccagctacagaaaagcatggacagccttatcaacccgcacgcctacaggtaaagtgatggaaaatgcacaaaacaattctggagcccagcatctctccgatatatctggctttcttttattagccggtggcgttcctgttaaatctggtgataacgttattggtgctattggagtgggcggtgcgcctggaggaaatcttgatgagtcctgtgcgctcgaggcaatagaaaaaactaaggataaataa

SEQ ID NO: 396572 - DNA, 540 bp, Salmonella enterica
atgaatgatataacctggggtaaagaggctgaaaaatggcctcgcgattattctttattttctcgcagaattcagtatcttcgttttaattccgtgctcgtcaggctttttagccagaatggtatgtcactaatatgctatatctccaaattcaatgtcagtgaaaaggcagtttatgtttcagatgaaccaaaaggtacgaaaagagtcagaattgaactccagaacatctcaacactcgaggagttaccagataacacaggatataaaccaacagaacatgaattactttttataaatggcgagaaatttaataataaaattcagccagcttcaaaaatggatttcttttctatttgcaataaatgctttaaacaatgcgttgatatcagggttcatatggccgatagtcgcgttatcgaaggaagaactactggggtaaatgcctgtcaggttggtgtaataatggacaatggaaaccatatccagatactttttgattgggtggacaggatcacatcaagagatttttcgggataa

SEQ ID NO: 396573 - DNA, 336 bp, Salmonella enterica
atgcatagttatgcaatggaatttggaaatgcctgggtctggattcatgataaccaatgccaggtggtacgggcgttactgcaaactggaatgatcaaggtgaataaagaaggaaggtacttattagatgttaatttggcttctgttgattggccattaagaagaaaagaagctttcgcaagtcatgtcgctggatggctcaagcatcgttttggtatcgaagcgggaaggtattctgtttggggaaaagatgattatgatgctgtcccaagttatgagacgccactaaaggaccagtatcctttttataatcatacaatgaatgtcgactggtaa

SEQ ID NO: 396574 - DNA, 2310 bp, Salmonella enterica
atgaacatacgttatccggtacggaaagccgacggacgggactataagaactatgacgagctgctgaccgacatccgcaaaaacgcccacggttggtggttactgggcattagtcgttactggcacggggggatccacatcgggacgtcatcgtctccggcctcggtgctggatcaggaaacgccggaaaaatccgtgccgctccagttcatgatggacggtgaggtggtggcatggcgggttaaccgcgattacgcggctatcgagtgttgccaggaacgcccccttcgccagtccggcacctttgtgctggtcaaatcagtgtacaagcccgacgaacaggatgaagccacctggctgacgctgtaccagctttacatgcacatcgcgccactggcagaatttccgaaacgcccgctttaccgggtcacgcagaaaggccacggcgtgcggatgcgtaaacatttccgccacgatgacagccgcgaaatcgcgccggacgtgctggcaaacaaacacggtcacgccagaacgctcgttcagggcgacacgcttgccgtactgcaacagaaatcgtttctgctggaacaacggccggagccgttcgctctggtgcagcgtcttcaggacggtaagcccgcaggtgaactgttctgggtctcgatgcgcccggaatatctggagcctgacggcgaatgttacgtgtgcctgcctgactggatgcacagtgctctgaatcacggcgtgtttgatgatgtggtggtgccacctgcaccgctgaaagtgacggtgaaagcaggggatgcggtcgggttcctcggcgctcaggatctggccgacgaagataaccatccgcagattatcaccacggactataaagcccatatcgagctgctgagcctcgatgagcatgtgccggatgtggtggcaaacgtgaaggggattaaaacgggcaaacagtttattaagctgaagctgaaacgcccgatgtaccttagatgcggggagggcgaggaaagtacctttgagcagatgagcgccattacccgtgccgatgccggaaaaattattccgcgtgatgccgcgtacccgtttacggataaaaccggggtcacatactttcagatccgcccgcatacgtggatgcatcaggacgatgtggagcagctcagccagcatgatttagcaggactaaactttcactgtattgaagctgaacacacaaccgactttacccgcacactggatgaacgctggctgattgacgccctgaaaagcatcagttcgcactttgacggtgaaaaagggccacaaagttcacaggccaaaatgttttatgacagcctgatccgtaatgctgaaaacagaagaccgcccagcccgtatcccgataaatctcaggatgaattactgtttggtgcactgcatacgaaccagatgaacatcccggaatatgcgcggcggctgatagtgaaacacgacagcgactggcacagtacccgtgatgatacgcgctggtcatcggtatttaaggtcagggatgaaagtccggttgtgaagatggccaacgggggatttctggaggtgacgcgctggatggataaggttccgccgttcgccagtcagtggtctgtatggcattttcatccgcttgaatttatggaaatattacggagtacagagtttcccaagactcctgttaatggggaattaactcctatagaatttattaatttctataatggagacaaaattgatgatactgattatgaagaggctgcaaaagaattgggatgcgaagttgcagcaattaaggctgtagcaaaaacagaaactggttcttatggctcctattttaaatttgaaggtaacgatgattatgttcctgcgatattatttgaaaggcatcacttccataaatatacaaatggaaaatatgatcagttcgaagatatatcaaactctgttgcgggtggatatggtgcaacatcagtacagtatacaaaactagtcaaagcgtatgccttagacaagaaagctgctttgaaatcggcatcttggggtaagtttcagattttggcatcgaacttcgccacagcaggctacgccagccctgaggatttcgtttttgcattaagcaagtctgaaaaaaatcagttaaaagcattcgttagcttcattaaggctgatagggttttattgcattccattcggactaaagattggctttcatttgcaaaaagatataacggtccaagacagaatggatatgatttgaaaatggagaggaattacaatgcgtcattataa

SEQ ID NO: 396575 - DNA, 138 bp, Salmonella enterica
atggttacagttaataaagaaaaatatattcagtgcgtattatttttttatgaaagtaaatatatcatcaacaacctgatgttaatgtcaggtgcatattatctgattgctatcattattgagtgtgagcctggttaa

SEQ ID NO: 396576 - DNA, 156 bp, Salmonella enterica
atgttcatcatagttaaaaccggtacacataatgcgatcggttctgacgggaaaatggtgaaacaactggctgtaactggcccgcaggccgaatccgaagcgttcacttttctcatcacggaaattctgctctatttgcattcttctgctatatag

SEQ ID NO: 396577 - DNA, 16497 bp, Salmonella enterica
atgctgcagaattttttgtcagataatgtagcaaaagacaatttggctcaacaagataatgccatacagcaaaacactttaagcaaagcagctcaaaatattaagcaggatgaatccgaaaaaataacacctcaacctcttaataaaaatacaggcagtggaagaagtaatagtagtaagaattatgataatcaatttgaagctgaacctgttaaagagaaactaaaaatatcctttaagcttgcagcagaaagcaatagtggaagcaaagatgatagtataactaattttactaaaccacagtttattggtagcacatcaccaaatgcaacagtggttattaaaataaacggaatttctgtcggtcaggttgttgccgataagttaggtaattttacctttactgctcctgagaaattggccgatggaacatacaatctggaagcggaagccacaactagtaacgcaatgggtagcactaagcttgccattactatagactccgttattgataaaccaagttttgaactttcgccagaaagcagtattcctggtcatcaaggcttaaccgctacgttgacaccatcaattattggtaccgcagaagaaaatgcaaaggttaatatttacgttaacgataaacttattactagcgtagatgttgataaaaatggtaagtggagttatggatttaaaggtaaagaattaattgaaggagataataatattaaggttgttgcagtagataaggctggcaaccaaagtgaaatttcaaatgtaattacaatagataccattcctccggaaaagccgacaattgagctggatattaatagtgattctggtgttaaagatgacaatataactaacagtacattacctacatttatcggtgtggctgagcctggggcaacggtttccatctatattggaattaagcacctgggggatgttgttgctgctaaagatggttcgtggagttatacgcttactgagcccctgaaagatggcgaataccatttaacagcgacagctacagatatcgccggacatacctctgaaacatcagatcttacatttaccattgatactcgtatcagttattttagtgcagagcttgatcctgccgatgatagtggtatcgttggcgataatgtcactaataatagccgccctacttttatcgggaaaagtgaaccaaataccacgataaatgttaaaaactctgaaactggtgaattagttgttcttaaagccaatgctgaaggtgagtggcaatttgcttttacttcggattccgctgaaggggttaacaacctggttttcactgttgaggatgtggcgggtaaccagaaagatttttattttagttatgttattgatacagtagcgccgacagccccgacagtttccctggatgattttgtaacattaccaaacggcattattttatcaggggatgatacacctgcattggtcggtacggcagagcctaaatctacaatatcaattctgcgagaaggtaaattttatgccagcattgacgtcgactcaaatggctcatggagttatcaatttaatgaaaaactcccgcaaggggtatatgacattgagattgtttctcaggacatagctggtaataaatcctcggcaattaaatactcttttactatccagactgaagttgtaatcccaaaagccgaacttgacgcggttgatgactctggcgagaaaggggactggattaccaataagcataacgctctgactttactcgggactgctggtaaatttgctaccgtaaatattattattgatggcaaagctattggagtgacaacagcagatgaacacgggaactggacttttgatatttcccgtaatttgtctgacgatgtttatacagtgacggttgaggcagtagacccattaggtaatactgcatcggctgattatcaacttaccattgatagttttacaccaatccctactgttatgttgcatgatagtgctgactctggggttaaaggagacctgattacaagagttaatacgcctttatttaccggaagtgcagagcctaatgctaaagtctcaatctatgttgatggtatcttaagcggtgaggccattgctggcgatgatggtgtatggaacttccaattttcaaatatattgcctgatggcatgcatgaagtgatggtaaaagcggaagatattgctggcaataaagcatcatcatcaatttataacttccaaatccttacgcatacacaaaagccaaccattgagttagtcgatgacacagggttggataatacagatcatatcattaatgaaaaacgacctgccctgacagggactgctgcaccttattcaatcgtaaaattatatatagataatgctttggtggctgaagtcaggacgaataaagacggtgtatgggattatactctgaaaccagatcaaagtctggctgatggtgatcataaaataaccgccacagtagaggatattgctggaaatattgcacattctgacgcctttttatttagtgtggatactaccatatctataccggtagtttcactaagccctgattctgagtccggaattttagatgataatttaacgaatatacctaaaccaactcttattcttagaaatattgattcagatgttagaaatgttcaggtatgggatgctatctctaatacacagataggtattgctacccaacaatctaatggaacatggacatatacttttacttcagatctgattgatggcctgcatcaggtatatgttaaagctgaagatatcgctggcaataaagttactggtcctacatttgattttactatagatacgacactttccattccggttatttctttgattgcaaaagatgatactggcgtggcggatgataatattaccaatattaataagcctgactttattattagtggtattgattctgatgcacaccgggtagttgtacaggtgacacataatggcgtgaatgaacagattgtactgactcaagatggcggtaactgggtatttacacctgccagcacgtgggatgatggcagctatacactgcaagtgacggtggaagatgaggcgggaaatattcgccagtccacaccattaacagtgaaagtggatacgcaaatcgcgattaatagcatcgaactgatcaatgacactggtattgctgacgacaatataactaacgatatgcgtccacacttccgtgttgaagtgccaaatgacgtaaatatggtacgtctgagtattgacgggggcaagacatgggggagtgcgacgaaaaatacggcaggcatttgggattacagttggccgacgaatgtaactgaagggtcacatatcctgacggtagaagcgaccgatattgctggtaataagttaacgcagacactcgactttactatcgacactttgttgactgtgccgaccatcgctctggatagcgccgatgatagtggtgttaccggggataatattactaacagcaaaacgccgggctttaccctcagcaatattgacggcgatgtgattcgggtggcgctacaaatcacgcataatggcaagaacgaggtagtggcgctgacgcagagtggtggtaattgggtatttacgccagaccacgactgggcagatggcagctatacgctacaagtgacggtggaagatgaggcgggaaatatccgtcagtccacaccgttaacagtgaaagtggatacgcaaattgcgatcgacaatatcgaattgattaatgacaccggtatggtcggcgacaatctgactaacgacattcatccgcagttccgtgtgacggtaccagatgatgtggatagggtacgcctgagtatcgacggcggtaaaacgtgggttaacgccacaccaggcttaataaaagggagttgggattatacatggctggggaaagttcccgaaggtaaacacacgctgatcgtagaagccaccgatattgcaggaaacacggcgacacggacgctggattttactgttgacaccacactgtcagtaccaaccatcacgctggataccgcgaatgacagcggtgtggctggcgataatatcaccaacgaaaaaacgcctggttttaccctcggcaatattgatgccgatgcgagccgggtggtggtacaggtcacgcacaatggcaagagtgaagaggtggagctgacccagaccagcggcaactgggtattcacaccaaccagcgcgtgggctgatggcaattacaccctgacggtaaaagtgaccgacgaggcggggaatactcgccagtcagcaccgttgtcggtgaaagtggatacacaggtcacgattgacggcattgtgctggtcaatgacagcggtatcaccagcgataatataaccaatgaggtacatcctcatttccgtgtgacggtgccggaagatgtcaacgttgtacgcctgagcatcgatggcggcacgacatggattaacgccacaccgtcttctaccggtatctgggattacacctggccggacgcggtacctgaggggaaacatacccttgtcgtggaagctatcgacatagctgggaacaaggcgacacaggcgctcggttttaccattgacaccaccctgtcggtaccgaccatcacgctggataccgcgaatgacagtggtgtggctggcgacaatatcaccaacgaaaaaacacctggttttactatcaacggcattgatgcggatgcgatccgggtggcagtacaggttacgcataatggcacgaaccaggaggtggaactgacccagatcggggggcagtggcactttacgccggccagtaactgggtggatggcaattacacgctgacggtgaaagttgaggacagagccgggaacgtcagccagtccgcgccactggcagtgaccatcgacacgcagacggagattaacaacattgtactggtcaatgataccggtatgccggatgacaatctgaccaacgctctgcgtccggagttccgggtgacggtgccggaagatgtgaatgcggtacgcctgagtattgacggcggcaagacgtgggtggatgcgaagaaaacgtcggcaggtgtctgggattatagctggacaacagacatcactgagggcgtacacacgctgacggtggaagcgaccgatatcgcagggaacacggcgacgcggacgctggactttaccgttgacaccaccctgtcggtaccgaccatcacgctggataccgcgaatgacagtggtgtggctggcgacaatatcaccaacgaaaaaacgcctggttttactatcaacggcattgatacggatgcgagccgggtggtggtgacggttacgcatgatggcaaaagtgaagatgtggcgctgaccaaaaacggaggaggatggacgttcacgccggacagtgcgtggacggatggccgctacacgctgacggtgacggtggaagacgacgcggggaatatccgccactcagcgccactggcggtaaccgtggacacacggaccggcattaatagtattgaactggtgaatgactccggtgttgctggcgacaatctgactaatgaaatgcgcccgcacttccgggtggaggtgccggaagatgtgaacgcggtacgcctgagcattgacggcggcaagacgtggatgcatgcgtcgaagagcgcggcaggtgtctgggactacagttggttgactgatgtgccggaagggacatacacgctgacggtggaagcgaccgatatcgcagggaacacggcgacgcggacgctggactttaccgttgacaccaccctgttggtcccgaccatcacgctggacaacgcggatgataccggtgaacggggtgataacctgaccaaccgtccccagccgaattttatcctgcaacatattgatgccgacgtcgctagcgttgtggtaagcgtgacgcatgatggtacgacaagtgtatttgatgcgagtcaggaagctggggggtggcgttttacgccggatcgcgactggacggacggcagttacactctgagtgtgacggtgacggataaagccgggaacgtaagtcagtccacccctctgacggtaacagtggatacacatatctcaattggtaaggttgagctgattaatgacagcggcgtcgttggcgataatatgaccaatgacatccacccgcagttccgtgtaacggtgccggaagatgtgaattcggtacgcctgagcatcgacggtggcgcgacatgggttaaggcaacgcagggcgcggcagggagctgggattatacctggccagatgacgtgaaggatgggaaatacaccctgcaggtggaggcgaccgacaaggcaggcaacaccatcacgcggatgctggaatttaccattgataccacgctgacaacgccgaccattgcactggaccataaggatgacagtggtattactggcgataatctcaccaacgcgaaaaagccaggctttatcctcggtaatattgatgtcgatgcgagccgggtggtggtgcaagtaacgcatgatggcaagagtgaagaggtagcgctgaccaaaagcggggggcagtggagctttacgccgacagcgccgtggggtgacggcagctacacgctgacggtgacggtggaagataaagccgggaacgtcagccattccgccccgctgacggtgacggtggacacgcagacagccattaacagtattgcgctggttaacgacaccggcattccggacgacaacctgaccaatgcggtgcgcccgcacttccgggtgacggtgccggatgatgtgaacgcggtacgcctgagtatcgacggcggcaagacgtgggtggatgcgaagagaacctctgccggcgtctgggactacagctggctgacggatgtgaccgaaggggtgcacacgctgacggtggaggccaccgatgtggcgggcaacacggtaaaagagacgatgggcttcaccgtcgacaccacgctgtcagtaccgctcattgcgctggacagcgcggatgacagcggcgtcaggggggatgaactgacccgggtgaacaggccggcgttcttactggacaacattgataacgatgcgcgtcatgtcacggtggaagttcagcatggcagcaccagagaggtgctgaaggcgacgcagggtgcgaacggacgctggagtttcaccccggcgggcgactgggcggacggtcagtacacgctgacggtaaaagtggaagacgaggcggggaacattcgccagtctgcgccgctgacggtaacggtggacacgcagacggccattgatggcatcgagctggtgaacgaccacggaatttccggcgataacctgaccaacgccctgcgcccggagttccgggtgacgacaccgggggatgtgaatacggttcgtctgagtctggacggcgatacgaactgggtgaacgcgacgaagaatgccgccggggtctgggaatacaactggccgggcgacgtgggcgagggtaaacacacgctgacggtggaggcgacggatgcggcgggcaacacggcgacgcggacgctggagtttaccattgacaccacgctgtcggtgccggtcatcacgctggacagtgcggatgacagcggcaacaggggagataacgtcaccagcgtcaggtcgccgggctttaccatcgaaaatatcgatcctgatgcgaaccgggtgacggtacagatcgcgcatgacggcagcagccgggaggtggagctgacccagaccggtggccggtggcactttacgccggacagcgcgtggacggacgggagctacacgctgacggtgaaagtggaggacaatgcgggaaatatccgttattccacgccgctggacgtgaaggtggacacacatacgtcaattaatcatattgagctggtcaatgacaacggcgtcccggatgacaacctgaccaacgagatgcgcccgcagttccgggtgacggtgccggaggatgtgaccgtggtacgcctgagcctggacggcagcggcgactgggtgaacgcgacggcgggagcaacgaaaggggaatggaactacagctggccgtcagacgtgggcgagggtaagcacgtgctgacggtggaggtgaccgatgcggcgggcaacacggcgacgaagaccctggacttcaggattgacacgaggctgtcggagccggtcatcacgctgaacagcgcggatgacacgggcgtgccgggagacggtctgaccagccgcgcgcagccgtcgttcacgttgcaggatatcgatgccgatgtggtgagagtgacagtgagcgtggagcacggaggaaggaccgagacgtttgacgtgttacagggcgcgggcggatggatcttcacgccggcggcggcatggacggacgggagctacacgctgaaggtgacggtggaggacgaagcgggcaatatccgtcattcagcgcctctggacgtgaaggtggacacacagacggcgattgaccgtattgagctggtgaatgacagcggtgagccggcagataacctgaccaacgatgtgcgaccggagttccgggtgacggtgccggaggatgtgaacagggtgcgggtgagcctggacgggggtaagacgtggatggatgcgacgaaggcatcggcaggcgtctggagttatacctggtcgtccgatgtgaccgaaggcgcgcacgtgctgacggtggaggcgaccgatattgcgggcaatacggtgacgcggacgctgggcttcaccatcgacaccacgctgtcaacgccaaccattgaattagcgccagatcaggataccgggcaaagtaagaatgataatctgaccagtttaactcagccggtttttgttttgggtcatatcgataatgatgtccaaagagttgaattacagattgagcataacggtacatttaaaaacattattttaaccgaatcggctgatggatggcgttatcgacctgacgcggcattaaacgatggtagttataaattgaccgtgacggtaactgatacggcgggtaacaaaacgacatccgctcctttaacggtaacgatagatagtacgttgagtaccccggtaattgcgttggctaatggcgaagacagcggcgtggttggcgatcagcttactaaccacgatcatccggtatttgacttgagtcatattgattctgatgccttgcacgttatggtcagggttactcataacgatagctctcatgaggaagcggcggtatttaacaatggtaaatggagtttcagtccttctgtgagttgggcggatggcttatatcaattagctgttgttgtagaagatcgggcggggaatgtaaaagaatctgcgcaattagatgtccgtattgatactacgaccactatcaacaatatcgtgttgcttaatgacactggcgttctcggtgatcaattaacgaataacgctaaaccatcattcagagttgaggttcctgcggatgttgcccagatgcgcgctactcttgatggcggcacaacctggattccgatacggcgaaatgcggatggacagtggatttttgcaagcacaaataatctgactgatgggcaacatacgcttcgtatcgaggctacagatacagcaggtaacgttgcgagcaaagatttagtctttaatatcgatactcacttacagattccgacaattgctttgggggccggacaggatactggagcgaatacttccgaccatattacgaatatttcacggcccacttttgttattggcaatgttgatgccgatgttattaaggtaatggtaactattggtaccaatacttataacgctactaaagtgggggggacatgggagttcagaccggataatgcgattcctgatggttcttataatgtgagcgttactattgaggataaagcagggaatatagcgacatctcaaccgttatctataatggtagatacgagagccgaaattaatagcgtaacgctattaacagatagcggtgatagctcttcagataatataaccaacgtaaacaagccgcagtttgaaattgtggctgccaatgatactgtacaggtacgcgttaaaatcgataatacgggtaattggattgatttaacgcagagtgttgaaggacactgggaatttaatgtaggaactgcattacctgatggtcaacattcactattagtggaagttgtcgatgttgccggtaacgttgcacaacaaacgcttaattttacggttgataccacgctgcgtgagccaaatattgtgcttgaccctacgcaggatactggcgatgacagtaatgacaatattactaatattaataagccgacatttattattggcaatgtggataatgatgtgtcacatatcgttattcatcttgatggtcgggattatatcatcgaaaataatggtgctaaattaacatttacaccagataagccgctgacagatggtcatcatacgcttactgttacagtgacagatattgcgggtaatacaaaaacatcagctgaactgcaggttgaaatagatacccaggtacaaattgacagggtttcattaacaaccgatagtggtgttaatgatagcgatagaatcactaatgttgctcgtccatcgtttaatattgtaacacctgatgatgtgaccaaagtattggtttctttcgacggtgttaactggagcccggcaagtaagaatgcagccggacagtgggactttacggcgggtagcgctctattagaaggtcattatgtactccatgtgcaggcaacggatcgggcaggaaatacggctaattccagtcttgcatttacggtggatacacatgttgatggccttaacattaccatgctggatgatacagggaatgacgcggcagaccgtataaccaatattacatcgccgcgttttgaaatctcagccagagaatcgctacaggttgtaacggtgacgttaaatgggaacgtcaccactctcaacaaagggatgggtaataagtggatatacactcccgaaataccattacttgatggacattataaactagaggtcactgctgaagatattgctggcaatactattaaccaggagatatcgttcactatagatacgactgtacctgtgcctgatgtcgatttgttggatgccgatgactccggtgaaagcgctgtagataatattaccaatgtcactaaaccacgtttcattattagtgatattcctaccgatattgacactgttacgataaaaattaacggtgtctcttatcctattactctggatggcagtaacaccgggacattccaggttcctgtggcgttaaaagatggtgtctacgaagcggttgtcgtcttcagagatcttgcaggtaatatatccgagacgaaactaccatttaccattgatacggcaacaagtgttagtgttcgaatggatcccacatcagatacgggaagttctaatagtgataatctcactaacagaaaaagtcctaaattcggcggtactgcggaaccggatgcaaaacttgttattaccattatcgatgatacatcaggtcatgaggtgttgaaaaaactggtcacggttggtgttgatggtaactggagtatgacgccagatgccctggcagatggtatctacacaattaaagttgtctcaacagacgttgcaggaaatacggcggaggcgcaagatagatttactatcgatacggtaacgcccgatccaacaattcagcttacggattcatcaattgatgatatgcatgaagctaccagcctgcgacctgagttcaagggtatcgcagaagcattttcaactattatgatccagtgggatggcaaagttatcggctcagccaatgcgaattcgaatggcgaatggagttggactcccccatcaatattaacaccaggttcttatgtcattagtatcgttgccaaagataaagcgggtaatgaatcgtcacaagtcgactttccagtcgtaatacctgttattgatgtaacccctcctacgattaagctaagtgatgatagtgatagcggggcattgggggactttattactaacgataaaacgccgactcttattgggagcacattacccaatactattgtcagcatttatatcgacggtaagaaagttggcgaggcaacatcggataccgcaggtcgatatgccttccagatgcaggaacagcctgacgggacgtacgttgtggaagttggtatattaaatccacgcgtcaatgaagaaattcgctcagcagccgttagcctcgttattgatactcaggtcgctgaccttgaatggcatatatctgggatacatgaagacaaatatattaatactgtaacgccggagattagtggcacaagcgaaccaaacagtaaaattacggtttttgttaatggggttgaaaaggctgctgcttatactactgcaggcgggcattggggcgttatattacctactttagggaatgatggtaattacgtattaacgttcaaagttgaagacattgcaggaaatgttaaagagtttggtcctcaagaaataacgttagatacggtaattgctccgttgacagttacactgcgagaagttgatgattcgggtaaactgggagactggatcaccaataaatcacatgtaaatatagatggtactgcggaggcaggaagtaccttaactattaaaactcagggaggagtcgttgttactacttttgaagtaggaagtgatgggcattggagtgcagagttagatctgagtaacggtaataatatctttgttgttgagtcagtagataaagcgggcaatagtcaacaaaaagaacttttagtagaatatgacactcagatcgaaatcagtgctatttctttaagccgagatagtaatagtggtgataaatatgatctcattaccaacgataaatcgccagagctagtcgcaatgaccgaacctggagcaacagtacaggtttatattaatgatgtattgcaagctacggtagaagctaattctgcaggtaatgttagttataccatgccagcgaatagcgccgatggtaactatcatgtgcaatttgttgctaccgatatagccggcaaccgaactgaatctgctgttgcgacagtgacgatcgattctgaaattgctgtgtttactattgatgaaggttcattaccgactatatcaaatagtcgggcattgtcagtcgctgggcaaggtgaggcaggcgctcaggtaagcatctttgtcgataataagctggtcaatgtggtcatggttgaggctgatggttcctggcgtgctccgatattgctgcaagatgatggtacgtttaagattcatttcagcattactgacattgctggcaacacccaggcgagtaaaaatttcagtgtcgatgtcgattcatcaaccgaatttccaacaataacccttgaagattcgagtaactcaggtttggttgacgatctgattactaatcataatacgccatcctttgttggtactgcggaagcgggtgctacaatccatttttatgttgatgaaaaaattgtggcaaatatcctcgttcaagatgatggaagatggtcatatcaatttgataattctctgaaagatggtgaatactccattcgtgttgttgcggaagataccgctggtaacagggcggaatcacctcgcttaattgttacgatagataccagtacatacattgaacctcctacgctgacagcaggatctgataatggtatgtatattaacgacggcgtaacaagtcaaaccagacctcagtttagtatcaacggtgagtttaaccagagtgtccaaatttacattgatggcaagctagtcgatacggtcactgtgacagacagaaaccaggtttatcaacctgtggctccattgggtgacggttctcatagtatttattatgtcattaccgataaggcaggtaacactgcaacatctaaaacactagatttttcaatagatacatcgaataaaactccagtggtgatagaggccattgatggacatacactagcggagatgaccggcagtgatggtaaaatatatataacagatactactcataatataatttttcgcggaagtgcggagcctgatagtttaatggatttaactatcaatgggctaaacgtaggccaggtttgggttagtcagacaggagagtggcagatgccagtcaactctgtttatctctctcaaggtcttctggagataaaaataaaatctacagaccgtggcggtaatgtaaacgagaaaagttattctatctgggtggatacgatgattgaggactttaccagtgaacttgatgacaataaatcatcgtcgcaaaatgactggtggagtaataatacccttatcactatgagaggtctgggggaggctggcgcgacagtatcactagtgctggcaggtgtcacattggcaacgacagtcgttgcggctaatggccaatgggcattatcgaccgatcagcttccggaaggaaaatacgatatcactttgagtattgaggacaacgctggaaacaggaaggaagagatccgtgaaatattcatcgatcgcgctgcaccggtagcacctgctataacatattcggacattgtcgatgatctcgtcattatgaaagggacgggcgaagcaaaatcaaaattaacgataactgatagcgagggtaatatatatacattaaccgttcctgataacgggaactggagtatggctattccctatccatcagaagggaaatttactatatcgagtacagatcgaattggtaacaccagtgatgttgtctcagtcgatttaataaaagagatacccactatttcgttagcggtagattcgaacagtggatctaaagatgacaatattacgcatgataaacaacctacctttattatcggaaatttagaaagtgatatcgttaacgttcaaatagatattaacgggatggcatataatgctgaaaaaagagcggatggcgtctggttctttacgccagataccgctttagctgatggcacctatacgatatcggtaactgcgaatgacgcggcgggtaatcagaaaaactcgttaccgattactgtcacgatcgacactacgctgaaggtgccggagatcgcgctggcggcaggcgaggacaccggcgcgtcaggcagcgataacgtgacaaatcacacccagccgaagttcactctgcagcatattgacgcggatgtgaccggagtgaccgtcagcgtggcgcataacggaaccaccgacatctatccggtcacgaagggggatgatggctggagcttcagtccgtcagcagcctggagtgatggtagctacacgctgagtgtgacggtggtggacggtgcggggaacacgcagcagtcatcatcgctgacggtgacggttgacagtacgctgaaggtgccggagatcgcgctggcggcaggcgaggacaccggcacgtcagacagcgataatgtgacaaatcacacccagccgaagttcactctgcagcatattgacgcggatgtgaccggagtgaccgtcagcgtggcgcataacggaaccaccgacacctatccggccacgaagggggatgatggctggagcttcagtccgtcagcagcctggagtgatggtagctacacgctgagtgtgacggtggtggacggtgcggggaacacgcagcattcatcatcgctgacggtgacggttgattctactataacagcgacagcgcctgttgaggctggtgatgttagtgagttcgccatggcaaccgatgtagctcaaccggaatctgaaagggtcagcattgaaagtgaaaaaaatcatagcccagctatgttttcaatgatgtctgcggttggagaagtagctgcgcaggaggatgcctataacatcgtattattaaataccgagtctggtgatgtaactgaacgttctattagtcagacaccatcttttgcaatatcagtacctgataatattgtgaatgttagtgttatgttcgaaggagaagagattgatttgccgattaataatcagaaggcaatatttgaggtgccagtacctttgaatgatggtgagtatactatagatgtgaaattcatcgataaagatgctgattatctgattaaggaaaaaacattctcagttgatcattcttcggcagatatagttaattccatgagtgaaagaggcaacaccgaggatgaagttaacgtctcagccccagaaagtgctgtaacacaccataataatggtgctgttgagatattcactattagtgaagtaagtctccctgtagataatcaagaagaacacgcataa

SEQ ID NO: 396578 - DNA, 1557 bp, Salmonella enterica
atgccggtgacctatttatcattcgcaaatctcagaaaagtagccttcaccaactcgcatcatacccctctgccagatgggaatatccttcagccagctcaaatcaatattatttcaggccccaacggaagtggtaaatcaacgattcttgatatcctacgtaccatttcggatcccaccaaattggtttcgctaggcagagagaacatgcgaagtgataccacaggattttttcggttagagtttgacaataataccattcttgttgccctattcacttctcagggtatcggtaaatcgcatgtgggtgtgatggcgaagcattctagcggggaattgatacatgaggacatcatcagctctcattcgtcacagccatttccttctggctatgcgcaatgcatgaaagcgctacagcagaatgtagcttaccgctctggtcatgatattaccggcctctcgctggaaaaagtcgttatgtatctcaataaagatgcacgctatcttccgggcactgctgcatcaggattaaaagagaacgcctttcgctaccaacgtccccccgggcagcaaagcttttcagagtatatcctcgaacactgcttttctgtttcagatagcggcccgaatgcactcagtgtctggctgcacgatgatgagcttcagtctaatatcataaccatcgaggatatacctgcgggctggaaagcattcgccgggcttcttacctggctttctcagcaggccccactcacaatctgtgttatagaagagccagaagtacatattcatccccaccttcagcgtattctggttaaaagaataaaagaaatcacagccgaaaaatgcctccagctatttattagcacgcactcaaccgtttttcttgagtatggaatttggaacaacattccagtcagtctgtacgaggctgatgggtatggagtcaaagacttcacccggtccgcagcttttctttctgctatggggatgcggccaagtgagatttttcaagccaatggagtaatctgggtagagggcgttagcgatcgcatttatatccggcactggctgaaactgtattgtgaggaaaacggccttgatacccctattgaaaacgttcactatgcgttcattccctatggcggcgcaatgttaaaacactactcggcagaaagtgctaacaccattcaagcgctgatgatcaacaagaactgcatttttatcgctgaccgtgataataattatgatatgaccacgcctgcgaatcccattttactaagtgctaaaacggcaaaagaagcaatccggcaaaacctacccacatggattacgcagggttacacaatagaaaactacttacccgaaccaatgcttagtacgtttttcgatgtaacaatggataagaccagcttgaaaaacggtaaaacgaaaatggatgttgcggcctattttgaaaataccgtctctgagtttaagggaagctataactcagacttgaatctatcggagatgattgaattcgttattaatcatatttccgcctggaataggtag

SEQ ID NO: 396579 - DNA, 3015 bp, Salmonella enterica
atgttgaacagacgagtcaggcagattcacccccaagaggataaagaaagccaaactaagacatttagtgattatttggagtctgctaacattgttctgcttggcgatcctggtgctggaaaaactcatcttttcaaacagtttgcggcattttatggggcaaactatctgacggtacggcactttctaaatggtgttccgatagataaccaaaaagcgctatttattgatgcattagatgaaaaaaggagcagtcataacagtagcgatgttatagatgacatagtccaaagacttttttcccaaactccgcaaaaggtcagaatctcctgtcgttctcaggactggttgggcgaatcagacctgtcggcatttttaccctattttgagcggacagggggatatgtcgttttacatttgcagcagttatcaagggaagagcagatagcgattctgcatgctcatggcatagagcatcccgagaagtttctggaggaagcagaaaaacactctgcctatgagtttcttcacaacccacaaaatctgctgatgctggctgaggcggtcaaagaaggaaactggccccggacgaggtctgatcttttccactcagcgacacagcttcttttaactgaacatagtaaagaacacacgcggcaaaattcgggaatttataccagcgacgagttagagcactctgctgggtctatttgtgcgttgcgtatactgagtgatgtttccgggatttctctgcttccgaatgatatccgaccagaatatcctagctatagaaccataccgtttttctcacatgaaataataagagcgacgttatcccgacgcgtttttgccgctggggatgaactcgaaacagttgattacagccataggacaattgccgagtatttggcagcgaaatggttagcgagtattgttgaaaagggattacctttggggcgtttgagaagcctgctggggtttgagggctatccgtcttcagaattaagaggattacacgcatggttggcggtctttttaccacaatacgccaatgtcttcattcaagccgatccttatggtgtactgacttatggcgatgcagcttcgttatccactgtagataaacaaagtttacttgtggcactgtccaaactttcggaaagcgatccttggtttagaaatcacggcttttcttctaatttgaatggcttcgtgagcgaggagatggaagcacatttgcgcctgattatccatgatccaaaatcgcgattttctctgcgtatgcttattctcgaatctctatctgttacaaccccaatattgtcattgaatcaggatttaattgatgttgttagatctgaatgtcattcatatgccgagaaagaagaagcaatagcggcattaatacactcgggactgtcaggtactaaagaagtcgtcgaaatctattctgaactgaaagagataaatcacgacaatgttcgattacgtaaccacattattcaattgctttataaggattatttttctgcatgggatgtagcaaaactcctgattgataccttaagtatcactaaaggacgcttaccggtaggatctctatgggggataatcgatgttgttcctgccgaggatataatgacaatatttgaatacctctatcaataccaaaatgaaaatatagataactggtattcatcaccaagaaatcgccatgaagttctgtattatattgaaagtggcctggtgattattcttaatgcggaagatcaatatactgctgaacagatatggacatgtctgaatgttcattactggtataaagagcattatggtagttttgaaagtaaaacaactcagattgtccagttgctaaaagaacgtgattggcagtatgaaaatattatagatgaagcaatagcatcatttactaggtataatacaggatatctgtttttacatgagtttggacaaagtacatttggtgttattcctcgtgagcttttattatcccgtttcatacactatttatcgagtaatagaggcggtattcttgataagacgagatttatttatcgattagcatttcctactctttggaattgtgatagaccgtcacagcaggtgtttgattttcttattgcttatggtggaatgagtaatgagcttttttgtattttagaagctgcattagtctgtgagattgatgattggcgggtaaaaatcaatatcagcaggatagaaagtgagagagaaaaacaggatattattgattcaaataaagtggattttcagcaagtaagagaacagattgtttcgggtgaacatttaggatggcttaagcatattgcgtatatttattatgcattatataacgatgtagatgaaaaactaacctgctttgagcgtctttcattaagacttggggacaattatgctatagatgccatttctggtcttgtggctctgttaggccgtgcagatctcccgtctatagatgatattaataactccttagtaaaaggtgaatattatgaatggtggtatgctatattggcgggaagtgacgaactatggaaactgaaagatgacataactctttgggataatgaattgctaaaaatgttaataacattggatgcaagattatcaatccatgttaaagaagacaatgttatcactatgtattcactaccatggaaaaaggatgtaatactttatcgagaagaactcttcatagaaacatatagttatataatagacttttgtataaaaaataaatttcaacatattgtggcattgaactatatactacatgagaaatcactacaagattctcacgtcatccctttagttatgtattttgctaaaaaatatcctgatgatattaatcatacacaaagcttagttgaatggctgctagagcgtccatatatacatggagagctgctggaactatcccaacttatggttaatagacgaggtgtgttaaagaaggttaattatcatatttag

SEQ ID NO: 396580 - DNA, 1038 bp, Salmonella enterica
ttgctagagcccgaacaggcttatgatttatttgtatctgaagctaaatcagatcctgagatcatttggattgtgcgtgagttaactggtaataccagaaggcggagagaaaataataaccaagagctttctttaattcaattagaaaccatcattagagtttcagcgacgcatttcgctaatgcttatcatccagcagatggaagtcatggttcaaaaaatagctgggattatgcagaatttatcagagtattgattaacgaaatttctgctatttcttcctacgatgccagtaaagtacttgagcgtttattattgctgcctgaatgtgaaagctatcgggatcatctcttacatgcccaaagcaatcagaaaattcgttatagagagtcacagtttcatcatgccaactggcagcaggctgtaagtacattggtgaatgaaacccctgccaacgtaatggatctttactcattgttgctcgaacatatacgggatatttcaaaccgaatcgcttacgaaaataccgacatttataaacagttctggaatgaagatagttatggtcgtaccctaacgcctaaacctgaagagagttgtcgtaatatttttctggatttactccgtacccggcttaatccattaaaaataagctgtgagccagaaggtcacatggtttctgataaaagagcagatatcattgtttcactaccgggtataaaaatacctattgagataaagcgtgattatcatcgtgatgtctggactgcgcttaacggacagttggacaagctttacactaaaaaccccgatgctgctggctatggtatttatctggttttttggtttggttctgctcggccgaatgccctgcctcgtttgtcgaaaaacatacttcaacctgaaaacgccagcgcaatggaaaatatgcttaatgaaactgtaccgtttgaaaaaagagactgtttatcagcgatagtgattgatgtctcaggtgagatcatacctcctattgaagcgacgaaattatctgtataa

SEQ ID NO: 396581 - DNA, 1605 bp, Salmonella enterica
ttgataacgaaagaacttgtcgatgaaagttatactatacgccaacttgttgatgcaggggactttgatgaatcatatagactttcaattatattcttagataagttagaaagaatcacaactaagagcgataattattttattttactggcaaatattgctggtaatcttgttgatatcgggcaaatgcaaaaaaatagtgaggcatcaaaactcggttttaacttgatgaaaaagaatcagaaagaatttgtcaaggtacagggcgagtgtcatttttattataattatggaaacgcgatgtccaatcttgtcagaataaataatccccatgatcatacgttccagacaatagaggatatggtttctttaaaaaatatttattggcgagctttcatactatcttttgatgagccggaagaatatcgagccgaacttacagtcaatctggcaaattcactaagaagccaatttagacttagcgaatctttgagatattatgatcttactaatcgtaagggattagatataccacaggcttgggtcaatcgttcagcagcacttattgagttaaatcttgtttcctctttattctcaattaaacaactaaaggagataagagagggatatatacgggcatctgtttcaaaaaatatcccaccacaatgggaatcattctatttaggtcgcattgcgcagactaacgataaaatcgcagaatatgcaattgatgatgaaactgacgaacacgatgaagcacttacgcaacaagaattcgaagcgttaagcccataccgacagttttgtcttagaaatcatttgactttatcagaacatggcctgtattgcccatgtgtaggaagtgctacagatgatcttgttatttcttcgggaggcggcgtaacaggcgattttatcattcccatggagatggtattaaatcgccttaaatcggagttttcactcgcacgtcatctttattttgattatcttcatccacagaatacggattacattaagtacgaaagtcattttttggaattgcataatgacgaaattttagggatagaaattgaaaagatcaggacggcatttcgtctttgctttggtattctcgataaaattgcggtggcgatatgtgaactttatagtctttacccaataacaaaaaaagggactcctcagaagaatatttatttccagagtttttggcagttggatgttggtaacagaagacaattatttgaaaaggtaaaatcacccggacttttggcattgtacagtattgctaccgatctgaataaagataagggcggggagttggctttctataaagaatggcgcaatggtttagagcataagtttttagttgtacataaaagtgataaacctgaggatatttacgaatcttatcaactaatcgaagatgttcttttcataaaagaaagtgattttattcgccatttcgaacatttatttcagataacgcgttcagcaattttttcgtttacttttatggtgaggcatgaggggataaaagagaagaaagaaggtatccactatatgacccgagaattacatgcgaaaaaatattcagaagattga

SEQ ID NO: 396582 - DNA, 333 bp, Salmonella enterica
atgacaagactgaataaaatacatctctcacttctggatatacaaaaaactccacttggtgaaagtaaaaaagaaaaaatactttcacttattaattatgtggaacaaataaacaagggtataaaaattctgcacagtaatcttaaatatccatatctgaatgaaaataagattgttcatgcattgtttgaaattcagatacagaccaggttaatgcaaattggcgaggggaagagattcaaagacattgccgtacacctttttaatattcgtgtactggcagagaatgtactatgttgcatggacgctttaaatgtggatccccacatttaa

SEQ ID NO: 396583 - DNA, 618 bp, Salmonella enterica
atggccgctcagacatcatccggtccgggaacgccagtgtatccccgttggtgcttgttccggttttccctcttccgacgcggtactttcgttgatctgcacacggataccgatgccgatatcatggcaggtccgcagccactgcctcccggagggaatcgccagcgaggcgcgtcacctgtccggtcgtattccaccacatctgaggcaggtggtcccgtcgggacgtatcacataatcacccctgcaggccatataccagatattatccagcagtatcggccgtgccgggagcacccaccgtcttcacccgtaccagcggcaggactacaacctccgttgcgcgctcgtacgcctgttcggcggccatcaggggagcggcaaacgcacggcctgtgtctgtcagtgcgactgccagcttcaggctggggacgcggagggttcgtactcatcccacctgctccatactgcagcaggaggtgcgcaggttattaccgtatgccggaaagtcacctcgcggtccggctgcttttccagatctcgggggtaggcacgctcagtaccacactgctccagcccggccaacaggacaagaatattcctttgcagcggcgatag

SEQ ID NO: 396584 - DNA, 507 bp, Salmonella enterica
atggaaaaaaaacgtgaacagcattgcgggaaaaagcacacatctggtgctcctgttcagttacttgcccagagcaatcatgacacctattttctgccggaagggctcgaagcctgggctggtgagcctctttatattctggtggcactgtggtgtatgcaccagggagtatgggttaaccggaatcagatagccgcggccttcagaacaggctgtcgccgggcttccatggttctgggatatatttcgcggcgtacgaacaatattgactgccagtgccgcatggtcacatccggaaaaccgggggtcaaagcctgtgagattctggtgacgggagtaagacttcacgacaaaaaagggaagagcgacatcccgcaaccgcctgtgagaaagagaaagcaggcaaaaggcgtcaggcttaacaaggtgggaaatgccgggaaggaagagcgggaactactgagacagctatgggggcgaagagccggaaattcagggggaggataa

SEQ ID NO: 396585 - DNA, 279 bp, Salmonella enterica
atgaagattatcgtggaggataaaaaagcgtttcagcttgaagagcagaatctatggaggcgtgcggcaaggcggtggctggaagtttcagacggcactggctggtctgatgcggaacgcgaatatctcgccagacggcgggagagatgcctggatatggctgcagcgcggacacgaaaaacggcacgaatggtgtataaaaaatggctttcccgcagggataaaagtgcgactgtaaatcaggcggctgaccgatcctggtattatcatttttattaa

SEQ ID NO: 396586 - DNA, 222 bp, Salmonella enterica
atggcgataacgaaaattatacgttcaatagtatttatcattatggcaggaactgttatgggggctgcggcaaaaactccatcaggctctcatacctggcctccctgttcagagtggcctttctgtcagccagttacgcacggaaatggagacagcaacagccaggataaagccgggccccggtctgttgataaaacagtgggccataaaaggctgaaataa

SEQ ID NO: 396587 - DNA, 546 bp, Salmonella enterica
ttgtggctgcaggtaagtcgctttgtcactgacaaaagaatattaccgctgatacggcagtacctgtggtactgcaccgaaaatggcggtgaattccgtactccggaaaagggcataccaaagagatgttcactcagccccctgatgggagcaagtctgttatatcacattgactgcggtttcagtcaccgcgaaggaatttattatgcgcgctatatggacgactttcttttactcacccgtacacgctggcagttacgccggggtattgcacagcttaacgactcactggatgtcagtggctttgagcagcatcccgacaagacgttcatcggccggattacgcgtgggtttgactggccaggagcctggtctgaaccggggtccgccggactggccccccggtcactgagactccaccgtgagcggtgtctgcggctttatgagcaggcctgtcgtcagggattatcacatcacgaatccatggcgcgggtgcaggactaccgcagacggtggtttatccatgccggaaaactgctcaggtga

SEQ ID NO: 396588 - DNA, 2595 bp, Salmonella enterica
atgaacagacgaacggccacgaaatatgccagcacggtgactatattcctgacagggagtatcgcgacaaccggaagtgccaccgggtccaccgagtacttatacgacaccgaggtggctgttgtacgggacgctgacgaccacacattcataagatcaagcgaaaccccctgggacactacggcgcgactaatattcgaggaccgaagtggacaaggggtgacaaccttactgaatgacaaatacaagcatggcaagactataacagacgtctacggcgccgccgggcgattacatatagcgaatctgtataaaaactcgatggggttcgaggtgaaaatgggggatggcgcaacggcggaagaagtgttgttggacaacggaagcctgatcgtagggacaaatgcatacgtggataaaattgagaacactagttcctccggttactcaagaataacgaacaacggagatatagaggaaatagatacgacgggaaccgatggttacagtgaagtaataaacaacgtaacaggcagaataaaaagtcacataaacgctactacgatcacgaacgccggcacgatgctgggacaggggtcagaagggattaagggaacaacaattctgaatagagggaccggactcattacagggagacaattaacagggagctatatcacaaactacggaacaatagtgacaggaaacccgagcactgaagcggggataaacctcagtgagaataaggaactccaaacaggtcgactggaaaactacggggaaatgttgcttgggggcagcgctgcagggatcattgttgataacttgtacggagacgtttccattgtgaactacggcaaaataacatcgtttgggggtttaggcacaatcggtgcaacaaaaggggaaggagggacgctgacaattgaaaacaatggggaaatcaatgccaaagccggtggatacgcgtatttgtcgatgaacgacggatcagcggtaaaaattgtaaacaacgggtatatacacggggacgtggtaaagggggagagcgaacacgagcatgaaggtggctacatagaggtggtaaattcagaaacaggtgtgtgggaaagcacatttaccgatagtctggtagcaacaagggatggccaactaaaaaacgttgacaacaggggaatactccgcactctgacggcatggggaggagaggctagtacgcttaaaagcgcggtaacagaaaacaacggaaccattgacatatctcgtaacagactagtgatcgacggtgactatatcggtggcgagaacgccagactagagacaagcgcccgattgggtggtgacgacaccgtagtaccgacactcactataaccgggaccgcatcaggtaaaactaccaaagtgaaagtgaataatctcggaggcgagggcggaactacagtagaagggatcaccgtggtagcagcgaagagtaccaccggagaaggtttcacaaaagacggaaggattgttgccggaacgtacgactatgacctggtgaggtacgaaaccccagaaatgaccgaatggagactgatatcgaccgcagtccctgggccgacaccgggaccgacacctgagcctgtgcataaataccgtccggaagccgccgcatacggagaaaacatgcggcaggcaaacaccctgttcctgacaggcagtgaccaacgccaggcggtgggggagtacactgaccccgtgactggccggacagagacaagttccctgtggctgagccagaccggggggcattccacccgccatgatgccagcgggcaactgaagagtgactacaaccgctacgtggtgcaactgggcggcaccgtgttgtccttgtctgccgggaaagacgggcacctggacgccggcttccaggcggggtatgggcatgcaagtggcgacaaccgttcagggatgacaggataccgggcacgcgggacagtatccgggtacagcaccggtatctacggaacctggcgccagcaccgggaggggcagcccggggcgtatgtcagcaccacgctccagtacagctggctgaaaaaccaggtgaaaggtgacgacctggccgccgaaaaatacgacgcccggggcaccacgctgtcactggagggaggctacgacctggccgtctggcagggcggagagcagaacagcgattcgctgtttatccggccccgtgcgcaggtcacccgcatgggcgtgaaggcggatgagcaccgtgaagccaacggcacccgggtcagtcagcagggcgacgggaatatgttcagccgtacaggcgtcagggtatggctggataaggcggtgacgaagacgcagcgggtacagccatttgtcgaggctaactggctgcacaacacccgtgatttctgttcatcaatggacggtgtcagggactgccaggtcggaaaccgtgaccaggcggaagtgctggccggcgtgacgggggacgtgagccggaatgtggcggtgacggcacaggccggcggtcagttcggcagccaggccagccgtgacctggcagggacactgaatgtgtcggtgaaattctga

SEQ ID NO: 396589 - DNA, 966 bp, Salmonella enterica
atggacagtaacaggagccccgggcgtgaaaatgacccggagcatattgatttaattgatttagccatgcagttatggcacggcgtggcgaccatcattgtgtttatcctggccggtattctggcggctgtcgggtatctgatgctggcggaagaacagtggacatccacagcaataatcacccggccggacatcgggcaggtcaccagctattacaatgttatggccacggtatacggtaaggaagcccccggtataacagaagttcagacggcagttgcagaccgtttcattacagcgctttctgcgttatcagattcattgcgggagcagaaagagccggagaaactgagaactgaaccttcggataagggacagccattccctgtgaaagtatcctttgtgggaatctctgccggggaggcacagcgccggctggctgagtatctccgccaggtggaagataaacaggtcagagagatggacacggagctgaaaaacactattgtgctgcataccggttttttagcgagcgcgttacggcagcaggaagtggtggcgcgggagcagaaagaccagcacatcaggcaactggaggcggcactgcgctatgctgaagcggcgggaatagataagccccacacccggcagacacagtatgtgaccccggatacgatgtttctgctgggaaaggatgccttaaaatcgatgacagagaacgaagcaacacgaccgctggttttttcggatgactattatcagatgaagcagaagttgcttgatatcagggccctgaagccgggcatcgttcacccgtaccgctgtatcatgaagccgcggttgccggttcgtcgcgacagtccgaaaacggcagtcacgctggtactggctgtgctgctgggcggaatggccggcgcgggagtggttctggggcggaatgcactgcgccattataaagcggcgtga

SEQ ID NO: 396590 - DNA, 1038 bp, Salmonella enterica
atgaaattacaatttacacactactgccttgttgcgttctcactactgttttcgcctgatattctggcggttaaccttgtgaaccagcatggtaagagtctcgatttttatggcacgattatcgccagacgttttaccagcaataatgaaaaagacaatggtgatcgaagctatctttactttggattaatcgggaaaaaggatctcgccgcgtactggcaggcttatgcccactgggaatatacggtaagtgcatcagatgccagcagaaatgccacccgactggcttttcttggaataaaaaatcctgactggggaagcctggataccggacggaactggggtgtgttgtacgatgtgacctcgttgacagatcgttcacctctcttcagggagatgtcatataactacatcgacaactttatgcgcggccgggcgcttaatcttatgacatggcgtaaggaattttcactttttcaacgccccttgaaggttgcgctgcagtatcagtttaaaggcaacaacggtgaccgtaccttaaaacaacaaaatggtaacggtgccggtacctctctggtctggtattttacgccggaattaagcgggttattttctgcttcatcttctgcaaccacttaccggcagcaaaatgcgggttatcagaaaaacattcgtacctttgctgaaggactgaattacaacagcagaaaatggtatcttgctgccgtactgacccaaagcaacaacgccattcatctgcaggcccgggagaatgatgcctcatccattagttatgaggcgcttgtgaaatacatgctgaccgataaatttcagcctgttgtcagctatacccggctgacacaaacggtcgcaggcaggcgtatccgaattctcgattacgaagagctgggtttcagctaccacttcaataaaagcctgcaggttttcgtcgattataaatttaacaatgcccgggacgggacctcaggaattgattgcgctgacaaactggtgaccgggataagctatcactggtag

SEQ ID NO: 396591 - DNA, 1077 bp, Salmonella enterica
atggctggaaagaaaacgttgtattcactgtttttaccgtatttacttattattccttttgcgtgccatgcaaatgacttactgaatgatactgtacgcaatgtggatgaagacactgcgaaaacggcatccttaaaatttcaccgcattgtcattaccggcaactgtccctttggtgtcatcatggccagtgaccttgcttaccagcatgttgtgggcgtgggtccgtgggcatttttgcattccaacatgaagatcctcagggatatgaaaccagatatcgatcgcatcaccactgattttattaacaaggattatgtggtgaatatggagtccttactcagtttgcaaccggatattatttattattatgggaaaggccagaatgataatctggaacgggcgcgggtccccacaattaacctggacgcaggtggtaatacccggtctgaccctgtacaaacccaggactactgggagaacaaattcagtcagactttgggtttaccgcatagccacaagtttgcagaagcatggaaggctgcgcttgccgaggcacagccgtatgtggagaagattaaagaacagcacattcgcgcactgtatcttgaacaaagtgatggcagacaactcagggtgagcggagccgaaacctatggggatacctatttaaaaatggcagggatggaaaatgttgccggtaacctggcggtgaaaggtgatgccggccggtatattaatgtatcgatggaacaaatcattcagtgggatcctgatattattttcgtcgttttcggtagcgctgaagacattctgaataataaaaacccgggccaggactggcataatgtgaaagcatttaaaaataaaatgattttcaccacgccgacaggtctgcacaactggggaggactgtcggctgagactccactgttgcctttatacatgattaataaattcaggcctgattatatcagcgacgcaaaaatgaaagcgcttacgcggctgcactataaaaaggtgtttaactacgcgatacctgatgcgttacttgatgatgaattcagacagcactaa

SEQ ID NO: 396592 - DNA, 1014 bp, Salmonella enterica
atgcagaatgaaaaaaaatacctcagggtgacgggagtactactggttttactcatcatcatatcgataacgtctctgtttatcggacgctatacgctgccttttagtgaattactgaacgggcttttgcatgatggctgtaactgcagcccggacaccggactctccgttatttccgatctccggttaccaagagtgatcgccgttatgatggtcggggccgggttatcggtggcggggtgtacttatcaggcagtactgcgcaatgcgctggcgagtccggatgttctcggtacttcatcagcagcagcgtttggcgctgccctgggaattttgctcggtctcccgctaccactcagcgcgttttcctctttcatttccggcattgtcagcctgttttgtgtgatgagtctttgtcatctcaaaaaaaattacggggaattaacaaccattctctcaggcattattgtcgcttcggtatttatgtcttttgtatcaataaccaaatacgtggccgatccgcaggaccagctcccggccatcgtgttctggctgatgggaagttttgcttccctggtcaaaggacaggtgtacggtttaattccgctgtttgtgctttgttatctcgttatctacagactgcgatggaaaattaacgtgttatcgcttggcgatgatgaggcgaaaattgccggtatggatccgcaatggctgaaagccgttttgttgattacagcctctgttctggtggctgcgtcagtaactattgccggcgtggtgggctgggtcggtctggttatcccgcatctggtcagaaccctggtcggctgtaatcacggaaagctgatcccggcatccgctttgtgcggcgccctgtttttactgattatcgataatatcgccagaacgatgacatacgcagaaattccgattggtattctgaccgcgctgattggagcacctttatttgctgtgctgtttattatgagtaaccgccatgatcgaagtgaataa

SEQ ID NO: 396593 - DNA, 765 bp, Salmonella enterica
atgatcgaagtgaataatctggcatttgcgtttaaaggacacaaatgtacgtttgaaaacatcagcttttccctggaaaaagggagaatattatgcgttcttggacctaatggcgttgggaaaaccacgctgcttaaaacgataaccggcctgtaccagccggtgagaggctcatgtcgtatcggaagagccgggaacagaaaggctcgtctggcctatgtaccacaggccagaaatattcatttttcgtataacgtactcgattttgtttcattcggatacccgctacgtggtggaatactggcgtcaccgggaggtgaagccatcgggaaatcagcacaaatgctgtcagagcttggcatttcctgtctcggggctaaggacgtcagtcagataagcggcggtgaactgcagatgtgctttattgcgaaggcgctggtttcagaacccgacatcattgtactcgacgagcctgaatccagcctggatttcagtaatcaggcccgcattatccggctgctacataagttatcgcgggataaaaaagtcaccattattctcaatacgcatttcattaaccacgccagcagcattgcggataaatgtctgctgatgagccgaaagaattatttgtttggggatacacgggctgttctgcaggagaagttccttggggaatatttccatgttcctgtgaaacggtgtcactttgagcacaaaggagcacaggcagaatcttttgtcattattaccggagagacatga

SEQ ID NO: 396594 - DNA, 576 bp, Salmonella enterica
atgaaacaaagcatgataaaccgtagcatgaaagcagttaatgcagggacctgtaatattttctgcctggtgggcatatgcggtgcccttataactgcttactattaccagttgtacctgaaggagctgccgtgtccgttatgcctcctacaacgcgccgggctgatgatctgtggtacaggtttcacactcaatattttctgcggaggaaggaggaaacattatgccttaattctggccggcgcaattgtcacgttcatcatcgccgccagacaggtgctgctgaatattcagccgggaagtggcgggttcggctccacgctgatggggctgcacctttatacctggtccctgattgccgcagtgacgttaccggtggtcacatgtggtatcattatggctgaagattataagaaaacggaggcacaccggctggttgcacggtgtgtgggcggccttttcgtgttgcttgtcgcctgtaatgtttttaccaccctgctcgagtgtggagcaggacactgcaccggagataaacagtgttaccgtttactttcgcctcacctgctgtgcgaatga

SEQ ID NO: 396595 - DNA, 153 bp, Salmonella enterica
atggttatttcttttatcctgacacttattgcagcagtaagcgccatgtcccgagaacgggctgctggtttatggctcggcataatgacaatcgtgtcggtaataactgaatttcttattcacgccacatccacccttaatattaccttatga

SEQ ID NO: 396596 - DNA, 840 bp, Salmonella enterica
atgagtatagcaacagaatgtacagaaaaactgcgtttcgcttatcgccttcagcaggaaaaaatacggtccattacctgtataatgaaagaacctgacgtggtctgcagcagactggaggatgccggtaccgggctggaaattctggtggtacaactacaggacgctgccaaccggagcaggctggtcatccggcgtactgaaaaaaaattcctccagaacaggggaaaagagcccggtcatgctcccggtgatcttcatcttatttccactgcccgcagacattcactgctacggtcattctgtgaccttcatgacacagcatcatcggtggcggatacgttgtaccagtttgccacacatctgcggtatgtggaggacctttcaggattatccgcgttcgccatgaaacatttactcctgcgtgaacggatgaacatggtgcttattcacggggacgatacggatgcggagctgctcagcaggctctgttccggaatagtcagcctgtccaatccgtggtacgaaggccggggccggaaaaggtattcacatctaccggtattccgtgcggccggagagcttcatgcccgttattacgcagcagtacaaaggattgctgtcaacgttaaaaacatgacgcccggtgaactggctgcggaacggaccggtctggaacgtacgtgtgagcaactgaccagcgcgatcggtgaactgcggcgttatgtggagagactgatggaagctgattcagacggcaggctgccgagaaagtgcgacgtgttgctggcgcccggaaatgagaacctccggtctgacaaatgtgcaggcagaacatga

SEQ ID NO: 396597 - DNA, 378 bp, Salmonella enterica
atgactgacctgattataccggtcagggacgtgtctgaaccaggaggttgcgaacgacgtctgcggttttatgagcaggcctgtcgccagggattatcacatcacgaatccatggtgcgtgtgtctacggtgcatggcggcggcacgaggatagccagtcaggcgcatacgtcagcaccacagtacagctggctgaaaaaccaggtgaaaggcgacgatctggccgtctggcagggtcgggagcagaacggcgattcgctgtttatccggccgcatgctcaggtcacccggatgggcatgaaggcggatgagcaccgtgatgccttcggtacccaggttcaccagcagggcgacgggaatgtattcagctgggtatga

SEQ ID NO: 396598 - DNA, 144 bp, Salmonella enterica
atgggtaagaaaatcttcacgcaggacagtaaaaaatccggcagatggcgaacatgtctgttctttattaccggtaatcttctgattattgccctgttaatcatggcgctctgggtgatgtccctgttcctggctcacagctaa

SEQ ID NO: 396599 - DNA, 291 bp, Salmonella enterica
gtggtcgatgtaggcgtcgcgcaggctgacttgtctgtagctgccgcgcgcggcctcgttcaccggcgggaaatcgcccgcttccgccagacgctgaacgtcgcgcagaccggtgtcgccgcttatcgggcgggcgccctcgcgcaccagcttcataccgttgtagtccatcgggttatggctggcggtcacctcaataccgccgtccacgccgaggtggaaggtggcgaagtaaatctcttcggtgccggacataccgatatccagcacgtcaacgcccgcgtcctgtaa

SEQ ID NO: 396600 - DNA, 2655 bp, Salmonella enterica
atgacaacctctcccctggggccgaaaccctgctcacactgccagatatccggcccggcgatattgccggtacgttatgccgtggtgcctgccgggctgtcggccagcgttccggcctgggcgaagccggacacgccgttccccaccggcgacggctatgactacctgctgcgcgccctgcgtcagggctttgtgtatgtgtattacgaaagtaaccgtcagtgggaaggctggtcggtagcggaagacggcagcctgtggaaacagccctccgctgcgtatgcacggtcgcagaaaaaatctgactgcaccatgccgtaccacaacccaaccaatctggagatgctcatcctcagtcctgttgccctgaagggcaactgctggattgcattcacatcggccaaatggcggaccggtacgctggagcgctacggctctgatgcgaacgcccgtaagaaacggatgcagtgcgtggaatactggcagtggaccacgcctgctaacgaacagcgtgtcgcccaggcaagcgttgaggtgctcaatgaaatagctgactacatgacgccgggccctgcctgccccgtactgacgctgccgtataacccgccggtacggcgtatcagccgcacggacagcgcatcaccgtggttttattttgatgaaggcgaagtgcgggctcagggcaccctgacgtcgtggagccgccgccgctgtgagcaggcgcagcggacaatagacgcgatgcagaaacagggggccggggttaaccgctacgacaaacccattacccaactggtggtggcgctggatgatgcggcgggtattgctcatgagctggcgggattcagtgatgatatgaccgccctgcacgcgggctggctggacgagctgtcgattgagtttatgagtgtgcagtcactggctggtgcccgcaaccaaatccagcagatggaaaaagcgctggcagaaaagcacacactggatgccttcagcagtactgcaaattacggcatggataaggtttctggtggtgtcatcgcgatggtgccgggcgctgacacgcagcgtcagtcggcactgaatgatctgttgcaacgggcgcagttgtcatcagaacaggcgggtgatgaggcgttggcgaccagttgggcgaagtacgatgcggagctgaatcacgacaagataaatgccttcaacgcctgttatgaacagttttgtaaggtgatagccacccggatggaagccctgcacggtttgcgtatcgactggcttaagtctgcgccgtttattacctgtagccaggatttttactccacgagtgtggaggacaacctgagctatcgagaaattgtggattatgcgctggcctcgctgaacctgaccgataccggcgcacagtggctggacagtctgataaatcagtattccgcgaaatccgaaagtaacctggtctggcgctcgctgctgctcaataaccccgatgtgatagccgatatgaccgcctatctggaaagcctggcgaagagccacggcaaaactgagaaagcggacgaagtatccttcctggcggcggtggccccgctggcgggcaaactgaatgaagcttacgacaaggctaatgagctggcagagcgacctgcccccccgtcctcatcattctcgcgaatgatgctgtactgcgaccgtcgcctgagcacatttggcgatcgcttctttaatttcacccgtctggggaaaagtctggacgggcttaacgagctgttgacgaaatcattgttccaggtggtatccggtgtgtcatttgataatgcggtgcaactgtctctcgggcagttacaggacggtgatacgttcagaagtcagctcctggaggatatgaagtattcgggcgcggctgaacggcggaaactcagaacccgctatcaaagtgattttgacaaatttgcccagagtgctgaaggcgaaagcgccctgaaaggggcacgaatcaaattgctggcgctgttcttcaacgggctggaattcaaaaatcagctgcaggagagcaaaggggattcgaaaagccatgcgcagatagcgtctgcgttccttgggactcttagcacaaccacagagattattgaaccggcggttaaacacggtatccagaatggggccggaaccacaagcgtgaagtttgtggggaccggtgcagggacgaccgctgcggtgatcaatctggttctggatgctgaagatttatatgcagagggctttgctgagcatactcgatggtcttatgtcggattgtactttatgaagagtgccaatgatgtggggctattagttaaatccagcgaaggtcttatgaaacttctggccgatagtgggattgtgaggaaagaaattgcggatgtggctgcaaagtgggctgcggctgaagcaatttcttggttggcgagttgggaggtgatgatagctctgttcctgatcgaacaactcatcacttactactttggtaacgatttacagaaatggtgtcgggagggcgtattcggactggagcctgatgacaaactgaagagtacctggcaactgggccccaaaaagcctcgtgacaaggagtatgacaaccagcaggaagaatatcaaaaagcactgggggctgtgttatga

SEQ ID NO: 396601 - DNA, 1068 bp, Salmonella enterica
atggcatggaaaatccccgcgccggatgcggttcactggcctgccgcgccgtcgtggtcaggctggtggcggtcgctgatgttaagttgttcagccgtagtgatgaccggatgcggtatttatttctggctgcatgactcgcgggcgctggtttacgcctttgccggtgtggtggtgctgatactgctgtttgccgggattgcgggctggtggatgtaccgttacggcgtactcctggagcacgctgatggcaccacgcagtacaacgccatgctggaagcgcagtggcagaggtgggcacaggaaggcatggtggtgtcaggcgtcagtactcttttccctgaacaggtgcggacaccgcaggacagtggtgagccggtaagtacgttggctccgctacgtctgcctgaatgtccggggtccacgtatttgtttaccgaattgctggctccgctgcgcgtggcgttacagattttcatccgcaatcagtcgctgacggtctgcctgccggaaagcgcgtctgaggacgactggcaatgtttccggtcggtgtgggcggcgctgtcactgccactgtcggcgatccagctttcggaaatgaagcctgagcctttcagccgccagatgacactctggcaacagaaagatgcggtgcgtacgggctggctcattatccgtcataactggacgcctggcagtgaaggcactcagggggcggtggcctggttgttatctcatccggatatccgtaccgggctgcggccctgtgccacgctgcaccgtgtgttccccaccgataataccttacctgacggtgatctccggcagtttctgcaatatcagtgtgtcagcaatacgatgaaaggcgtgtggtctgatgcggtcactcagccacatatcagtcgtctgatggtcgccctgagccagcagcataaggctgtagccgagcagggggaagcgacggtcattccagcgtccctgatgtgccgtcagataacggtggcggagacggactgtaatgaacgatttaacgctgagcggcttcggcaacgaatgcgctatctgtga

SEQ ID NO: 396602 - DNA, 291 bp, Salmonella enterica
atgaaaatagaacttaatatgacagagcagtttatcagtgaagcagcgggttcgtataaccgttatatgaataaacgactacgaaaccagcctgtgcatttctaccacttgctgaaaaataaggaggatatgaacgaagtgattgaaaatattatcaaggaaacaaagagcagtttttatggggctgaaggtgaacaaaaagtggaacggatctccgggagttttaactatgtgaaagtaaaacagcatcttcgtcagctttggattgtctataagtgtgtataccgctga

SEQ ID NO: 396603 - DNA, 237 bp, Salmonella enterica
gtgattgatgaatttcatgtgatgtatatgtataaaaaaatccaagcggaagccgcaactactgacatcaaaacacttgaacagcttttgaaaaagttcaggagcgtggttagtgaacgtcgtgaagaatactatctggaaattggtgagaaaaagactcagaaattgagggccaagagattacaacagttgcttgagaaaatgggacgtgatcgtatttcaccggatgaactataa

SEQ ID NO: 396604 - DNA, 225 bp, Salmonella enterica
atgagaaaagtacaattagacaacagtgatttattagcatattttaatacggttgaagaactcatccatcaatggatggaatatagaactggacaccgtaagctacgtgataatgatgcttttgcatatgaaataaatatagatctgcacataccacactgcgcagattggataagaaaagacaatctcttttggatagctttattagtgagcttaatcctataa

SEQ ID NO: 396605 - DNA, 1266 bp, Salmonella enterica
atgagatattccatcttgcataggttttttatagacttccagatcctgtcctgttatatacctttcatgacctacaaaaaagtgatgtgtatgaacattttcccgcagcaaaatcaaagctatcaattctattacgatgaatctaataacgttcgtaaactatatctatcaaaacaaattgatggttataacattgaccatgatcctgacaagcataacagcgtaaacttcgtgttagccggtgttgctcatactggttcctcatcgagtgccgactttgacgatttacgccagcgcatacagcttcaggcgaacgccaaagagttcaaactgaaacacttagctaagggcgacttcctgactatactcacatctaagaagctcacagcgttctttgagtggcttctctatagtgatctatacctacactacttccatctcaacatggagtattggggattcattgacatcattgatgactgtatcctcttcgggtgtgaaaagggcttcatccgggaaaccagtaatgaacagttctatggctacatgatggcaaacaaggacgctctatacacctacgttaaggcaaacaagattccttttatccagttcctcaagtcccatgacttcccatacattgaggggcgggagaaggatttcatacaggggctatcaagccagatctctaatcattgcatagacctctatacagcaaccaataaagatgcgctccagctccggttagctcatggcctcctgcagctcctgatgacctgctctgatgagaacatagatgatatgacactcactatggatattagagatgaaccgcctacagatgacgataaccgccttgttgatggctttgctatcttctaccagaaccgggcgcagatgttcgaggcttccaaccatatctttgacatagagaaggtagtcgaagcagatcttgaagaagcagcaaaagccaatcctaatctaacgcttaattactctttcgctgattccaagcaaaacccgctggttcaggtcagtgatgttgtagctggctttatgcagcactatttcgattacctcaatagcaataactatgaacagattaaaaatgatagaactagccttaacgacaagcaaagattgaacatggagtttttaaggctcctgattaataaatcacatgataacaatccaacattattacattatgttatgtcggctttagaacatgaaaaacacagagcatttacttatccgaatgaagcttaa

SEQ ID NO: 396606 - DNA, 1113 bp, Salmonella enterica
atgaaatcaggattactgtgcgtgattttatattttttgctgtcaggtgccgtttttgcagaaaccaaggtgacgtcagagtttgttatcacaaacagaaaactagaaagttataaattttcaagtacggacccaactgccacttttactgacgccggtaacggattatttcagatgcatgataactttactgatgcgaatatcaatataatgttatacgggaaccagcagatgggattcgtaagagataacagcctgtttaaaatcagaatgacgggacagcggctgggacacagttttatggtatcaggtaaatatgccaattccagtttccggataaacagggctaatacaggtagttacttttcagaatacaagaattcaggctgttctgttatgtcatctgacatggacaacgatatttttactatcaactccagcagtaatgtggatgctgactgcaaaggcagaaccaacgatgttggttatccatacccgcaggacggtgttcttactgccagtggaatatcgcgtgatgtttacctggatatggggcgtttacagaatgacaaagcttaccgggatgcgccgcctgatgtctatactggtcaggggaccttttcaggtgagttgattaaaaacagggtaggtaatggattacggatactttataccaaccaaataaccattactaaaaacccttattttgaaggggtcaccttaccggcaggggataatgtgtttgatgtcagaaccacaggaagtgagattcgtggaaacctggttataccttatgttataaacgggtattttacgccctataataaaatcaccctgaacgtgacctcactgaacggatttaagctgaaagataccagttcgccggataaaagagaaataccttattccctcagtacaaatacaggcagtcagagggtgtatccggtggctataaatggcgtgagccaggggaccgtcattatcagtaacctgcctggtgaaagttatgcccttcagggaagatttaatgcggattttttagttgataaatcttcggctcagaccggggactacagtgacatgctgacggctgtttttcagatttcattatag

SEQ ID NO: 396607 - DNA, 327 bp, Salmonella enterica
atgtcattactgatgcacagggcgaccacgagctgtggcgtgacttcttcacagcaaaaactactgtgggcgctctacaaaggtcattattcgctgtcagggcttacaaatatactgaacaaaaacgagaaacaaatctggcaggacaaaaacagactgctggtaaagctgggcatgaaaaaccgactatatgaacttctctacggtacgcgtttctgcccggatatgcagcggacggcgtttatttctccggctgacggcaaaaagctttgtggcgcagaggagtctgcagaatatgaaaacacgagggcttcattgagggattga

SEQ ID NO: 396608 - DNA, 1206 bp, Salmonella enterica
atggcattgtctgatacatggttacgttcagtggtggggaaggctcgtgagaagattcttgttaaatccgatcgtgatggtctttccgtcagggtatcaccgaaaggaaaggttgtgttccagtaccgttatcggtgggctgataaaggagagcgtattgatataggctcgtatcctgcaaccagcctgaaatatgcaagggatgaagtcatcagacttcgaggcaagctggaggctaacagaaatcctaaactggtgaggaaggaagaaaagcgacgcgctctagatgccgtaactattgaatcagtaatcaggcgttggcatagcgcctattgtgtgaaaaataaaaaaggggcagaccaaatccttcgctcgtttgaattacacctttttccaaaaattggcaatatgcctcatgatatagccaaattgcatgactggttagaggttctggaacctcttagtgaacggttggcagggatagcagatagattgctgattaattcaaagcaggctcatacttgggcatacaaaagaaaattgatagaaaaccgtccattatctgatattacaggcaaggatatggatataaaaaagggccagggtgaaagatttctcaatcacgaagaaataaaaattttgtataccgcaatagaaggttcgaggatggttcccaaatatcgtgcctttatcaaattgttactgcattttggctgtcgttgcgcagaattgattgaggcaagggttgaggattttaacttggttgataaggtttggactttaccgccggatcgccataaaacaggtaagacaacaggtaaggctctaaaaaggccaataatcaagcccgttgaggacttgcttatgtatgtaatttctttgaataacggttcagagatggtgtttactaaagaaggtagccgtgcacctgttggtcgctcttctttgcaatgcttgccgtataacctgatgcagtattcatggcggcgccttgggtatcagttcccgtactggtccttgcacgatttgagaagaacagcaagaacgaacttttctgatctaacggagcctcacgttgctgaaataatgctcggtcataaactacctggagtttggcaagtttatgacaagagcgattatcttgaggagcagcgtaaggcttatcaagcatggtggaatcgagtcgagtccatcatcactaaatag

SEQ ID NO: 396609 - DNA, 330 bp, Salmonella enterica
atgttttcaagagataattattgcgattcgctattaggcctggcattacagatagtgacgctttatcgcatctccaacactgatgtacaagatagaaatactgagttcactctcggtgccatagtacttgaaaaaaataaccaactatctgatttagttcaccagataaaaaataaaatttccgccagtactcaatccacgcctaccctctcatcggatctggtcattagcgacatacttactatcagcactcggatcagtacaatatgtcaagcgcgtgaagtgataatccccgaattgcctgctgatattggcatctcttccgcttaa

SEQ ID NO: 396610 - DNA, 414 bp, Salmonella enterica
atgggtgaaaaattatcaccatcaatggggagacggatgcgtaagcgcagaagggaattagggttaactcaaaaggcgcttgcagatatcgttggagtctctatggctgcagtatccttatgggaaaaggagggagcagaacctagcgcaagaaatctagacgcaatagcaaatgcgttaaactgtgattctaactggcttctgaaggggccacgggataatgaaaactcaaatcccactgtggtaagcataaatggtaaaacacaggtacggagtgatgataccactgttcaacagattaataatctactagaagtcttgccagaatcctgtcgtaaagagattcttgaatacacaaaaaaaaagctgaacgaacacatagaaaagctaactcagattcgttttgatttgtaa

SEQ ID NO: 396611 - DNA, 300 bp, Salmonella enterica
atgccggaagcaaagcgtaagactccgacgttacctgatgatgagatagcccggaagatggaatccggaaagctgtggcgcagagcgatctgccgctggtgttatgttctcaccgaaacagaagatgttaatgttgcagaacagattgttcagcatatagcttggtgccgacagcaggtaccacaaaagcgccctggtgaactaatactttcagcgaatgaccagcgtcatatctacagggccgcccgaaaactgggatgtggtcccattgcccgccactggatagagtcgtcaggatga

SEQ ID NO: 396612 - DNA, 165 bp, Salmonella enterica
atgcttagctggtttagcattgacagagggacgctactatcattcattattattttctttcaaattatagccatcaggactaatttgctccgccccggttggattcaacaaaaagtgtgtatcaggtcactatttgatgtttttcagacactattttatttataa

SEQ ID NO: 396613 - DNA, 435 bp, Salmonella enterica
  misc_feature (411)..(420): n is a, c, g, or t
atgttagcggtctttatgaccgttgctgctttgattgtttatatttgtgtggcgaaaattgatattgtctctcctggtactggcgtgataaccggtgcttcagataaactagtaatagtcagtcctgattcaggatttattaataaatttgatttaagaactggctcaaaggttaatatcggagatatacttttttcgtatacgaaccttgatgtctttcaccaggaaaaaacacttaatgagttagtattatttgcagacagacggatcgttagcctggaagaggatcagcgattgcttaaaatactcctggctggagaaatatccgaggaaagtgagtttagcacggaaaataaagatttcttcagtcaggaacttagtgcttataagcttttgaatgagtatttttcnnnnnnnnnnggagaagatgattga

SEQ ID NO: 396614 - DNA, 1065 bp, Salmonella enterica
atgacagaacaattattcagtatgaaaacacgggtgttgtcaggtgtgtttctgttttttgctgcctgtggcgctgcgcaggcaaatatcgactggtcttattgtaatgctaatgggaacattaacatcccaaatattaacattaaaggagggcgctatgaagaaggtcaggaactggagaaaatcagcattcccttcagttatacctgtgttactaaatataagacttactcaacaccttacaatgccactatcagtataaaaaacgtaaaacagatggtggatgccctgaaaaagagcggtcttggtatggagctgtttattcaggaaggtagtcgggttccagttaattatacatgggcggagatacaaaaaggttttactggttgggctagttcgaaggtatttggtcagaaactggatgaggagaaaacatacaatctgaacgggacacttactttacgcatttttgtcgaacaaaaatttaataatacttttgtgaatttcagcattccgggaagtacatttgatattcttccctataatccatcatcaatttttggaccaactgttccgtatacaccactgacgatttctgcctttaacatcagatttatccctgacaactcaggcagggttattatctcgccttctgtactcagaatggggcgtttttatacggaatatcaggaaaccatggtgcccagggaagtacctttcaccgttacagcacagcagaatgtcggaacgcatgccccgttcgttgccccactggctatagagttcaggaccaacggtctgacactcgccgatgctgacagcgccgtgattcttaaaaatacaaaaggggaaggcaacggtttcagattgtcggtaatggatgtggataataacacaccagttaaatttaatgtggaagcagatatgggaagtatcagtcttgataacggttccggtggcaaaattataaagcagtacaaagcaaaagttgaaaccataccaggagcggaaattaaaacaggtgatttttcggcagcaatgacagttattgttacttacatttaa

SEQ ID NO: 396615 - DNA, 804 bp, Salmonella enterica
atgacgccacttggtcctaatattgctgatagaggttctgcattttataatttttctgtaagtaagtttaattcagttgatgggaaacgacattataaactttgggttggtgtacctgacaaaaaaactcctgtttctggttttcctgttatttatatgttggatggcaatgctgttatggatagattatcggatgattttttgaaaattctgtccagaaaaaatcctcctgttattgttgttattggatatcagactacactaccttttgaatcagaatcgcgagcttatgactatactcctgttgatgaagaatcgaacagttttgaacgttatggtcgaaaaggaggtgggaatgatattttccgtcaactgattaaaaataaaattataccgattgcagaacaaaatattaaaatcaatgacaaaaaacgcggtatatgggggcattcttatggtggcttgcttgtattagattcttatttgtctttcgatttgtttactttttattattcagcaagtccatcactgtcaataaataattatgaattagtcatgaaaatagaaaaagaaaataagagtctatttatgcataaaaagttatacatcatggagggtgatggtgataataaaagagagcgcattaataaatctgatgtgttgaataaaacaaccaatatggtttcaatgcttcgtgaatataatgtccctgcaaagtatattttttatccggggcttactcatgggcagatgtttacaccatcttttaaatcagcgttgttagatattgctgaggaaaaataa

SEQ ID NO: 396616 - DNA, 303 bp, Salmonella enterica
atgattcaaagggaaacatcaggaaagggaagtgataataatgctttcgtgcaaggtgttaaaaagaaacgaattactaccgaagagttgagagtactttatcaagataatgtaaaaagacataagatgatccatacacgatctgagtttacgatatctagtttaatggttgttaaagaaattatgactaatcttttgaaaaatgaagcgtttattgatgtattgtcttctgaggggttaaattcagttcctgtttttattctggataatgtgaaacccaatcgaggaatggaaaatgagtaa

SEQ ID NO: 396617 - DNA, 228 bp, Salmonella enterica
atgtttcgtatagttttctggatactgctctatctctgcgcaacgattgcgagcattgctcaactgttctttacgtttctgatccagttgatgactcatcccttttgcgaaaatgttagagttgatatagagatgaccatgatgctcgacgagtattcctttctgtctgagttttttaaaaatgttagacatattaccggaagcgatattcagtgctttgcacagtga

SEQ ID NO: 396618 - DNA, 300 bp, Salmonella enterica
atgatggttattccgctctctgaactcagaaaaaagctcgatcgccacggttatattccccagtcccgtgaagataacgacgaactgatccagcttctggatatccggggccccactccggcagggtcctgcaccacgacagcatccttcactggctcagcgaatccgatctctggaacgaacgttttccctctcgccctctgtcccgcgccgatcaatatccactccgtcttgccctggaaatccacagcaccctggcccttgcagagtcccgcactgtcacggccctggcgactgtaa

SEQ ID NO: 396619 - DNA, 129 bp, Salmonella enterica
atgttgaggacgcaatttatgcttgggcgaaagaatttgcatctgctggagttcgaaaaggtaagcaaatcagtaagggacgaattagcgcgaatgatgggcatggttattatgatggcgatggtttaa

SEQ ID NO: 396620 - DNA, 363 bp, Salmonella enterica
atgcgaccgggtaatctgcacggcttcatcttcaagagcgacgtcatttgggctggtcgacagaatgtagaagtgagcgattctattcttgaaattcttagtttctctaactgcggtatgtatatcctttggtttaagtctactaccataaccttgatccctacctttgcactgaactgcgattacatctccatttggaagaatgccaagcgcatcaacgccgttctgccgctgcccgctacggccatagacctggaacttgcaaccatatatttcactcatcaaagtgatgcagagtctctcgaaattttgccaatcagcaggaatgggatagcttgcgtagtttggggccgtcattcgtaa

SEQ ID NO: 396621 - DNA, 141 bp, Salmonella enterica
atgggcacaccacgttttacccctgaatttaaggaagaggctgtccgccagatcaccgagcggggctattctattgctgaagtatctgaacggctcggcgtgtcggcgcacagcctatataaatggctccgtgctgtttag

SEQ ID NO: 396622 - DNA, 606 bp, Salmonella enterica
atgaatgaattgattgaattaattaatacttcacccgaagaggttatagtacagaaatttttcgaaaaacatccggcttcaatcataggtactgcatatgcattatcgaatgcattgatagccaagcttccattaggtgttgattttgttacagatttcacatgggtaaaccctcgttctggacctacatatgtatatcttattgagatcgaaaagccttccaaattgatatttaataaagacgggtcatttactcaggattttaatcacgcatacggacaagttgaggattggctgggatggtgcgcgagaaatcaagatgcgtttcgagatacattggttcctcttaaatcttataatgacttgccaccgtttttcgctgtaagaggaattttgatctacggtagagattctgaattaactactaatagaagagaggaacgttgggttcaaaaaggattatcgaatccatttattgaagtacgaacgtatgatggatgggctcgtgaaaataacaataccattccacctcatgatatattatccgactacctatccacggtacactactctaatcgctcatatatacgaaagaactttccatag

SEQ ID NO: 396623 - DNA, 495 bp, Salmonella enterica
atgccatcctcatctgtttatagaaatcgttttggtgggttgcttcaagcgtatcaattaattaactacaagccaaaacacgattatgactatttgaggatcaattcatcattaagagaaaagtatcatgtttttattgaacagttcattcttgatatttctgaactggggtgttatgtcgattatgatgatgaaactaaattattcactattaatgatgagtttaaaatttctgtcgtaatttcacgttgttttgcgaataacagtaagaaacgttggaagatacgctttgagcgtaagtttagttacgatgcttgcattgtgattagacttaatagccaaaatgtaaacataaaggattactatatatttccttcaatagaaatattagaacgacacttgctttttgaaaatgtaaatccttatcaaatcgatttttataggtttgactctttgaatccttttcttcagatacttagacgtgaatttatttaa

SEQ ID NO: 396624 - DNA, 438 bp, Salmonella enterica
gtggcgcgtcagcttaaaagtccacttgaggtgattattgatcaaaaaattgataaatataagaaaaatgatgaggttactggcatcatcgccaacaatatgttggctaatgctggtataggtaagctggttacgtcagtaactatgcatgattccaaacattatttgggtttacaggtggtagatatcttaacaggggctgttaactccggttatcttaaatttctcaatcctcagttgcagttatcggtagcaaaggaaatagcattcaaacgaatggccgccatgcttgggtgggacgcttttcactatgacacctaccctaacaaagattttaacatctggcattttcctcctgagatgcgaggtgttccgggatcgatgcgtatcagaccaaattacggcgtgccgttagttatgagggatgagctggcttaa

SEQ ID NO: 396625 - DNA, 267 bp, Salmonella enterica
ttgcttgctgctgaattaaaaccgctgctagatgatattgatggttttatctctatagaacgcttccaaagcctgacgacatcaggaaagatactgtcgttgtcttggtggcgagacgaagaggcagtgttgctatggaagcatgacgctttgcatcagtcagctcaggcagaaggacgtaaatctatcttttctttttatcatattcgcattgctcatgtgctaagagactattcatcaaaaacccaaggaaattcagatgtatga

SEQ ID NO: 396626 - DNA, 132 bp, Salmonella enterica
atgggggtaccgccgactgttgccattgctataagtatcgttgctggaggtggttttggttttctaatggcggtttatcacgggtggagaaagaaagtcaataaactgcctgactggaacagtctggaataa

SEQ ID NO: 396627 - DNA, 231 bp, Salmonella enterica
atgacctttgatgaaaaagatctgaattacgccctgagcaaaatcgtcatgacctcgttgttcaacagtcttaccgatcagcagcagcaaaatttttacaagtctgctttcgacatgattgatcggtgctgttattgtgatgctgatggcatgcctgacaaagttcgcatgcaactttcagaggctcttcgagagcgacttggcgagcaacttgccgaaattgcttgttag

SEQ ID NO: 396628 - DNA, 246 bp, Salmonella enterica
gtgataattgcagccatgtcatgggccgtctgtaacattatcgtgaagttaactaggcctgccaatatgattgcgtttattgtatggtcaagcttgttctctgcgcctgctgtgttaataatgacagtttatgtcaagggatgggggggtattgtcaataccggacgatatcacggtgggttcttctttctctgttctgtttcaggcatatataaccacagttgttggttatatgatctggaataa

SEQ ID NO: 396629 - DNA, 1227 bp, Salmonella enterica
atgctggatcaaacattctcgccaagaaatctgttgaggcttttgtataaagaagatcctaaaaaattcctcagaaatattgatagggaagattatgaaagtgaaatgataaggttatcacaaatcataaatgacgataaatttaattttggcaggttttcctttgcaaagataaataataaaaaggttataatacctaatgaattcaaagatgtactggccctaagaaaagcaaatgataatctcaagagaatctatggtgtcagacaatcagataggaatgatattgtaaggcatgtgatttgcatgctcgaagagccggtcccattttttgtatataagttagacattaaagatttttatgaaagtattaataaaaataaagttttggacaaaataacaagatcctcaattgtttcttataaaacgaaaaggttaataaagcgtttttttgaactatctcatctgtctactgaatcaggtcttccaagaggaatcggtttaagcgccaccatggctgagctttaccttgaagattttgatgataaggttaaacgtactaaaagtgttttctactatgcacgctatgtagatgatattatcatttttacgtgtgaaaaaataaatgactttcaaaatttctttaaggggttcttgccggataacctagacttcaatatttcaaaatgcagagaaatagatatccataataatgaaaaaggaatggtggccaatgagtttaattatttagggtattgtttttgtgttagaagcgggaaaataaaagcttctgctaagcgagatgttaaagttacaatttcaaaaaagaaaatacttaaattaaaaagaaaaattgtactttctttaaaggattattgcaatacgaataatttcgctcttttggaaaaaagaataaagtttcttacttctaatgttatacttgaaaaggctaaaaaagtttctgatgaagaaagttcgccactatatagtggtgtgtattataactacttacatatcagatcctatgatcaacttaaatttttagatttatttaaaaataaaatgttattttcatgccgtggtagcttaggcagtcaattaataatcaagggagatagggaattattaagatcattaagaaagtactcttttttgagtggttttaataatagaagaaaagtaagttttacttttaaagagataaatgacataaggagatgttggtaa

SEQ ID NO: 396630 - DNA, 2001 bp, Salmonella enterica
atgaaaataaaaataaaaaaaggtgattataacagggttctactaaccgacgtattaccttatgaagttcctatccttttttctaatgaagatttttatcatattataagcagggatgatttgccatgcgaattcaaagagttattctcatttgaaaattttaaaactactgttccgtacacatacaaaataaaaaaaggccaagcgagtttccgtagtttggcaattatacatccagcgcatcaactcaaaatatgtcatttttataagcagtatgaacaccttataattcatttatgttccataagtgatatttctctaagatatcctaataagatcgggacctactattatgaaaaagacttcttaaaggatagggttagattaaaagatgggggggttgatttagtggttgacggcttcgatttgcaaagtcagactgcttcatcatatttctcttataagaaatatccttttctttataaattctatgaatcttttgaatttcaccgccttgaaaggaagtacgaatatatggtgaagtttgatatatccaaatgtttttcacatatttacactcatagtttagcttgggctgttaaaaataaaaaatatgcaaaagagaatacggacagtactcattttgagggagctcttgataaacttttcagagattttaatcatggggagacgaatggaatattaatcggccctgaagtttcaagaatctatgcggaaatcattttgcaaagaatagatttaaatatcattgagaaattgagtaggttgtttaatcttaatttcaatgacgattatgtaattaaaagatatgttgatgactatttcatctttgtttccgatgagatgcatctctcaaagattgaaatggtgctatcttctgaactcgaacattataagctttatttgaatgaatcgaaaaaggaaacgactgcaagaccatttattacagggttaacgatagcaaaatatgaattgaagcaagttattgacgacgtatatagtgatattgtagatgtcgaatcaatgtatgaaattaatagtttgatctctagaaaaaatatgggagatgacttagggaaaatagatagtgtttttttgttagataaaagaaagaaaaaattcggccgtgctggagaaattataaagtctataaaggttgttattaaaagaaatgagataacttttgatcaagtttcgagttatctattaatggcattgaagaaaaaattattttcattgttgaagatattatctatctattcatatgatgaaaaacgatatctaaaactaatgaggttcgtatctgtacaattagaagtgattttctttgtgtactcgatggataatagagttaggccgacatatgtagcatgtcaaataatattggaagtgaatgcatttgctgagcgattcgatgatgatattaaagaggtattaaagaaaaatcttttggatgaagttgtattgtctttgaagaatgttattagttattcaggtggtggatatgttgagttttctaatattcttatcgccttaaaggagttgggcggtgaatattatttcgatcaaagttatttgattgatttcattgattctaaaatgaatgactccgaggggttaagttattttgtaatttgcagtattttgtactatatccatgggcggaatgattgtgcagcgcttattgaaagggttgagaatataatacttgataaatttaaagataatgcaagcaataaaaatgattgcgaaatgacattgttgatatccgatgtgttatcttgtcctgttcttgatgataaatataaaatcaaagcctatagagctttttatccttcagggaaaaaagcgaaaccaacggatgaaatacagcgtactatcaatttcttcagaggtaaggtggtgttttttaactggctaggaaataaaaacctcgagcaaattctttacagaaaagagttgcgaaccccctatgaatag

SEQ ID NO: 396631 - DNA, 261 bp, Salmonella enterica
atgaacagtatttccgtttccaccccggcaccagctgctccggtgctcccggctccggctcagcaggaacgcttcatacgattacctgaagtgatgcacctttgcgggctatcccgttcaaccatctacgaccttatcagccgcgatgccttcccacagcagatatccctgggtggaaaaaatgtggcctgggtacagtcggaggtcagtgcatggatggcggcgcgaattgctgcccgcgagcaaggaggccatgcgtga

SEQ ID NO: 396632 - DNA, 345 bp, Salmonella enterica
atgacatcacctcacgtaaaaatcaagaccggcggcgacccgcgcacgttagcggattatgtcaccctgcgcgaagaactgagtaaactgacgcatccggcgcgtccggatgtgaactggcgatatgtcgaaaaactctgcctctcactgtttgagcagaacggcgtagagctgcaaatggcggcctggtatacgctgacccgtacgcaactggcctgtctgttcggcctcaatgaggggctggcgatactcgaggatctgataagccatcagtgggggaagttgtggtcgcagccagtacatgcccgcatggaaatcctcagcactctgagtcagcgcctgtag

SEQ ID NO: 396633 - DNA, 345 bp, Salmonella enterica
atggcccagcttacaaagcaggggcatgtgtatgtgatttcgaatatcggctccttcggcgaaaacgtctttaaaatcggtattacccgacggctggagcctatggagcgcgtgaaagaactgagcggggccgccgtgccgtttgattttgacgtccacgccatgatttcctgcgatgacgcgcctgcgcttgaaaagacactgcatgaccatctggaacgttaccggattaaccgaattaacctgcgtaaggagtttttccgggtcgagctcagcagaattattgatgaggtggagcgtcaccacgggcaggttgaatatattgctgacccggtggcgctatag

SEQ ID NO: 396634 - DNA, 477 bp, Salmonella enterica
atgttgacacttcacccgcgcttagcgcatcataacaatgcacctgcacaatcaggtgtaccggattggcgtctggtaacagtcaaaggcgataatgcacgcgccaaagcgtgttttttattgtcaaaatttcagcgcaccgtatctatggtggggctggttgtggagcttctcacgaagcgccgggatcctttgacgccggtacgccaatctgcaatcagtctcaccacccaacgattggcgtcgtttggtggtgatttaaaatcactgtcaaaggagatcgcctctatggctatcaatgcccactcacgccttaaaaccttcatttttgccgccgttgagcgttcaaacctcaaatcaagccgcccggtaatgctgcacatcacatctgcaaccgaacgccttgctcgtcaatctgcaagccgtcaatacgtgctctctttcgctggtgttatccagaacggggggactttgtaa

SEQ ID NO: 396635 - DNA, 891 bp, Salmonella enterica
atgctgactgatagccccaaatatatgagcgataccagattcacaaaatcaaccaccgaagcagcgcaaaaactcaaagtctcaatgcggcaacttcgcgaaattcaggaaaatgcacgagcgtttgccgtccgtgagttcgatgcggcacctaataatgcgctcggtatccgcgcccacgccatcaaagcttttttcagtagccggaatacagaaatgttagcggagtacctttcagggttaggattcgtcaggcagaaccttatagccgctcgtgatgtgcttaatgctgagggtaaaaagaaatatgaggcatacataaaaaacgccgtagaaacgctaccagctcgatttagcgggcttaagccttactttttgaatatccttaccgacctgatgtctatccccttcaggagaagtgcagagaaggacaggcgcgagatttctgactcactttgcctgattgctgactttattgaagaatacagataccgtggcactgacgaacgctacagagaatacgcgcagacaatcatcaccggtatagatacagaacgattaccaacgatgatcgccgggcttatcattcaggaagtgacggcgctgatagatgccgcttgcactaccaatgtgatgacctttgcgaattctggtataacacacgaagaattctggcggtttacagccccagacgactacgctgaagcctatcctgatggcgagatacctgaaaatgcttcgcctcttgaaacccttgatatttatcctttacatgaagggatagcgcagcaaagcctgtggtatggggttgatgcttatgtcgatgatttcattgtgtctatggctggtggtctgctgtatacgaagcagcccctgaatcgaatcaattaa

SEQ ID NO: 396636 - DNA, 171 bp, Salmonella enterica
atgggcgtgggaattgataacgatcaaggaggacagggatgtaaatggcaagcaaaccttctgtatactccttttggaggaggtttttatttatatatctttctgattttattaattaaaaataaatttacgcattgcatgaatgttaaaatttcggcaagtgggtattaa

SEQ ID NO: 396637 - DNA, 1329 bp, Salmonella enterica
atgcgagaattcaatcccgaaacgctcgccccctgggtgacgccggtgtatgcaaaatcctgcctgaaggagaaaggctgcacggatgccggaactgccgaagagcccgttgataattttggacagatgacaatttttgcccagcctgttgaggacgactgctgcggttacggtcatcagcatgagcatgcagatgatgaagtcgttcagcatgcacagtcagccaaaaaacgtaagcctgacgccgggggcgaaaatgctccagctcaggcaacggctgccccgcttgctctgggagctgctactggcttgatgacccaggtctggggggaatggtccctgaccggcgcattgggcgcggcccggggaattccgtatgtaggcgcgatgatgtccgcgctctacgttccttctgcgggtgaggggagtgacagggttcctgggcgagacgagttctggtacgaggaggaactgcggcagaaatccctcaccggagcaaaagcgacaacccgggtgagattcttctggcgacaggatgagcagggcaacatgcgggtctacggcgttcatacgggggaaggcaccccgtatgaaggtgtgcgcacggctgaaatgaagtgggttgaaaaaaatagccgctatgagttcaaaccagctcacggagctgatgttcctctgattacctggacgcccgaacgaccggagggcggcgatttacccgctcatacaggaagcgacataaaacccatcgaccaggctacgatactcgtcacgccaataccagacggaaaagatgaatacacgacgccgccattcccgatgccggaagagcgggatcttaacgattacattctggtgttccctgccggttccgggattaagccggtttatgtttatctgaaagatgattcacgaaatcaacccggaacagctactggcaacggtgtaaaactatccggagataaaccctggctagatttatccgtaacaaacaagggaaatggagccccaattccaagtcatattgctgataagttaagaggtagaagttatggatcttttgacgatctaagagaagatttatgggaagagataagtaatgacccaaaacttatggctcagtttggtgaagataaccaagaacgtattagtaatgggctagcaccttgggttccatcagatggatactatcatgggccaaatgaggttgttaaaaaatttcagatacatcatgatcaagcgattgaagatggcggtggtgtttatgatttagataatctaagaatcgtcacccctcggttacatgatgagattcactataggaggtaa

SEQ ID NO: 396638 - DNA, 309 bp, Salmonella enterica
gtgactgaattcaaaaaatccataaatgattacactgaagaagaatttattgaattcttacatgaatttagaaaagcaacccgaaagaacaactccttaaaaggtaaggagttggatgcctacttagataatcttatggatcatttcattaagataactgaacaccccaaacaaggtgatcttatagcctatccagaatcaccagaagcacgggaaccaaaaaatattatcagaattgtaaaagaatggaggaaatcaaaagggctgccgctgttcaaagactctgaaaaaaataaacaagaggaataa

SEQ ID NO: 396639 - DNA, 315 bp, Salmonella enterica
gtgctgaaatcgctatcccatctaccagattttggtctgccggatatgaccaaaattctgcaaggcatgccgggtaccgcccacgagctgatcgatacgctggccggtgtcctgcgcaagtatgaatcccgtttgcagtccctcaatgtcactttacttgaacagcaggtgcctggagagttgagctacgccatcgatgcggaactgggaggtatcggacttgtgcggtatggcaccgagtttatgccaggggggaaagtaatgctcagatatttgaaacaacagcaacatctggaaaaccatctgtttatttaa

SEQ ID NO: 396640 - DNA, 258 bp, Salmonella enterica
atgacaacggcgctggcgggactggcgttgggaccgttactcaccccactaaatgcgccaatgtcattactggccgggttaattattggcggcaccgggttttgcggcgatgtggtgatgtctgcggtaaaacgtgatatcggcgtaaaagacagtggtacgttgttacccggtcacggcggtctgcttgaccggttggactctctgatctttaccgcgccggtgttttttcattttattcgttatttttgctgctga

SEQ ID NO: 396641 - DNA, 186 bp, Salmonella enterica; identical to SEQ ID NO: 15707

SEQ ID NO: 396642 - DNA, 183 bp, Salmonella enterica; identical to SEQ ID NO: 71824

SEQ ID NO: 396643 - DNA, 582 bp, Salmonella enterica; identical to SEQ ID NO: 15705

SEQ ID NO: 396644 - DNA, 210 bp, Salmonella enterica
gtgccagatgaaatcgatcgcgatcaggcgtttaatgaacggtgcctagaagcactgattgaacaaagccggttaagacccacaccgacaccttccctgcagcactgtcgattttgcggcaaggatattccggaaaaacgccgtcagacgctgccgggtgtaacaacctgtactgactgtcagtcgatactggagaaacgcagacgttaa

SEQ ID NO: 396645 - DNA, 129 bp, Salmonella enterica; identical to SEQ ID NO: 71826

SEQ ID NO: 396646 - DNA, 234 bp, Salmonella enterica; identical to SEQ ID NO: 15702

SEQ ID NO: 396647 - DNA, 711 bp, Salmonella enterica
atgctttccaccacagcctttctggcgatagccatgcagtgcgccgccagcattcatccgtccacggcattcgacgtggcacgggtggaatccggttttaacccttatgccatcgctgagattgtcccgaaggccggcccctctttcggcgatcaacacattatttctcacctgccagccagccggggagatgcagagcatattctccgtcgcctgacagcacaggatcgccgttactctgtcgggctgatgcaaatcaccagcaccaatttccgccattatggtgtgtccgccacagagctacttgatccctgtaccaatctgtccgtcttcgaacacattctcagagactgctaccggcgcggcggcacgctgaaaagggcgctgagttgttattattccggcaatttcagtaccgggcaacaacctgaaacggcgttttccggaacgagctatatccagcgaatcggttatccgccgggatcatcccgctatgcggtccccggaacccgtgaggacaaatcatcagttgccgttcccctgaaaaccgcccctgccagtgactcatcccgtcaccacgagatctggcccggagtcgtcgtccgtggcgtccctgcgaaactccgccaagaaaaaatcttcatcgcaccgttctccgcgccgtcagtgcgccggagtttctccctgtcaccccgtgaggaggaggaataa

SEQ ID NO: 396648 - DNA, 294 bp, Salmonella enterica; identical to SEQ ID NO: 15700

SEQ ID NO: 396649 - DNA, 2739 bp, Salmonella enterica
atggcaaagctgctcaaggcaatgaaacgcccggcggcgctgtggggggtgcctatggtgcccctgctggctgtcacgggtgtaaccatcatcgttgctgtctggacttccgtcgcactcctgttcttacttcccgtcgaatttctggtgatgaaatccctcaccagaaatgaaccaatgcggttcaatctgattgccgtttggctgagagtgaagggaaaaccggtagcaaaccgtttatttggcgcaacaacacttatgcccgttgagcatgaggctgttgatatcaaggagtttatagacgccatgaaactaaatcagtgtgccaccatcaagaagtatattccgtactcatcgcacattcatcagcatgtggttcgctcacctaaaagcgatctgtactgcacctgggaattgatgggaacgccgttcgactgcgagtctgacgaatcactccagttcgggacgaaccagttacacgggctaatccactcattcgaaggtatgcccgtcactttctatatccataacgaccgcaatacgtttaccgacaatcttcataaagattccggcaacccgtatgccgatgaagttagccgtctttactacgcttctgtcggggtgttccggcgtaaccgcctgttcctgacagtctgctatcgcccgtttgtcagccttgaaaaagcagaacgcaaacggatgaaagacagccagaaactaaaggaactggacggtgctttgctggaaatgctggaaataaaaagcacgctcgataccgcgctgtcgcgctatggtgcgcggcctctcggtacgtttaccgaaggaagcgcggtgttttcgtcgcaactggctttctatgaatatctgctaacgcatcagtggcgaaaggtgcgcgtcacccgcaccccggcctatgacgtgatgggagcggcggcgttgttcttttcggctgaatccgggcagataaaccacgccaacggtacgcaatatttccgggggctggaggttaaagagttctccgaagagaccgccacggggatgatggactcccttctttacgccccctgcgattacgtgatcacgcagtcctatacctgcatgtcacgcgaggaagcgaagaaagccattaagcgtacccgtcgccttttgatgagtgccgacgacgatgctgtttcccagcggctggatctggatgtggcgcttgacctgctgacatcggggaaaatcgcttacggaaagcaccatttttccatcatggtgtattccccgtcgctggaaagcctggttgctgatactaacgaaatcagtaacgcgctgaacaacatcgggataacgcctgttccggcagaaatatcgctttcagcggcgtatatggcgcaactgccaggcaactacaacctgcggccacgtaaaggggagctgagtagccagaactttgtggagctggccgcgctccataatttctatccgggcaagcgcgataaagccccctggggggatgcgatggctttactgcgcaccccgtcaggcgatggctactatatcaacctgcataacacactggcagataaggacgaattcaacgaaaagaacccggccagtacctgcatcctcggtacgaacggttcgggtaaaaccatgttgatgacgttctttgagatcatgcagcagaaatacgggcgtgaggatagcttctccccggatgccaaaaccaaacggctgacaaccgtttacctcgataaagaccggggcgcagagatgaacatccgggcgctgggtggccgttactatcgggttatcagttgtgagtctacagggtggaacccgttctcgttgccagcaaccaaacgcaatatcaatttcatcaagcaactgatgaaaatcctttgtacccgcaacggctcgacgatctccccacgcgatgaacgccgtctgagtgatgcggttaatgctgtgatgaatgacgagccacaatatcgcgtctacggcattacccgaatgctggagaatttgcctgagccggctacgaaagaagcccaggaaaacggccttagcattcggttgtcacagtgggcgcagggcggtgagttcggctgggtgtttgataacgagtctgacacgttcgatatcagcaactgcgataacttcggcatcgacggaacggagttcctggacgatgcaagcgtatgtgcgccaatctcgttttatctgctgtaccgcattaccagcctgcttgacgggcgacgcctggtcattttcatggatgaattctggaagtggttacgcgacccggtgtttaaggactttgcttataacaagctgaaaaccatccgtaagctgaacgggatgctggtcgtcggtactcaatccccggcagagatcatcaaagatgatatcgccccggcagtgattgagcagtgcgggacacagattctggcggcgaaccccaacgccgaccgcacacactatgttgacggtatgaagtttgagctggaagtgttcgacgtggtgaaagggcttgacccgcaagcccgccagtatgttgtggtgaaaaatcagttcaaacgcggcgataccaaacgttttgccgctcgtatcacgctcgacctgtcgggtatcggcagacacaccaaagtcatgagcggcgatgcccccaacctcgaaatattcgaatcgatttaccgggaaggaatgcagcctcatgaatggctcgatacctacctggctaaagcgctctga

SEQ ID NO: 396650 - DNA, 705 bp, Salmonella enterica
atgaaaactcgctttcgtactcttattctggcttgcttcattgcaagcccactggctcatgctggtattcccgtcgctgttgatgctgaccctatgcgggacgtgcagtgggtgcaggagttaaaacgctggatggaaacggccagacactaccagtcacaaatacaggcatataaagaccaactggcgacggccactggcgttcgtgatattgctgattttgttgaccaggctaaaggcctgaaagctgaccttgaaaagctgcgtaagcccggacaggcactgaatgatttgcttctctccggcggttcctccgggcagttcgatgcgttgtacgagaaatataaaattttcgacacctgcaacacggcacaatcggggagttatgccaacgtatgcaagcagcaggtcatcaacaaggctatccagcttgagcaaaccgacgaggttcagaatcaggtaagccagaccctgggggaaatcaacagcctctccaacagggtagcgttagccaaagattcgaaagaatctcaagaccttgcaaacagtattcagctaaaatctgtcatgttgaacacgcttaccacccaatgggaaatgagcgtgaaagcagcagagaagcgcgaaaaagtgcttgaggcggagcgcgttaaacagtggaatcagcaacagttaaacgcgccaactttaaaatttcatgagtaa

SEQ ID NO: 396651 - DNA, 228 bp, Salmonella enterica; identical to SEQ ID NO: 224029

SEQ ID NO: 396652 - DNA, 1080 bp, Salmonella enterica
atggccgaactcggtacatttgaatttatagataaacagctaattggtggtataactcaatctaccagtgggttgatgatggaacattcatcaatggttatggggctggccgctgtgtcagccaccatatacatcatgtggcgtggctaccagacgctggcggggaagctctccacgccgatggaagacacgatgtgggacatcatgagaatggcgatcatcctgtcgtttgtggctaacgtcagtggttatctcgatggcgtgatcgatgccatcaacggtttaaaggagggtttttctggaggcgacaatatctggcaaatactagataccttatgggataaggcaaaagttttggggaaaacattacacgatatggataattccacatatgtaaaagatgaggggatgaccgctcaattttatgtatggcttgggatatttattcttatggctttaacagcttttgtttcgatggtcgctgagataatgatcttacttcttagcatcactgcgcctatttttattttttgccttatgtatggttttttgcgaccgatgtttaataactggttgcaaaatatatttgcagcgatattaaccgttctattttcagcattatcattaagagtagtcataaactttatgactaaaatattagcccaatctcaagccggagctgcacagtcaaatattgtggaactaggcgcacaggtctgtttggctggtatctgtgccgcaatactggtgtatatttccgctaaagtagccgcagcactggccggggcaagcgctaccgtatccatgcaggggctggccgctgtaggtatcggtgctgcttttggtgccgggaagctggccgggggggtacttaaagaaaccaaacgttccgcccaggacaacattcagggctggaaggatgcgaatgcaggtaagcccggcaagcccggaggtgagttaggctataacgcttctaaagcgcgtaaatacgcgattgagcagatgatagcccggaacgaagcgcggagactggcacagaggagggaatccgcggttaagaagttcaacagccaggtctga

SEQ ID NO: 396653 - DNA, 138 bp, Salmonella enterica
atgaaacgcttgattgcgctggctttgctgtgcgcgctttctggctgcgcccagaacacgcctccctctgcatttagcggtaagggagaacccgtaaacacccctcaaattatggcggagttaaacagtcatgagtga

SEQ ID NO: 396654 - DNA, 684 bp, Salmonella enterica
atgagtgaacagaaattaatagctgaatcccgcacctttgagcagcaaatgattgagcgggataaacgcgccactaaagccggttttgttgttggcggcgtgggtctgctgattgcggtactggcgctcgtcgccgtggtcgtgatgttgccgctgaaacagacggatgttgagctgtataccgtggataaccatacaggacgggtggaacacgttacccggacatcgaaaaccagcctgaccgcaacagaagcctatcaaaaggcgatggccgcaaactacgtcaaagtgcgtgagcggtatgtctatccctctttgcaggacgactacgagacggtacaggtctacaacgccccccaggtaaacgatgactacctagcgctttacgccggaaaaaacgccccggacaaggtttataagaacggggcgcacaccgtgaaagtggagatcttgtccaaccagatcaccgatgcgacagcccctgataggatcgccaccatccgctacaagaagattatccgccgtctggctgataacagcacccgcaacgaatattgggatgcccggttcacgttccattctgaccctgacaaggaaatgagcgatgcggaacgcgagatcaactacttcggctttaccgtcaccagctggcagaccgaccgcgaaatccggggaggtgaatga

SEQ ID NO: 396655 - DNA, 906 bp, Salmonella enterica
atgaaaaagttaacgtttaccgcactggcactgatgatgtgcggcgcggcatggggtgcggccataccgcaggcaagccgctatgactcccgcgtgcagcaggttatctataacccgcagaacgtcactgtcgttaacaccaaacccggctttatgacaacgctggtctttgataacgatgaggcggtcataagcgccaaacctggctttgatgaggcgtgggaagccacgccggatgcaaaccgggtcaacgttcgcccggtcgcgctcacgcagggagcgcccgaagaagatggcaacacaacgcaggtcgtgatccccccgaacagccgggactggcataccaacatgctggttgtcaccagtaagcgcctgtacaacgtcgagctgaacgtcatcgatgataaatcggcacagcaacccgctttccaggtgagctatcgctatccgggcgaagaacgggacaaagcgagccgggaggcgacggccagacagcacgagtgggagcagaaacagcaacaggccagcgtccagaaagcgctgaactcggcgcagacgccccgcaactggagttacacccaatatccgggcaaaggcagtttcaacattgttcccgattttgcttacgacaatggccgctttacgttcgtgggcttctccccgtctaagtccattccttccgtcaccaaagagctgaacggcaaagagcatgtggttaacagcagtatccagaagaaaggcgacttcaccgtactggtgattcaggaggtgacgccccgcctggtactgcgttccggtaatgtcgttgtgggtctggaaaatagcggatttggcaaagtacacgccgccgatggttccaccgtatcccggcaggtggaaagagtggaaaaaccagaatccaggtaa

SEQ ID NO: 396656 - DNA, 1251 bp, Salmonella enterica
atgaacgacgaaaacaaagtgcctgtgccggatgaagcgcaggcatccctggcacacgctgaggatgatattgctacgcttgagcgggaagctcgcgctaaaagggaggccgagcttctcaatgcgcaggacgacgaagagaaagacccggtacaacccgccgttaacaagctgaaaaagcgcaaacggggcaaagcaaccgcctttcttgccattgtcgcggtcacgcttatcttcctggcatggggtggtaactgggtttatcgcaatatcctgtggcagcctacggaagaaaagaaaccggacacagccccgcagacgaacaaaaccgattaccggcagcgtaacgatctaggtatgtccaccgatacagccgaagaagaggcagagcaacaggataacggccagagcagcacggggggaacagggcaggcggctccggccgccccgccagaactcaacaaagccagcttccttattcgccgtgatggttcagccaccacacagaacccggtaaaaacccggcagcaggaaatgacgctgacatcggcaacgaccaccgaacaacaggacagcagcgcggccacaaataccgccgcaccgtcgccgggacaaagccccgcaccagtgcgccgcataccctataaccctgacctgtacatcccggaaaatacctcgatcccctgctcactggatcgccactttgtatctgaccgggcagggaaacttcgctgcacagtcactactgacatctggagcgccagcggcaacacgaagctgatagagaaaggcaccacggcatcattactttaccgagccatagcggaagaaggtatgaagcacgggcaagggcgggcattcatcattgcgacgaagctacgcacccgccagccgccttatctcgatatcccgttggttgataccagcgcggctggcgagctgggcgaggctggcgttgatggctggatagattcgcacttctgggaacggttcggcggcgcgttaatggtcggcatgatccccgatattggcgcatgggcatccaacagtgcgggtaaaaaagaccgcaatacggactatacggaaaacagccgccaggctatggcagatatggcgcgtactacgctggagaacagcatcaatattcccccaacgctctataagaatcagggcgagatcatcaacctgatcacaggcgaggatattgatttttccaacatctatacactgaggttgaaaaatgaccgctaa

SEQ ID NO: 396657 - DNA, 1026 bp, Salmonella enterica
atgaccgctaagaatatttccctcgaccgctataaacagcgtttctttggcgactttctggagcttcctggcctgacggagatcgccgtcaaccgtccaggtgagctgtataccaaaatcaacggcgtatgggagcagcacgccgttcctttgtcctatgaggattgctacaactttgcccggtgcctggcaaagcaccacggcgacaatatcgaagatattaagccggggctgtcagccacgctggaatctggcgaacggtgccaggtgattgttcccccggcctgtgagcgcgatacggtgtctatcaccatccgtaagccatcaaaggtacaaattccgcatcagtcgtatatcgatgcgggattttataaccgggtaacaggcgaggaaaaaacggagacgcacgacgaggaattaattgcattgtacaattcaaaaaatattcctctgtttatggagaaatgcgtcgagtacggtaaaactctcgcggtcgccggggaaacaagtaccgggaaaaccacctatatgaaaatgttgatagggtttattcctatacatcttcggatatcaaccattgaggacaacccggaaatcacgttctttatccataaaaactacgtccatcttttttatccgtcagaatcatcagatgaaaaaggttctatcgttaccccggcgagccttttacgctggaattaccgtatgaaccctgaccgaattttattaacagaggttcgcggtgcggaagcctgggacttccttaaaataacgggttccggccatgaagggagtatgacctccattcatgcaggatcagcgaaagaagctatagatgggtttattacccgttgctatgaaaatccacagtgcgcccagctcccctatacatttatgttacgtaaggttctggatagcctggacgtgattgtgagcattgatttagacagaaatgtccgccgtatgaatgacatttatttccgtccaattcatcgcaatcaatattttgaggaaatgaaagcatga

SEQ ID NO: 396658 - DNA, 399 bp, Salmonella enterica
atgacaaataaaatgacagtcatcatcctggcggcaatagttaccgggtgttcatcaccaccacctcccgtccctgtagagtgggataaagccgctgtcccattaaatacccgtttaccgcaatggcgtgacaataacgttatagtcccttccccgacagttaacggtaaatggacatcatcagtcagcgcacaaagtttccacgatacaacatggacgccagccgtattttatgcagtcgctcattcaacacgaattgtcgtctctgcgcaacccggtactgatttctttaatgccaggaactggcttcgccagaatggcgcaaaaggcgtcattgaataccagcctgtttttaattgcctgacgtgcagggaaaccaccatttatttctctcgctaa

SEQ ID NO: 396659 - DNA, 303 bp, Salmonella enterica
atgaaaaaaaacgttatcgcggcggccgcattatgcctggcagcaggaacaccagtttattccttttccgctaatccgtgcgaagttgttctttgtatgtacggaaaagcaacggggaatagtggcgggcgtgaatgccgttctgcagaaaaggctttttttaaaatagtcaaaaagaataaacatggtttcttacccaaccatactttaaaggtgagaaaagcgttccttggtgaatgtcccgacgcagatccgaagaccgtaaataaaatcctgtccaggttcggtaaggtcagaggatag

SEQ ID NO: 396660 - DNA, 306 bp, Salmonella enterica
atgcgaaaaaaagacttattcatccgaaatatacactcccgcaatcaggacagaatatcgatagccatggtatatgacacgttatcaaaaaaagctcacagaggttgtgggctgtattacgaaatatacgcaagcagattaatcgacctttttcgcgctcatctttcagaacttaatgaagctgacgcaaacaaattaatgagatatgcagaaagtaaaggcacaaaaattgatgatacaacctggagcgaggcactggaagctgaaagggaatgcagagctgaaatataccgcgaacagatgtaa

SEQ ID NO: 396661 - DNA, 1860 bp, Salmonella enterica
atgattttaaataagcttgccgcttcactgtcaccgatagtgaacgggatgctggcgctgctcgcttttgtgcatcagcagcaactgataatggcgttattagcggggctgacgatgccgttttttgcatcaatgaaaagcgatgaacggcagaaagctccgctctggaaaaagctgattatggctttttccctgctgtgtttcctctccggcacactggccccggtcgttatcggcttttttcagtggctgtataagaccagactcaccagtgataatacagcactggcctggtcagtacgaattgccttcactgtaaccgggattatttttcatattatgcttcgccggatattcacgccggaactggacaaaataaagaaacgccttgtaaaaaaaaccacccttgaacgggaattgcgcaccgatgtccgcaccgtaaagtccctgctgccggaaacactacattatgagccgcttgattatatcgatctgaataaaggcatttttactggcatggacagagagaacgaaccaatgtatctcccgttaaaagactggcagaaacaacacgcggatattatcggcaccaccggagccggtaaaggcattgccgccggcatattgctatatcaaagcattctggccggtgaaggtgtgtttgttatggaccccaaggatgatgaatgggcaccgcatctttaccgcaaagcctgcgaggatgcaggcaaaccctttgccttaattgacctgcgaaaacagcaatatcagttaaacctgattgaagatattacgccagatgaactcgaagaattgttcgttgccggtttcagcctggcggaaaaaggacaggaatcggatttttatcgcattgatgaccgaaaagccgcgcgtatggccgcacaatttgtcagcgaaaatccatcgacaacaatcagggatgtttataacggtgattacgttcagggtattgccgaaaaaatcaaagcattttttggcaagattgaggagctggcattactcaatgccattaattcaccggaaggtttttcgcttaagcacatatttgatgaaggcggctgctgttatgttatcggctccatgcgaaacagcaaaattattaccgcccagcgcatgctgctggttcgcctttaccagttagcagaaacgcgcgatcgagtaacagacgtcccccgccccattgctgtttatctttccgaactgaaataccatttatccaggccagcgctggaaggtttaggcgcggctcgggataaaggcgtgcatattattatggatcaccagtccattgccgatttaaaagactgcccggcagatttgaaaggtgacgccgttgtcggtgcggtcgttgaaaatgccaaattcaaactggtttatcgggttatggatccggatacagcagactggatagcgagaatgtcaggaacgattctggtggatgatgaactccgtaaggctaagacggataatatgctcactgaaaccatcgacagtgagcgcacaatccgccaggccgaacgtttttttattgacagcaatatgatcctgaacctgcctgattttgtcagttttatctttacgaccacaacgctaccttctgcctccctgatttcaccgataaaggtcagaaagcgccggttaaaaaccttttctgtttcccctgatattgccgcagcggcggcaccggtgaagatcgcactggattttggcgacgatgataaaccagccgcgctggatgtgatgacatcgcacccggctcttttcttcgacgaaagcgaagtaaaaccgacaaagccaaaacctgatgatgaaaaagacctgtccccgctggatttttaa

SEQ ID NO: 396662 - DNA, 747 bp, Salmonella enterica
atgctgatttcgtcatttcacgagcgccagacgcgtaacaacgaaaaaataaaacaactgctgaacttcctgaaagaagaaacctacagcgattttaaaacgctgatgctgttgtttggtttccgggatcataagtctctttattcgctactggcaaaaacagagcgaatggggttaatacagaagcatgtgcttgaatcacgaacaatgaagatttcattatgggggatcaccagcgacgggctggcggtagtgctaaccccgaatgataaaatctttcccgcgaggtttgaaccgtccagagttaccggctggacgctggagcatcatcttgataatcaggtcgccaggcttattctggagaaaaaaggcgcttcgggatggattaacggcgaccgggccggctttcttagccagtatcaggtaaaacatcgcccggacggattactgacgctgcctgacggtaacgttattgccattgaaaccgagcgccgcctgaaaacccgggcccggtatcagtcgatcatggcaagccacctgctggcccgtacccgcaagcagtggatttacgttttttatgttgtacccgaaccacagaagaagtgtgcacttgaactgctgtttgacagcatcaggcatgtcatcatcaaccatcagcacgtcccgctggaagaacgccaccgccgtgtgtttcgcacttatacccttgatgaactgaaacgcctgtcattagacagctattcgtaa

SEQ ID NO: 396663 - DNA, 945 bp, Salmonella enterica
atgacgatttccctgcatacccagactagcgcccctaacatcgcagtggcgaccagcgtatccccgctggagcagtcaggctcctcaaaaacgaaattttctaaaaccagaacggatatttatcagaccgttaccgacaacatcattgcagcattggaggccggtgttaaaccctggtcctgcccgtggcagcgtgtatccggcatgtctggactgccatctaattacgccactggcacagcttacagcggcatgaatatcatgctgttgtggtgcagcgcatctaaacagggtttcagcgattcacgctggatgacctacaaacaggcacaggcagcaggtggacaggttcgcaagggtgagcatggcacaacagccattttctacactacgctggagaaggaaaacgacgccggagacgttgaacaaatcccgatgctgaaaactttcaccgtgtttaacgttcagcaaatcggcggcttgcctctggcaaaggtaactgtcagcccggaagcgagatttgccccgttgccgcaggctgaaaatctgttcaggaagagcggcgcaaacatcattgagaaaggacaaaacgcctttttcagcccatcaactgatgaagtctggttaccggagcgccatctattcgctgatgcggctaacttctacgctaccggcctgcatgagcttgtccactggagtgggggtaaaaaacgcctgaaccgtgaaatgaaagggaagtttggcagtgcggattatgcagaggaagaactggtggcggagctgggaagtgcttttctgatggcggacctggggattgagggagaggtacaacatgaaagctacattgcttcctggctgaaagcactgaaaaacgacaggcgctatattttcaaagcggccagcgccgcctctaaagcgcatcgttatctgatggataaactctga

SEQ ID NO: 396664 - DNA, 996 bp, Salmonella enterica
atgaatgatgcaccttcagacatcatatttcactatccaccggagctgttcaatctcttggtggatgttgtgccgttgctcaatcgctctaagcaggatgtgctggttttcttccggggcgcaggagtacctgacaacataacttctgacattgcagttcacttgagggctgcaccaaaggatgtcaacaagtaccagatggttcgcacagtacttgaacgcctcaacgcgaagggggaacatgctctccgtgaacggcgcgaagtgctgcggcgcgtggtggactttgcgaactttgattcgtgctggcccgcagaccaacttaaggccaaaggtcttgtcgccagtatccgcgaagtcgtcaaccaaaaagacgctttcacgcgcatgaacaatgcccgcgaagaagaacggcaaacccgcctcgctgagtcacagcggatcgcagcagaaaaacgtgatcgtagttatagaatcgagaatgccaagcagggtttatataaattatttggcactactgcgactgcacaggaacgaggaaaattgctggagacggctctcaacaatctttttcaagcctacggtgttctcattcgtaaatcctttcatttggttggtgaggctggtgaagggatcgtcgagcagattgatgggatcattgaactcagtggtgttctgtatttcgttgaaatgaaatggtatcgcaatccggtgggtaagcctgagatttcagagcatcttgttcgcctcatgtcgcgtgccgaggttcgaggtatcttcatttctgccagtgactatacagaaccagccattcttacggcacgtgaatttctgcaacacaaagttgtagtcctatccacgcttcatgagatcgtccgtctgcttgagcagcaagacgacctttcagagttcttcacaaagaaagtccaggctgcacagatacacaaaaacccgtatttctgcccacacgatagccaagcacaaggtgcgttatga

SEQ ID NO: 396665 - DNA, 1089 bp, Salmonella enterica; identical to SEQ ID NO: 171388

SEQ ID NO: 396666 - DNA, 495 bp, Salmonella enterica; identical to SEQ ID NO: 171389

SEQ ID NO: 396667 - DNA, 1881 bp, Salmonella enterica; identical to SEQ ID NO: 76682

SEQ ID NO: 396668 - DNA, 2247 bp, Salmonella enterica; identical to SEQ ID NO: 76683

SEQ ID NO: 396669 - DNA, 1101 bp, Salmonella enterica
atgaaagaaaaaataagcaagattgataaaaatttctatactgacatttttattaaaacatcatttcaaaatgaattcgaggcagggggagttataccaccaattgccaagaatcaagtatcaacaatcagtaacaaaaataaaacattctattctctagctcactcatccccacactactctattcaaaccagaattgaaaaattcttacttaaaaatatacctttaagtgcatcgagttttgcatttaggaaagagcgctcatacttgcattatttagagcctcatacccaaaatgtcaaatattgtcatcttgacattgtttcattctttcatagcatagatgtaaatattgtacgtgatactttttcggtatacttttccgatgagtttttggtaaaagagaaacaatccttattagatgcattcatggctagtgtgactctgactgcggaattagacggggtcgaaaaaacattcattccgatgggatttaaatcttccccatcaatatctaatgttatctttagaaaaattgatattttaatacaaaaattttgtgataagaataaaattacttatacacgatatgcagatgatcttttgttctcaacaaaaaaagaaaacaatatattaagcagcactttttttataaatgagattgcatccattctctccattaataaattcaagttaaataagtcgaagtatttatataaagaagggactatttctttaggtggatatgtcattgaaaatattttaaaagataacagccgtggaaatattagattgtcgtcttcaaaattaaaccccttatataaagcactatatgaaatcaagaagggtagctcttcaaagcatatatgcattaaagtatttaacctaaaactcaaaagatttatatataaaaaaaataaagaaaaatttgaagccaagttctactcatcgcaactgaaaaataaactcttgggatatcgttcttatctgctttccttcataatattccataaaaaatacaaatgcattaatcctatttttttagagaaatgcgtatttcttataagtgaaattgaagctataatgaacaggaagttttaa

SEQ ID NO: 396670 - DNA, 1089 bp, Salmonella enterica
atggtagttgtcttatctcatcttactttaattttctacccacaactccatgatttttataaaagttctcttcctaaaaataatatactctatattatacataactcaccattttcctttttttattctggaacaggagctgtgtttgtttttttctgcttgagtggttatgttttgatttctaatatatcaactgcaaaagataagactaagaaaataataagctcagctataaaacgttatccaagattatcgctaccagcagtgtgttcgtgcatacttttttgggtagtagttaatttatttaatattagacttgacaatgtttcccaatggtttatagatataatatataaagactataacctgttggacagtatattatatggtggttttgagtcttttatttatggaacagctaagtacaatcctgttttatggacaatgcaaattgaattaataggatcttttttgctatttttattttgctatttcaatgtttttgatggagttattagaataatatcaagtatcttacttttgaatctattcgaaatgaatgtatatgtttttttaggcttggtaagttttattattggtgcaataatttatatatatgatataaatgttcctaaaacttataattgcctccttctagtatttggcctatactgtgttggtgtccatgagaatagctatagctacagatgggttttctatattgcaaaatgcattaattctagttatgtccaatatgtatatccattttttaatttttgtggtggtataattgttgtaatatctatagttaagaatgatttgtttaagtcatttttttctttttcttttcttattgttctaggtgagttatctttctcaatctatttaatacatttaagcatgatatatgtttttataatcccgttttttaatgtgttgatttcacttgaatttaatttttggcttgtttcttttttatgtgttttaacaactttcatagtcttattacctgcatcatttttattttttaagtgtatagataaaacctcaataaaaatttccaataaaattgttagttttttcaattaa

SEQ ID NO: 396671 - DNA, 1011 bp, Salmonella enterica
atggcaatacttgtcactggtggtgctggatatataggaacacatactattatataccttctagataaaggttatgatattgtagttattgataatctctcaaactcatccaaagatgctcttactcaagttgagaaaataaccggtaaaaaggtgattttttatcgtggagatatacgcgacaaccatgttttaaaagatattttttctcaaaatactataagtgatgttattcactttgccggcttaaaagcagtaggagaatccgtaacgctccccctaaaatattatgataacaatatatcgggcacattatgtttacttaatgaaatgttactttctaacgtcaaaagtattatatttagctcttctgctacagtctatggtttaccgagaacacttcctattaaagagagcaatcctttaggccaaataactaacccgtatggcagaacgaaaatcatggctgaggatattttaaaagatcttacaaaagtaatacctgattttagaaccacaatattacgttatttcaacccggttggcgctcaccctagcgggttaataggagagaatccgaaaggtattcctaataatttatttcctgtcattagtcaaactattttaggaagaaatcgatcagtaaatatttttggctccgactatgcaactccagatggtacgggcatacgagactatatccatgtaatggatctagctgccggacatttttcagccctagataagcaatatgaaggaaaaaacttcaaagtgtataatcttggcacaggaaaaggatattcagtattgcaaattatcaatgaatttgaaaaacaaataaataaagaaataaaaatagaattatgtccaagaagagaaggggacattgctcagtgctggtcctcacccgatttggcatttgaagagttaaggtggaaagcacaattatctttagaagatatgattagagataccctaaactggctaaataaatatcctagcggttattaa

SEQ ID NO: 396672 - DNA, 810 bp, Salmonella enterica
atggggttttcagttctaatttctctttatataaaagaaaaaccagaatacctagatagatgttttttgagtatatatgaacaaacactatcagctaatgaaatagtccttattttagatggggatattaccgatgagcaaaactttattatccagaagtggagtaaaatgctccctatcaaagtttttccactattaaaaaacgttggcttaggtaaagctttaaatataggtttaaaaaaatgccagcatgatatagttctaagaatggatactgatgacatttgtatcaatacaagatttgaagttcaatataactatcttgctgctaatcctgatatagcaatattaggcagtcatattaacgaatttattgataatgaaaactattatattggtagaagactggtgccttgtattaattcagaaattaagaaatatagccaaaagcgcaacccttttaatcatatgacagtggggtttagaaaatctgtaatcgaaaaggttggtggctacaaacatcaccattttatggaggattataatctgtggctaagagtaatagctgcaggttaccaagtaggtaatataaatcagtgccttgttaaagttcgagttgggaaaggaatgctagaaaggagaagtggtatagaatatataaaaagcgaatataaattagcaatattgaagtacaaactaggtatacaaaaaagttcaggtgcattaattatctttctaataagatcaatacctcggttatttccagttggtattttgggtattttctataaaaaattaagaagagcatga

SEQ ID NO: 396673 - DNA, 999 bp, Salmonella enterica
atggctagcttagcaaacgcgttagctaaagaccatgaggtctatgtttatgcactaaattctggtgcattgttagagcctttgcgaaaatccggaattacaacagaggttgtttcatatcgagaaatgttctcagtagcaatttcgagtgaatatgatgtaatccattctcactgtcttttacctgatattatattatcatttgcttctctatttaaatatagagagaatgttacttgtactactattcataattttatagatgttgattatatccttagtaaggggaagattttgggaaaggccatggggattgccaaccgattggcctttaatggtattaaagttaaaattgcttgttcagaatctgttaaagaatattgtaaaagtaaatataaaatagaagcatatgctatatgtaatggagtggatagacaaaatattcctcttatgaaagatagaaaagttaaagagtatacggatttttattacctcggagtcgtgaatgccaggaaaaatgttgagcctcttctttacagttttaatgaatatgtgagacaaggtaataacgatcgtttacatataataggtgaggggccagatttgcatattttgaagaaacaatataaagctagaaatattttatttcatggaaaacaggagaatcctttaaatgttattaagaactatgattgttatgtctctacatcaaaagctgaaggttgcccattggcattattagaaagtttatcgcttggtaataattatatttgttccgatatttctccgcatcaagagatccatcagaaaattggtgagggagttattgtttcggataaacgtccagatgagttggtaaaagcatttgaaaaaataagttatattaatcagcatgagaataaaaagaagagtattttagaaaaatttgaaagtcatttcagtactgaaataatggtggataaatataaaaaaatatatttcgataatttcctggggtga

SEQ ID NO: 396674 - DNA, 936 bp, Salmonella enterica
atgaatactttgaaaaataaagttagcatattaatgccaacatataacagtgcagattttattgaggaggctataaatgacattattatgcaagattatgtgcattgggaattaattgttgtagatgatggttctactgataacacaagaaatatattaaaacaatataatgatgagaggataatcattcattttatgaataaaaactcaggcatttcggtagcactaaataaggcactggaattagcgagtggcgagtatattttgagatttgattctgatgacaggtgtgataaaaatcgtatatcaacgcagctttgttttttagaagaaaataaatttgatattgtggggacatctgttaaaacaatatcgcgagaaggtatgttgataggtaaatctaaatattatgaagatagtgtatttttaaagaaattattaagatatgaaacaccaatacttcatatttggctggcaagacgagaggtttacagcaatgttgggaattatcggttagatggagtagaagattatgactttatattaagggctattgatttaggctataaaatatctaatgtaagcaattattatggtgtgtcgataaggaaacacaattctaatacagccagtttgcaaggatgggatcaacgtaagaaatttaatttagcgtgggttttacaccgagaaagacagcgttttggaaaagaattaactcctattgctactataagaactagtgcgattggaaataaattacattctgtttcgaatagttttttgaggaaagcattatcaacaaaaagcttacttataaaaataatatttacctccatatcagcactgatgtctccttatcaattacaatatttattatttcgtactttaagtagaataaacaaattaaaatatgaaaatagcatatctaatacctag

SEQ ID NO: 396675 - DNA, 201 bp, Salmonella enterica
atgcctggagccaggcgggagagcaccgtcaccagaaagggagcacagtatgaagaggtcagaaaactgggtaaaggcgaccatctggtgaagctgaaaaccagtccacaggcacgaaaaaaatggccgggcctgggaaatgagatgatagcccgcctgctgaccgtgacgcgcaaaggcaaagtctgccatctgctgtga

SEQ ID NO: 396676 - DNA, 1689 bp, Salmonella enterica
atgacaaccgaaactgcacctgaaaaaatttctctcgacgaactgaaaaactggctctggggcagcgcaaacatcatgcgcggtaccgttgatagcagtgacttcaaaaactacatttttggcctgatcttcctcaaacgcctctctgatgtctttgatgagcgtattgctgccatcatgaaagacgaaaaatgttcagaagctttagcgatggcccttatcaaagaagacaacccggagcagtttgttcctgaacaagcacgttggtcgaatcttgttaagaaaacggaaaacgtaggtgaaagcatcgacgaagcctttgcggaaatagaacgtcagaatccgtcactcgaaaaggtactgactgccattcagtttggtgacaaagacaaactcagcaacgaactgctgatgcgtttattacgccactttaatcgtcataaactgggcaataaaaacctttataaagccgatttgctgggcgatgcctatgaatacctgatcggaatgtttgctgacgatgcaggtaagaaaggcggagaattctacactccgcatggtgtggtagagctaattgtaaagctgattgaccctaaacctggccacgagatctatgatccaacctgtggttgtggcggtatgctggtcgaagccgcaaactacattcgggatacctatcctgatgatggcgtcgtaatgggtaaacccaactgtaagctctacggtcaggaaaagaaccttggtacctgggcgatcgccaaactgaatatgttcctgcacaacctggacggtgatatcaggcgtggcgatacgctggtaaatccacagcatcttgacagtaacaatggcgtaatgccatttgatcgcgtcattgctaatccaccgttttccagtaaagagtggtgggaaccgctggagcttaacaaagaaactaaagtcgataagaacggcaaagaaaccgaaatagcccctaaatacgcgaccgaactgaaagatccttatggtcgcttcgggttaggtgtagcgccccggacgaaggctgaccttgcctttgtgcagcatatgatcacatccactcgtgaagatgggcgtattggcgtggtcgtcccgcacggtgtactctttcgtgaaggggaagaaggtaaaatccgtaagggccttttagtgggtaaagatgacttcaaaggggatttaattgaagccgtaattggcctaccgccgtcgcttttctttaacaccgggatctctgcagcgattcttctgattaacaaagcaaaaccggctgcgcttaaagataaagtgatctttattaatgcttcatctgactatgaagatggtaaaaatatgaaccacctacgagaggatgatattaagaagattgtttccgaatttaataaagctagacaaacaatagttaatgccggtgaacaaacggaagagtctctggaagagatgctacgaaaaattgagattgaaaaatatttacgtataattacattagatgaaattgctaagaatgaatacaacttaagtattagtaggtatattgatacatctaataaagaacagataattaacatcaatgatacaataaagaatatcaaaaaaattgatgagaaattatcattggttgatgctgaattggaaggatatatatcactctttgtaaaagagggttgtgtaaaatga

SEQ ID NO: 396677 - DNA, 1248 bp, Salmonella enterica
atgagtggtgattatttaaaaatcccaaatgggtggtatcttgtaacgttagataaaatatctaacgttataactaaaggtgcgacaccgactacgtatggttttgactggacagatgaaaattctgggataccctttttacgtagcgaatgcgtaacttcaaacggttttaacgacaaaggcatgagttttataccactagaagctcacaatgcaatggaacgttcaaaaatcgtacctggtgatattctaatgacaatcacaggtaacataggccgtattgcggttttaccagaccgaatttctgaagctaatattaaccaacatatagcctgcatctcaatacgagatgaatattgtagtgagtatgtatttcaatcgctgcatctagaatattattctcgttattatgaaagaatattaacaggacaagcatatccacaaattagcttaaaacaagttcgagagacccctatattaatgcctcctcatgaagagcaaaaagaaatatcaaaaattctttcatgtatggatgagaaaataaaacttattgaacaaaaaataatagaaacagaaaaattaaaaaatggaatgatgcaaaagttattttcagaaggctatggtgttatagatgataagggggaatggcatccgcataagaaatatttagagctatcgggagaaacatcacctgagtcatggattaaaacagtgctttcaaaagtaattacagtgaagagtggtgattcactgagcaagagcaaaatggaagaaggttctattccagtatttggtgggaatggtatatctggatatcactcttcagctaactttaatactaaaaaaatagtaatcggtcgtgttggggagtattgtggaacagtttaccaaacacctgaaaaatcatggataacagataatgcgttgtacgtccatgaaaaaaaacttgaactcaatgatgattttttatattatttattagagtataagaaactaaatcaatatgccaataggaatgcccagcccctcatttcaggaaaaacacttgaacgggtaaatatatcaattccttcatcaattgatgagcaattaataatatcaaaaatattattaattattgataaaaaattaacattgttaagacagcataaatccgaaacccagctcttgaaaaaaggtctaatgcaaaagttactcacaggagaatggcgggtaccgttggattgcgacgaagaagaagctgcgtaa

SEQ ID NO: 396678 - DNA, 3384 bp, Salmonella enterica
atgtcaggtaagactgcaacaactttcccggaattggatggcgttgagcgtccagcgattgagtggctaaagaaactcggctatacccatatcaagggatgtcatgttgaacaaacggtgcggacagagcccctgattctggaagaagtcctccttgaaagattgcatgcactcaacccctggctggtcgaagtctccggagcagcttcccgagcaattaaacaactgcgtgatatctggtttgaaaataacagcgatttgatgctggcaaaccatgctttctgggaaaacgtactgtttcagtccaacctgcaagaaaaagataaagagggacgcaagcgcagcgtccgatttattgaccagtccggtgcagcccacaaccgtttccacgtcgtcgatcagtatgtcggtaaaaataataatgctgtgccttttaaaccggaccttttgctgttcattaatgggctaccgttggcactgatcgaatgtaaagccagcaacgttaaactgagcaagggtatagcacagattgacggttaccagaatgcattcccacatcatttcgcatttaacatggtatgtggggcaatcaatcgcagccaggctaaatacggcgcgctttatgctccagagcagttttaccttaagtggaaatttgatcctaaaagacctgatgagcacgctattcttaatgaaattaaagagttactaggtaaagaacccacagcccaggacactttgctgtgggcattattcgaaccttctcgctttgttcgttttgtttgcttctatcctctgtttgaagttgaagatggtcaaatgatcaaaaaactgcctcgctatcaacaatggcgggccgttgagaaatccttgcgccgtctaaaggggaatgatccaaccttgccgggtaaatcacagggaggcgttatctggcatacccagggaagcgggaaatcgctgaccatggcacttctggtgcgtttgatgcgcgcagaaatatccaatttcgaaaatcccagcattctggtattaacggatcgcaccgatctggaccgtcagatccacaacacctttatcaatgtggggctcagggcgtcaaaagctgattcagtcgctggccttgaggcaatgttaagcaatgattacggcgcgatctttacctctacggttcagaagtttcaggaaagcgatggtaaacagatccaggcggcaaaagactctgaaaatagtgaggatacggatgaagagcagtcctcaaagagccgcgtcagacgtgtcttaaaacgtctggaaaacggtaaggatgaatgctggatagtcaaagaaaacaatcttaactttggtctgaataacgccagtggcgagcccctgaaagcaaaatggcaaaaagtcagcgaagaaaaagtggatttccgggttctcagtactaaagcaaacttctttgttatggttgatgaagcacatcgtagccaatacggttttctcgcggcctttatgcgcgcatcactccccaatgcgaagttcatcgcctttacaggtacgcctctgttcaaagaagacaaaaacacccttggcgaatttggcggcaaagaatacatcgatatttatcgccttgatgaggcggtggcagatggcgcaacgttacccatcaaataccaggaaggtatggccgaatgggccagtgatggcaatctgaaagaagcgtttgaaactgagtttggtcaggaatctctggcacgcaagaaaaaactgaagcaacagctgctgaaaaagcgccggggggccatcagtcgcattgaacagaacgcgaagcatttgattgagcactttcttacgagcgtaaaacctcgaaaatttaaggcgatacttgtctgtgatggccgggatatggcggttcgctacaaagatgttatcgatggtctgatggcagaacgccaggcacaaaatttacccacattcgacagtaaggtcgttatttctctggggagtatgacggataaccgtactggagcaagcgagcagcaagcccataatgccacaggcgcacaaggggttctggagacgatagaagagagagtaaagcgcgaggctaaagaagggaaaactccggttgccgttctgagcgatgatattcccactttggtcaataccgaattcaaactgccttatggtcacgaagcagagaacaaacctgatggacaagccaggattaataacattggtttgatcatcgtttccgatatgctgctcactgggtgggatgcgccgattgtcagtaccctctatcttgataagccgctgaaagaacataccttacttcaggctattgcccgtgtgaaccgtacccgcaagggaaaaaaagcaggttatatcgtcgattactacggtgttgttgaatacctggatgaagcgctcaaaatttatggtggcgatgttctgcctgaacaagtctggaccgatgtagaatcggaactgccaaaacttaaagccgcgctgagcaaagtagaagatattctgccgaaaaaacacaatctacttaagcaccctgaaccctataaagaggacgccgatctatatttagatccggacgtacggcttgatatcgtggaagatttcctcgttgctcttgcggagttcaatggtcgtttagatattgtattaccggatgagcgcgcagccccttttaaaccttattttaaggtattcaatgaaattaaactgcagttgctgaataaaatgccggacagtgcggataaggtacgcatcaccgcttcagaatcagaactgcttaagggaatgctggacgaacacattgaatcaagtgaagtcaaaagcctgctgggacgcgaagtctctatccttgatgccgccgatatggatcttctgcgtaagcaaaaaagtaaaggcagcgcagcgctggtgatgaagaataaactgaagcacacgatcagaaccggtaaaggcaaagatccggcgttcttcggcgatcttgaagaagagctcgcaagactgatacaagaagagcgggaaggccggatcgaacaggctctgtttctggaacaactggaattgttcgcacagcgtatcagagacaaagatgcgaagcccagcgaaatggggttgagtaccgcaactgaacgggcaacgttcaactatttgataaaacaggttgctgaagctgaagccctggcgtggacgaaaggattattcaatcatccagatattgcagccgtcatgcgctctcctatctggaagaaacaaagtgacatccacaatgagatcaagaaaacgatacgcacgattttacgcggcctggggggatgggacatgaccgttgcgcgccagcacaccaatgagatattccagataatgctgaacaactga

SEQ ID NO: 396679 - DNA, 702 bp, Salmonella enterica
atgcccatttttcaatacggcaccacggctatcgagtgggagttcagggtcgactcaagactcggtcatcactacgtgaccgtggaacgtggccataaggtactccttcgaggaccggatgtgtcgttgcaggaacagcaagagttgatacgctatcgcgcccgatggatcaagcaacgtctggctgaggtcaaccggccattgaaagacgagatcgtgacgggtagtcgcttaccttatcgtggtaaaacgttctattgtgaagtcattccttcgcctgagctcacgatacccaaaattacattcaaccaaagtcggttcaaggtgttttcacccgagggccattctgtaagccgtcacctttttaaacctgcactggacggtttttacaggcagaaagcaaaagagaagctgcatacgaggatccttcactggcaacgagaaacaggtctaatcgcaacgacgtggagaattaagcacttcgatgcgcgatgggcaaactgcacggaaaacaacgtacttgaattccatccccgttgtatggagttttcaaatcgcgtaatggattacatcattatccatgagctgtgccataccgttgagaaaaatcacgataaaccattctggttactcataaagaaatattgcccagaatggaaagagctccatgctcaagttgaacatcctgaaatgcaactgtag

SEQ ID NO: 396680 - DNA, 1020 bp, Salmonella enterica
atgatttggttcgcgctcttgtggcaaactacgaacaggatgatgttgagactaagtttttggttccgcaaaaaacttatttatcagcttaatgtgataagagcgtacttatcggggttttttatgttctataattttgatttttcattattaaacagtaaatgggttaaagaagatacggtaagggaagagttgatttctccgctattaaaggccttgggttactctatttctggcaatcatcggatcatcagaagttttgcactcccccatccatatgtttatattgggacaaaaaagaataatattaaaatcatccctgactatttactgatgatagatggcaaacataaatgggtcttagatgccaaaggcccctctgaaaatattttatcaggtaaaaatgtcgagcaagcgtatagctatgctattcatcctgagattagggcctcagtttatgctttatgcaatggacaccagatagctatttttaatataaataaaaccgatcccattttaatttttaatcttaaagatttaagtcgcaatctcaatgaattaaaaaaaatattatcgccattggcattttcaaacccacgtttacttgacttcaaacccgacttcggactagctttgcataaacttgggtatccgcttggagatatcatatctttcaagtccttaggcttaccatttattattagggtcaatgacgatttatactctgctgtcgtggaaattggcccgatcagtgagggctttaatgacggaacattctgtctctcgttggactttagtaaaaaaatgttggataaaatactggcaaaaatagataacaaaatagcgaacaagattaaagaatctttgtcacggcagccatactctattgaaatactggagggcactccagtgctgaaaatcaatgcaaaaataacaggggaaatatatgagaacaaagatgaacaatatagccctttaagaataatagatattgatcatgttagtcctgttgatgggtag

SEQ ID NO: 396681 - DNA, 213 bp, Salmonella enterica
atgttttcttacattatgccagggaccaatgatctgtcacgcgccattacattttacgatccgctgatggatatactggcgtatcctcgcggcggcacggacgagggggcaccaggcctacgtccgcatttcggcgaagatttctacagcgcttacgtcagagatcccgatggcaacaagctggctttcgtgtattacaccgcacaatcctga

SEQ ID NO: 396682 - DNA, 609 bp, Salmonella enterica
atgaaagctacatggaccgtcacgcctgtggggtatcagcgcattgcgaaacgatgcccttcttgcaagattaaacgggacttcacgccgtcaggtgcatttcgggttaattctcaaaagaagctgctggatgtatggagtatctataaatgcacacactgcgattacacctggaatatctccctgttttcgcgactgcacgtcagcaaaatcgaccaccagctttatcatcggctaatgacaaacgatgccgtcacggtacagcactttgcaagtgatatcgcgatactgaagcggaacaacgcagagctatcgggtcggcctgattttaccgttcaggagcgctggccggtaagcatcaccatccaccagtgggtctgcgttaatgtcaggatttccggttcattccaagtcagcttgttgtcgattttgaagcagcagctcatgctgagcgctggtgaaattcagagaagggtggaagcagggcagatcagcggcgttacgatgaagatacttaaatcgagaaagctgaaggcagcggaatatgaattccagctgtctgtggaaacgttatatgcccggcgcaggattgttctgacacgtcgttaa

SEQ ID NO: 396683 - DNA, 225 bp, Salmonella enterica
atggaagacagcatcatgacagaacaaatttctttgctcgatgaccaactggtggatatgcgcttcatcacgaagcttacagggctgacggacaagtggttttacaagctgataaaagacggccagttcccgaagccaatcaaactgggtcgcagctcccgctggaagcaaagtgaaatcgaagactggctacagcaacgtattgctgattcacgcggtcattga

SEQ ID NO: 396684 - DNA, 717 bp, Salmonella enterica
atgacgcttcaggagcggcgacatgaccggcttgccgtcaggttgtcgttgattatcagccgtctggtgtccggtgaaactctgtttattcgcaaactggcaactgaattcggggtgtcagagcgcacgttacgtcgtgactttcgggaacgtctgatgtatctcgacctggattattaccaggggcagtgcagtctgtgctcagatattcacagtacgcggcaggaaatagatattctgacctttgctcaccgcacagggttggccggggttttcccgggctttgaccggcgactggtcagcagcctgctggactgtgatgagcgaccctgtctggtatggcatcaggacagacctcatcccccgtcaggaaagctctgcttctacaggctgatcagagctatttcgggatgtcagcgcatcaccattctgactgaaggggagcgtcatgaggccgttgcaccttaccggctaatcgctctggacggttactggtatctggtcgctgaacataacaggcaattacgtgtcttccggctggatgagattcaactggtaaggccatcccgggaaacatttattcgcagtgagcttctccatcagctgtcggaggacaaacattttatctcagccttacctcatttccgttttattcaacagtcgctgaattcattttctccatcagaaagtcgggggcaatccggacaaactgattag

SEQ ID NO: 396685 - DNA, 453 bp, Salmonella enterica
atgaaaaaattgaacttattgtctttactgccagtcatgttgttccccttacttatcgcaggtaatgctcacgcagcacgtccttatagcgggttcctgcctgcggcagtgaataataagagtgggaatatattctggtgtgatgcccaccgacaggtcagaaaactgtgtacagcgacggaagtggattcaatgggatggtttattgttgttcgctcgaaaccttccagagattgtccgggtggcatatgggggtggatcactcccagtaaagacggtgtagcaacaggctatacgattacgctaggtaaagaattcaatctcaccatgaaggatatgtgcagtccggatatgaaagtaacgttccgcacgaataaaaaggaccctcgttatgacgatctcgtcgggatttatgccgggaaagaagcgtttagctacaaacaaataaaataa

SEQ ID NO: 396686 - DNA, 474 bp, Salmonella enterica
atgcgactgccttacgtaatagttacattagctatgctggcttctgtatcaacagcacaggctattcccaatatgtggacgagtggttttgggatgggcgtgaccgaatatatcattaccagcccggataaggtggtgtttaatctgaactgtactggtaatccggatgcgcagaatattctgcaacacggtgttgatctcaccctgcctgatggaacatcagtaagttctcatgacgacgggacggaaataacggtcgtcatggatgacagtcagttcccattaccttcatccctcggctggaggaatggcgataatgcctgggtgtcatttattgacgcactggggcaggcagcaaatttcgatgtttatgtcagcgataaaaaagtaggcactttcagtccgggtctgaagaatacgcaaaaagagctgtctgatctcagtgagtgccggaccacacactacagcgattag

SEQ ID NO: 396687 - DNA, 441 bp, Salmonella enterica
atgaatacacaaaatcatcagttcgcggagcagactgcaattactgcctcggtggtccctgacgagctacgcatcggcttctggccgctgcactttggctccatcccacaatggataacccttgaaccacgaatctttgcctggatggatcgactgtgtaccgattatcacggtggcatctggagtttttatacactcagcaacggcggcgcatttatggttccggagcccgacggtgagaaatggacgttgttcaacccgatgaatggcaacggcgtggagatgagcggagaggctgccggtattgcggtctgcctgatggcatacagccaccacgcctgccgcaccgagtgtgacgcgatgactgaacactattatcgcttacgcgactacgcgctgaaccatccagagtgcagcgccattatgcatctcatcgactga

SEQ ID NO: 396688 - DNA, 918 bp, Salmonella enterica
atggcgtcaaataattatgggtatgaagattttgaagcatttacgtatcttgactatcacaaccttgctgtatcctggaatttagcgagaggagctttttgttctccctcagaattaccatctaatgaatatagtaatagcttcctttccgttgctattgccggaatgctatcaaataacgttcctacaaggctttacagcgaattagccattgatagtgttagagaatatttatttcctgattgcgtatcaagattaagaggtttttttattttcgatgaaatagaatcaatatctagattttggagttgtaattcttggggcgggcatttttctgatcaatatttatctgatgtaggtgtggcagcaactagatctaccagagtagattccaattggatatctcatatagttgatgtggatggcagactaaaagaaggttggcatgagaatacagttaactattggcgtggagatgcgtttccaggttctgaacctatatgggaaaggatcgtcgaaggttatttaacggtttggagtcccgttgttaggaaagaagcaatattagaaatagaggctgtttggccaaactctttgaaattattgaactattcttgcctgtgtgctgcttatggctctttagatggaatgattttcccatttttgatgcaagatgatgaaggtaatattaaagttacctatatatctagaatggttcaagctaacgacaaaaatttcattgaaacgattattgaaaacgcaaagaaaatgcctccctttagtattaacttgaacgatacgacaactaatgacgaagagatcagcacacctgatctaacctttttgaatgtctcactatcctctgacgataattgtgcttttgccgactttgttaaactcatgagtcactctcaatga

SEQ ID NO: 396689 - DNA, 246 bp, Salmonella enterica
atgattgtaaccagggaaagtatgaaaaaatggatcatcgagtgtcttcaggaacggggtggtagtgcttggccacgtgaagtctcaaagtatgtatgggacagctacgaggctgagcttagggattccggcgatatgttgtatacgtggcaatatgacattcgttgggccgctcaacaattgagaaacgaaggtactctaaaaccagtaaatagacgcagagatttgccatgggaactagcatag

SEQ ID NO: 396690 - DNA, 207 bp, Salmonella enterica
atggaacgcttcttcaggagtctgaagaacgaatggatgccggtggtgggttacgtaagcttcagcggggcagctcacgccataacggactatatcgttggatattacagcgcactaagaccgcacgaatataacggtgggttacccccaaacgaatcggaaaaccgatactggaaaaactctaacgcggtggccagttttagttga

SEQ ID NO: 396691 - DNA, 1071 bp, Salmonella enterica
atggaaaaaaacaaaattcttcaaatagttccatttgccaataaaggcggggtggagtcggtggctaacaatctgtttatcaacccacctgcgaatagtatcattatatatggttatattaaagattctcagataacgtgtccagacaaaatatttctcaagagttttttttcattatttaaatatttaaataatactaaagttaatgtcatacatagccacgttttttcactaagatggatgatatttattagactttgttcattattctttaaaataaaaataatcactactttacatagtgattttggtatcatagatagcaaggtttcgttgttaaagaaaggtcgtcgattattttttataaagatattacattatttttcaaaaaaagctttatctgataaatgggttgcaatatccgactctgtggaaaatctacttgttaatatattaaaaatagaagagaaaagagtcataaaaatatataatcctgttgataatacaaatgttgatgttaatgaatcatcaaatcgtaaatatatggtttttgttgggagagatagcaaagagaaaaacgtaaaagatttattatatatttggaagacaatacaaagtaaatatgcttttatcagtttagcattaataggaattgatcctgattctgagagtttgggttgttatgaagacctgaaaagtgaaagagtgctggcacttggttggcttgataatgccagtaaaaatatctacttgaaagatgcacttattcaagtaataccatcatattttgagggcttttgcttggctgcagttgaggcccttgaaaaaaatattcctattataacgtatgatttacctgtatttaattaccttaaaaaacagttcaatggagttcacattgcctcctcctttgaacgggataaattattaattgaatcttatacagcaattaataacatactagctggatatggaacaataaataataaaaaaaatatcagtgtgtatttttcacaaaatgattttatagacagacatcataaattatataaggagttaactaatagatga

SEQ ID NO: 396692 - DNA, 1221 bp, Salmonella enterica
atgaaaaaaaatataattttttctatccttagtacgggaacaaactatgtactaccattattagtcataccttattgtatatctagttatggtttggatgggtatggtatcatatcattaaccttagcattaacatcaattgtcgcattattaactcaattgaatttagagaatacatttgcgtctttaccaattgctaaagatggggccactataagcaatataataattataaaattgattatatatatatctgtagtcgcaattatttatttgctcacactgatgtttattaatgaaaactcttttttgtttatcttaggtgttttgccattatttttttgtgtcacgaatgtaaattattattttatagcacaacagaatttcaagatgatattttatttgaatgttctatcaaagttattttttacaatagttgtcttcatagttatatatttaaaattaccactatcattggtggttatgggtatgaacggctggtatacaacatcttctgtggttggtttattccttctaagaaaggttatcagagatagcccgataaaagattcagagggggcaataaatttaaaagagggtatatcactttttaaaatcatcatgccaggttttagctcatcactcgccagtttgtttttgacgatgctggtacagccatttatggcaattgtcactagtaataattatagtataatcgcaatttattctatttgtgataagtgtatccgagccgctacgggatttttagattcaataaataacgttttatattctaaaatatctagtttagaacagttaattgaaaagaaaaaaatagtttttaaagctatgactttctatttattaattgagttttttggattgttgctactgtatttactatttccatatctgacatcatatatcgaaaaatttagaaagtaccaagacctattaggtttggtatttttaattacaccaattattatggttattacattggggaatatattttcatcattgattttatttactagcggtatatttaaggaagttacttatactattattctatcatctgctatatttatgacaataatatttatcccatataatttaaaaaatatagagtattttctgtttgctttgctattgtctgaaggaatttcaactattttaaaaggaatgttagtatggaaaaaaacaaaattcttcaaatag

SEQ ID NO: 396693 - DNA, 573 bp, Salmonella enterica
atgactcaacgacgtgatctacaagcccttattgatgccgcgcccgtcggcaaaatgcagtggcgcgttatcatctgctgttttctggtggtcatgctcgacggtttcgataccgccgcgattggcttcatcgccccggatactcgtacccactggcagctaagcgccagtgaactcacgccgctgtttggcgcagggttgctggggcttacggctggcgcgctgctatgcgggccgctggcggatcgctttggccgcaagcgggttattgagctttgcgtggcgctattcggcgcattgagcctgctttccgctttctcgccggatatagaaatcctggtgctgttgcgcttcttaaccggtttgggactgggcggagcgatgccgaataccatcaccatgacgtcggaatacttgcccgctcgtcgacgcggagcgctggtcacgatgatgttctgcgattttacgctggggtcggcgatggggtcgtatggcgtggatctgaactgcggctggactaagtttatgaaggatcaacttagtacaatagcttcatccaataatttgaactag

SEQ ID NO: 396694 - DNA, 138 bp, Salmonella enterica
atgcagcacgaagcccgtcgtctgcgtgcgaaacgctggcaggctgaaaatcaggaagggatggccgaggtcgccctgtttattgaaacaaacggctccttaggtttacggttaagctgtttgtccgcagtggcatag

SEQ ID NO: 396695 - DNA, 1641 bp, Salmonella enterica
atggtatttgataaaacggtcagcctcagttcaccatttgctattaaggccggtgacccgattgggcacatgggctactatcaggcaccaaaggatgggggttatgaggcgagatatcaggtgcatattgaatgtaccagcatggatgacaacctggagaaattcctgaccaactctgaacgggtgggagaaaagaatcccctctggctgaagtatgacccgggccttgctctcttcactaaaggtgtcgcgaaaggcacctttacaaagggggcgacgtcgacaactcggacgggtattcttccgttgagtaaggtcaatactgaaactgataaatcaacaaaacaggaatactggcagctgcgacctgaaaatgcctacgtgcctaaaggcctggcagagcctcagcttttgtcacagtatgacctggccaaactgggtttcagaactgaaaccgcagagcctgccagctttgactacctggatggaaaaaaacagcccattggatttttccgcaaccttatcaactcgctctacgaggctgctaccggtgatacgcgaaccagtcatgccctggtgaagcataattaccaacgtctgctggataaaattgacagtggaagcgaccgctattctccaatggagtactggagagcgctgcacaaccccgactatcgggacgtcattcagaaaactatcgtaaaacatcccagcgactggtacttcaaaaaaggcgatgctatctggcaacctttcttaaatgcactgaaaaaagaggccccagaatggaagaaatacagtgaggattttcttgataaaatggcatggatgcaggatgtcacgactgaaaaactgggccccacgttatggcatatgcatccaataatgtttttgggaaccatacttcaacggcaaagatacgtcatcaaatatacgaattattcttctactcttgatttggctcttgataaacaaatggctttagggagtcgaaacccattacatggaccacagattgggactaaccttggattttctcccgttagtagagaaagggtatcatcttattttgatccaataaattatgaaataggtgaaaaccctaacatgttccaatttatgattttaacctcttatattggaatccctaaatcagcaatagcatcagttctgaaaggtcaaggaatattagatggcaaagaagatgcttttattcaggctgcaaaagaaaataatgtgaatgagatgtatttggttgctcatgcaattgttgaaacgggacatggaaccagcacccttgccactggcaatcggtataatggtcggacctattataatgtgtatggggttggagcttatgatggggtggcagtttcagaaggtactcgttttgcagcaaaaaataactgggatactccagaagctgcaattataggtggcgctgcattcacatcaacgaattttttctcccgaggtcaggatacactttataaaatgagatggaatccacaatctcctggcgttcaccaatatgccactgcgattaactgggcagagacgcaagccagtattatatataagatggcagtcaaatccccagataatacaatctattttgattatccaatttatgcgagatga

SEQ ID NO: 396696 - DNA, 177 bp, Salmonella enterica
atgtttaagaatgtagatacgcctgtagacgcagacaaagtttgtggagaggccgagaatccaggtccagctaaagatgaacctgatttgttagcagtgggagattcgtcgtcggttttcgacctggctgagatgacaaaattcagccaggtggtccgtaaatcatttagcgactga

SEQ ID NO: 396697 - DNA, 615 bp, Salmonella enterica
atggcctggatgcaggatgtgacgactgaaaaactggggccttcgttgtggcatatgcatccaataatgtttttagcctctctaattcagactaatgaaaatattagaatacttcgtttacgtgcatttctacgaatgatccgcattggtgaggggaccattcaggaagacggatacagaacgatgtttactggtgcaaaatttacagattttagtaaacaccccaataccaggcatgaagctaatggtgttgtttcgactgcttctggagcttatcaatttttatacggaacatggagaaatctgcaacgtagatattcattcccagatttcagtcagagcaatcaagatctcggttgtatagcgctcattgcaggtcgaaaagctttagacgcagtaatgcaggacaagattagcgaagccatacatttatgtcgcattgagtgggccagtttaccaggttcgcctcatggtcaaccaactgcaaataaaaaaatgattatgggaaaatatgaagactacttggctgaagaaaaacaaggtaagacaagtttacatgccacctcagaagaaatggtaaaattcattgaagataattatccggagcatttatga

SEQ ID NO: 396698 - DNA, 393 bp, Salmonella enterica
atgcctgctcgccaggtatgtcagaattttttccgcgatgcattagcaccgcttcacaaataccgacaaaatgctttgctggatgccaccatcgtactcatcaatggcgcatctctgacgctgacaagtatcgggcgttatttacccggtacggctcaggtcaaaaataaaatcaaacgcgttgaccgactgcgcggtaatgaatctctttaccgcaatatcccactgattttcagaaatattattgccatgctgacgagccagttatctctttgtgtcattgctgttgactggagtggatatccatctcaggagcatcacgtgctccgcgccagcctgatttgcgacggatgttcgatacccttgctgaggtggatagttccttcggagtaa

SEQ ID NO: 396699 - DNA, 273 bp, Salmonella enterica
atgcctaagcgacgtgcacaggccagtgttcaggaacaactgagggccatcaatcccgtactggcaaacccgaaagagttcagagccagtctgaaacgtcactcggcccgcagcacgacgatgcccggtttcgcgcgcatgtattccagaaacggcgaatccaccacttttctgttggcggccagcgaagaggcatttctgaaccatacctgcccgtcgtggcgaaccacgatacctacatgcgaaacgtccagtccttcaagcggagagtag

SEQ ID NO: 396700 - DNA, 300 bp, Salmonella enterica
atgcccgctgacgcgatactgcgcgttcagaatgcgttcgtgacgcaggcgggcgaaaaaagctccggactctgtactttcagcgtcacctgccgtcaggaagggttccgcgtaatgatacgtttccccggtcgtgatcccctctttgctgaaaatactttcggcgctgtcctgaggtttcagcgcttcgcggtagttgtagtcacgggtggcgacacttccgctcaccacattgtaggcagtctgaatatcccagatgctctcctgcccgctgtcactcatcccggcctggttgcgtaa

SEQ ID NO: 396701 - DNA, 195 bp, Salmonella enterica
gtgcaggggaacactactgtacttgagaataacccagacagcctgcttaatcagcagatcctgccggttctgagccagcagctattaagccatatggcggcaaaacaaaagccgtcctcgctacagctgacctgggatgatgaagagggcattgtgctggcgtttgatgcacaggtagaaggagagccgtcatga

SEQ ID NO: 396702 - DNA, 279 bp, Salmonella enterica
atgcttcaccagggcatgactggttcgggtatcaccggtagcagcctcatagagcgagttgataaggctgcggaagaaacctacaggctggttttttccatccaggtagtcaaagctgtcaggctctgcggtttcagttctgaagcccagcctggccagatcatactgcgacagaagctgaggttccgcctgccctttgggcacgtaggcattttctggtctcagttgccagtactcctgtctggtcgacttatcggcttccgtttgcacctgacttag

SEQ ID NO: 396703 - DNA, 861 bp, Salmonella enterica
  misc_feature (666)..(675): n is a, c, g, or t
atgattacaaatgtctctaaacctactttctctggcgagggtgaagtaggagacacaattaccgtttatgtggatggtaaaagctatgcgacgacaacggttgattcacaaggaaattggacatatgaattttctaattccttaagcgatggggcgcatagtatttatgttgttgctaacgatgctgctggaaatagagccacatcggatacaatttcactgactattgatacggttgcccaaattaatacgccaacactggtttcagatgatgggctttataataacgataatatcacaggcaataataaccccggttttaaaatttcaggcgaagtcggtgagacagttattatctatctggatggtaagccggtcgatacgattgttttaacgcaatcatcgcaaaattggcaatatactcaaacattagatgatggtgtgcataccttacaatattcagtcactgatgttgcagggaataccagtatttcagatgttacaaattttacaatcgatacacactatgatgcaacgcttctggtgacctctgttgaaggagtacaggttactgcaaataccgatgtgatatatattacagataatcctgcgacaatttctttaaacggtgagggggaggccgatagcaaaatcactatttatatnnnnnnnnnnatattgatggggtacaagttgcctccgtattggccgataattcgggtaactggcaggcagatattgattctggaaaatttcccccacaagagaacgcctcagtacaaattatttcggaagacgttggtggtaacacttcagaagttgattacaccattcgtgttgataatcaagttgatggtctga

SEQ ID NO: 396704 - DNA, 1938 bp, Salmonella enterica
atgctgaaaaaatacagagcggatattgatggacttagggctattgctgttcttgcagtcatagtttttcatttaaatcctaaccttctacctggtgggtttgttggtgtggatatattctttgtcatatcaggatacctcattacatctatcatatataatgatgttaaatctaactcatttagctataaaggcttctacaatagaagaataaaaaggattcttcctatattttttgttgtcctcttcgcaaccataatagcctcagccttggttatgatgcctgaagattttaaatttatgatgcgctctgcgttttctaccataatcttctcttctaatatattcttttcaactaacgttaattacttcgcacaagatgtaaaggagtatcctctacttcatacctggtcattatccactgaagaacaatattactttatattcccaataataattttcttattagcaaagcttagcggatttaatgtaaagagaatacttgttggactttctgttatagcgttagtatcattttccttagcaatctattctagattcaatgctgaattatcaaaatttaattattattacctgccttctagggcatgggaaatgatgattggtagctgcattgcagtatataagtcgagaaatacaaatagctatagcaatcggcatatgcctttgattggtgccttggtaattgctatatctttatttatatcaaaagaaaatttttatccaaatttttatgctttacttccttgttttggtgcggcttgtatattaattcatagtggagttaaaaataatttcacaactaaaatattatcatccagagttgcttcaactttagggttgatgtcatattcaatgtatttatggcactggccgataatatcaattcaaaaatattataatattgttgggaatgttccaattaaaaatgccgttttttcttttattgctacaattgttctgtcttatgtctcgctaaaattcattgaaactccaataagaaaatcaaaaatatcatttaaatcgtctgtgatagttatatttttgttgccatcactacttattacatctatattcatcatctctgagaaaacaaacggaatacctcagagatatggtgataagtggggtaatatgtttctagaaacagcttatctatatactccattctgtcacaatactgttataggtgagtgtgtatttggtgatacaaccaagaagcccagtttcattgttatgggagactctcacgcaggtcattttgttcctatgattgatgagtactcaaagaagaaagggattgcgttcgaggagcgaacagtagacgcatgttatccattgataaacacagaaaacaaaaaaccatctgattttggcgggattatttcagaaaattgtagtaataacataaaatacttttcaaagcgcatcaaggaatataatgacgtcgttttaattggagcatggagcctttattttcacaatattcctgattttgattcaatgctgaaggatacaattttaaaattatcctctgaagggaaaaacatttatattttcgagcagataccaactttcaaagatggttcttacatacatttatttagacagcgatttgcaccttttggcaacacaatggatttgtcatcaattgacttctcagccatgatatcaccaagagatggtggtaacgttgattttaaagatggtaatgacaaggtatttaacattattaaaaatctaaaactagataatgttcattacattacaccaatatcaaacatacctgaagttgctaaaaaatttcctgtttacaatggaaggctgatatacaaggatgacgctcattttaatgaggttggatccagagatctaataaccaacaatcctggaatgcttggtgatttcataaaatag

SEQ ID NO: 396705 - DNA, 501 bp, Salmonella enterica
atgaaaaaaacaatactaaaaaacataatatcatttaatcaatcaaaaaaaatattatacagaacaaatgtcatcattaccgataaaataatcacagatataaaaacttgctttgataaatattatgatgtagatgatattttccctggtgataattatatagtcattcatgggatgcttatttttcatgaaatacaactcaataatggtataaaaatacaaatttactttaataaaaacaaaaatattttaattcataaccatagaaaaacccatgaaaagacagtaatcaaaatattaaccacggatattttccgaaaaatagaaaaaaatattccagctaatttatttttctttaatcattctaatcttaatacaaacacacaatactcacattcacatcttattgattttattaataatacatctccagaaaaattaatgattaacggtataatttttaatgtaaaaaataatcaaggattacagggcgttggatga

SEQ ID NO: 396706 - DNA, 459 bp, Salmonella enterica; identical to SEQ ID NO: 391710

SEQ ID NO: 396707 - DNA, 894 bp, Salmonella enterica
atgcttaaaacttggaatgatttagaaagttatacccaatacgtctactcgaccttgcttaacccacgagataatggagtggaagttaggcgtaacgttgtccttaagggattaaaaggtgaatatcaaattgatgtattttaccaatttgaaaatgcaggctttatacatcgtgtagcgatagagtgtaaatatcacaatcgcccgcttgatcgcgatactattatgccattttgcaacaaaatcacagatattgggaatattatcggggttatagtcagtaagtctggttaccaaagtggcgcaaaagaatacgcagaaaaacatggtattactttactgacaactgaagatttaccaaaatttaacatattggttgccgattacttgctaaattcaattttacctacaaaagactggatcggtgagcctttttggattttgatggaaagagaggaggataatgtttcaggttcatactacaagttttcagaaaaacataacggaagagatgtaatacccttattcttttcaaagcgtgaagcaattgactttctaaatgaatctgagcagacacagcattttgcaataagaggtgttccgcaacattatttgaaacgtttgatcgcaataacagagcggttaaaacctttattcttcttaatgcttcctgttttgaatgaagaacaagccaaaggtttattaattgaaccaactgaattaatgaaaagatatctactatcagaaatatcacctgaggaatatcaagagttttacgttaaaaggaagtcgcgttacaagaatgagattactcttttaaaaatattaaaagcaatgaaaggtaaaattggtacagaattggccgagaaaatttcaaaaaagaaagaaaagtaa

SEQ ID NO: 396708 - DNA, 477 bp, Salmonella enterica
atgatgattgataccggagacgtgtccggagtgccggttaacggcaacagcggcgtgaccaaccacttcggggtggccgtggtgagcgcgggcagcagctatcgcccgggcgacgtctccgtggatgtgtccgcgttgccggacggcgtggatgtggctgacccggtggtcagccaggtactgacggaaggggccgtcggttaccggaagatagacgtcagccagggcgaacagatatacgggcatatccggctggctgacggcacaagtccgcccttcggcgcgcaggtggtctcggagaaaaccggtaaaacggcggggatggcgggtgataacgggctggtctacctgacgggcattgaggcttcagagcggaatgctctggtcgtgacatggggcggcaggccgcagtgccggctgtccctgccggagaacgtgaatctcagccagggggccctgctgcttccctgccggtaa

SEQ ID NO: 396709 - DNA, 168 bp, Salmonella enterica
atgaaggtaaggttgcgacagggtattctttcagtattttatgcccattactgtcttctacagttaccatcaggcttccattacttactggagaaacatcctccaggtggtatggcccaggcggaacaacccgggaataaattgtgtaaccactttgcgttatggtga

SEQ ID NO: 396710 - DNA, 570 bp, Salmonella enterica
atggattttttggttattcttcaggctccagaagccgactggctagagctggcacaaggttgggcacaaattgatgtacagcgtgagcggttagcattacaagccgcgcaagctttagaaacgtcaaatactattgaaagtgctcattcaaaattgattcgtgccagccatgaaatatatgccactcgtttccttccgggataccaagtaatttatatagatgatggtgatggtgaccgtattacaacagagcaaaaacaaattttagcagaagctggagtaaatttgacgattaatgactcaatgcctgatgtattattatggaatcgtcagagtgattatttgtgggttattgaagctgttaccagcgatggtgaagttgatattcataaaatgaacagtatgaactcctttgctcagcgaaatggtaaaaaaggcattggattcacaacgacttatccgacatggaaaaaagcagcagaaagacaatctgcttttaaaaaccttgccggaaatgcatatttttggatatcagaagacccttcgcgtgtctttaaaatttttcaatga

SEQ ID NO: 396711 - DNA, 219 bp, Salmonella enterica
gtgatttccgcctcttccaccatgattatcgacggtatcaaagctgcattacttaacgacctggtgtcctgcccgattgaagggcatggcgttaaccgtattgtgggtacgtcgccggaatggcagtcagacagtgaacaggctgcttttgatggtgcgcagtgccagtgcggctgcacggtgatcgccagcgccaccggcggtattctggggagctga

SEQ ID NO: 396712 - DNA, 324 bp, Salmonella enterica
gtgcaggttttgtatggttcaatttatgatgttattgttgatttaagaaaagattctagtacttatttgatgtgggaagggttccatttggatgcaagagagcatgcccagctttgggttcctcctggatttgctcatggttttttgactttgtcagactccgtttattttacatataaatgtaccgaatattatcgaccattagatgagtgctgtttattatggagcgatcctgaaatcaatattgattggcctattcctaatggtgagctgattgtgtcagaaaaggacgctaatggattgtttataaaagattttatgtaa

SEQ ID NO: 396713 - DNA, 357 bp, Salmonella enterica
atggtgcatctgcaccgacagtccttcccccggcttgacggtaatacgcttcacctgatagcgctcgcccgcgtcgatggagtcgtatttgccccacggacggtaaacctcgcggtgcatgtggtgctcatggcgtccgtcggccttgatcttctccaccaccttttttacgtcctgcaccgcgtggcgatcggcaatcagcaccgcgtctttggtctgcaccaccaccagatccttcacgccgacggtggtcaccaggccggattcggcgtaaacgtagctgttttccgttttatggctgatgacgtcgccgtgatggacgtttccctccggggtgtgggcgctgatctcccatag

SEQ ID NO: 396714 - DNA, 321 bp, Salmonella enterica
atgaaaaagaatgcacttgataagcttgacgagcacctggaagaaataatctatattgttggttttttgttgatggctgcgtgggtggctttttgttgttggtggttctttattgactctgatttgtcgcttctggctgggggattgtcgttcattgtgctgactggctttttatgggttgcgatgcccctgattggcgggccgctggcctttttgattctggttgcgctgggggtggtgtatgcgctctataaattgttagtgatgttatggcgggggatcgtgcgcactgtgcgccattaccgccgccatgataagtag

SEQ ID NO: 396715 - DNA, 315 bp, Salmonella enterica
atgccgaaacttaaacccggaacaatcttccctaccgatgaggaagacgcaaaaatccgtaaagcggtagcctctgatccagatgcaatgttgctggaagatgagaatattaaacttattccgtttaataagttaaaaagtttacggcgcaaaggtcgcccggtaactgattgccctaaagtgtctgtaaatatccggtattcgccggaagttgtagaagcattcagggcaacgggtaacggctggcagacgcgcatgaatgccgcgcttaaagactggctgaaacagcacaagccggaagacgttaaaatataa

SEQ ID NO: 396716 - DNA, 285 bp, Salmonella enterica
atgaaaatcacctttgatccaaacaaagacgcaaccaacaaaagtaagcacggttactcgcttgccgatgcaaagttgcttgattggggaaatatggttgttgttgaagataaccgtattaactacggcgaaatcagatatgtaggcattacctacgggattgcttacctcggtaatcgaatattttcggtctgctttaccgaatccaatgattttactgaatgcagaattatcagtcttcgccttgcaaccaaacaggagattagacgatatgccgaaacttaa

SEQ ID NO: 396717 - DNA, 225 bp, Salmonella enterica
atggctaattccgcacaatctcaagtcgtctttttgccgtttgtatgccccgttgatccggaaagcccgcagattatccagtggacacacgagacagaaaaccagctacttgaccgcgtaaaagccgcgcttgatgaagctggcgtagcctggattgactcgcgcacaggagaacgcagtaaacccgccacaactgacaacgtggagggttcagacaatgcgtaa

SEQ ID NO: 396718 - DNA, 165 bp, Salmonella enterica
atgcgtaataaccgcccctgtttcgtctggcgcttttattccggccagaactcaacctatttaaccacaaccgccaccagcgaacgggaggctcgtttacagcttcccgccgttcgcctggtatttgttgcccgtattcgtgtagagggggtgcctcatgtctaa

SEQ ID NO: 396719 - DNA, 363 bp, Salmonella enterica
atgtctaaatttaaagcgctggataatgattcacagatggttagcggcgacaacgtgcttttctttgataaagatgcatcgccttgtgatttatttgattgtgcaagttttcgcgttgaggcggtagcaaaactacacactgaattatcgttaatttataacgacaaaataaataataaacctataagtgaagttacaagccttttactttctgatgctgtttctatgtttcggatggcttctgtaaattccaaggaattagaaacagcacgtaaagaaatcgaccagtacaaaaaaactatcgccatgctttcacgcgccgcagccggagagcatgacgactcaaccacggagggcgaataa

SEQ ID NO: 396720 - DNA, 2352 bp, Salmonella enterica
atggcacgcctgataactgatattaaaaatcgcgctcgcggcttatggggcgatatattgccgcaacttggtattgatataccagccaaggacaaaaaaggcccttgccctatttgcggtggcgttgaccgctttcattatatggatgaccatgatgatggcgattggcattgcagacaatgcaaaacaaaaaaagtagacgggttggatctcgtttcacgcgctctaaaaataaccaatatagaggccgctaaacgggttggcgaaattatcggggctgatacccgttcaccagataagccagccagaaaagaagcctcagacggccagaaacccgcgccggatatcgcggcaaaggtggcggcaatgagccgcaaaaccaccccgaaagagtcgctttatctggctggcaaggggttaaccggcttcacgccgcccacgctcccggacggaaaaatattccttgagctggtggacgtaaacagcgcgccttgtggcgctcagaccatcaccccggacggggctaaaagctatctcaaaggcacgcgtaaaaaaggggcgtttatcgtccctgacccactaccggaagcgccggagacgattatcattgccgaggggatagcaacggccataagcgcgggtgtgctgcattctggcgcggttgtggccgcgctcgatgccgggaaccttaaacccgttgcgctggcgctccgtggccgctacccgaaggcgaaaatcatcatcgcggccgataacgactatcacgcgcccggagagctggacgaacacggcaagccgaagcgtaacgcgggcaagataagcggagaggaagccgccgccgcgtgcgggggctggctggcgttgccgcccggagaggctaaaacagactggaacgattatcaccagttaaaaggagtggaagcggccaaggccgcttttaatgccagcctaaaaaatatgggagaggaaccaaaaaaaacggcgtcttattccgcgcacctgaatttagagcaaatgagctataaccaggtgggcgatatattgatagagcgctacaacaacaaccttgcattaaacaccgataactggacggtttaccattattctggcgttatctggagtatgattagcgatgatacgttaagccttaaactggctaaaatattccgtgattcagattgcaaatattcaaaagcgaaaatcaccgccattattgaaacaatgaaacttgcattgcctgaattgggaaagccgcggcgtgaactcattggatttaataatggcgtttttgatatacacgcaaagtcattcagagcgcacaataaagaggactggcttttattcgccagtagtaaggattattcacccatgcagcaaggcgaatcgcttgatagcaacgcgcctaactttatgcgctggcttaatcacgcctcagccagtaatagcgagaaaacagaagccatacttgcggcgttgtatatgattttagcaaaccgctatgactggcaattattccttgaaattacaggcgacgccggaagcggcaaaagcatgttcgccaatatcgcaacgatgctggccggaaaaggtaacaccgtgtcggccagcatgaaagcgcttgaggatggattcgaacgcgcgttactggttgatgcgtctttgattattatgcctgacatgaatcattatcagggcgaaggcgcagcgcttaaatcaattacaggcggcgacgatgttatgattaatcataaatacgggcgtatttattccgcacctatccgggctgttattctcgcggtaaataaccgcgctatgacattcagcgataccggagggggaatagcacgccggagagttatttttaacttttccgaagtcgtaccggaaaataaacgagatccacgactgacagaaaagatagaggctgaaacgggctttattattcgctacctgatgaatcgctttaatgatgagcaggaagcgaaatctatccttattcgccagcgtaaatcactggaggcgctggagataaaacggcaggtcagcccgctggtggatttttgcggctatctcgttgttgcaaaagacgggcacgggatgagtttgggtaatatgggggtggagacattccgcccccgtcgctatctctatcacgcttacgtcgcctacatgcgtgcgcagaacctggacaaacacatatcagcgaaatcgttcggggaggctttgcgctcatcgctggccgaatacggcatagagtaccgcgcacaccgctataaagactatagagcatctaacgtgacgttaagcgaagacgctaacgaatggttgccagccatagaaaaaccatcataa

SEQ ID NO: 396721 - DNA, 711 bp, Salmonella enterica
atgaatttaattaaaaaggcacaagccgccgtaaacattgtaactgatttaacggcatcccttaccgaacaaaaagcaacgcttgaagcgaaaatagcagagaaaaacgatgctattaaaaagcttcttgatatgccgatgaaccttgatgatttttgttcgtttattcctgaatttgtcagaataagaggcgaatcattctatagccgacttggttatgaaaatcgcgaaaataatttaatgccgtggggcgcgattgaaaacgaaagcggcgaaaccaaccccggcccttattttttatcaggtcagggcggtgattgttatggtgatgcgggagtcgttgcatttcgccgcgagtgttttttccatcctgaaaacaccgttaaacgattaacggataaatttaaatcagagtttgcggggtcgtggggcaatgaacaattgccagccattgcagaacgccgcgcaacgattaaagcgttgcagacagaacgcgacgcaatacaggctgatttggatgaagttaacgccaacattaacggaatattaagcgctgcaaatggcatgaataaccccggcgcggcaattaaagcgccacaggcagaacgtgacgcggtagaggccgaattaaacggggttgacggcagtgcaggcgaaacaccggaaaccgaaaacaccccggatacaaccaatacaggcggcgataattaa

SEQ ID NO: 396722 - DNA, 393 bp, Salmonella enterica
atgaaagactatcgcgacggtacaagaaagagactaaattcaaacgtagggaacacaataaagggatttgtaggcgaactgacggaagaacttagcgtacatctggaaaaaagaggaataaagaatagtgacgcacacaaaatagcgaacgatgtagtagatacattgcgccagtcaatgggcggttgtcagttatatttccccaaactcaaccagaaagataacaccgggcgtaacgcggagatattcaaagaatacacgcgcggcgcttttgtgaatgagttagccgttaaatataacgtatcgctacaggctatttataacgccattaaaagagaacgtgagcgccagaatacaggcggcgcggcaaatgatgacagcgccgacctgtag

SEQ ID NO: 396723 - DNA, 360 bp, Salmonella enterica
atgaaaaaagttattttgagtttactgctagctgccagtttaccgatggcacatgcaggcgaatacgttaagcgtaatggtgctttatctttatcgtcgggaaatggcatcgctgaatttgatattaactcatcccatggtaatgcttctggggtgtgtaatatggaaggcgttgcagaatctgttggtgcgggcacagggcagcgaaatcgctgggtctatagcgattcatcgagcgcatgtgtggcggtgattagtgaattaaaagatggttctgttaatgttatgactcgtagttgcgataactattgcggcgtctctgctgttggttctatggatgggaaatatatactaaaataa

SEQ ID NO: 396724 - DNA, 294 bp, Salmonella enterica
  misc_feature (235)..(244): n is a, c, g, or t
atgaagattaaacattttttattaacggcagcttttgttatgcaaggtgctcatgctagtgaatttgcaatactgccattaagtaagttggtggatgctgcattaaaacatcagccatctgttgctatttcctattacgaaactgaaaagaaaaaaagtgatttagaagctacgagggcttcgctttatcctacattggatctatcgtctggtattaataataacagaaaagagnnnnnnnnnntattgaaaataaaatttcactatcgtatcggattactgattttggtgtaa

SEQ ID NO: 396725 - DNA, 186 bp, Salmonella enterica; identical to SEQ ID NO: 391716

SEQ ID NO: 396726 - DNA, 1437 bp, Salmonella enterica
atggctgcggaaacactaatacctgtaataatggccggaggcactgggagtcgcttatggccattatcacgagaactatatccaaaacagtttctttgcttgcaaaataacctatcaatgcttcaatccactatctcacgattagatggtattaagcatgccagtcctattgttatttgtaatgaaaaacatcgtttcatcgtcgctgatcaattgcttcaaatgaatcaattaaccaataatatcatattggagcctgttggacgtaatacagcgccagctgttgcacttgcagctttagtagcaaaaaataattcttcaaaagaagatccattattattaatattggctgctgatcatgttttcaccaatgaaaatgagtttcgcataactgtaagcaaagcgataccatttgcagatagaggtaaacttgtaacttttggtattgtaccaagtaaagcagagtctggctatggctatattcttcgtggaaataaattacagttagaagatgatattatagcatttgacgttgaacagtttgttgagaaaccaagtattgaaaccgcgcaggcttacgtcgccagtggcgattactactggaacagcggcatgtttctgttccgcgccggacgctatctggaagagttaaagaaatatcgtcctgatatattgatagcatgcgaaaaatcaatatcagatcttaatattgatcttaattttgttcggattaatgaggatgatttttatccttgtccagatgtatctatagattacgccgtaatggagcatactgcagatgcggtggtgatgccaatggacgcgggctggagcgatgtcggctcgtggtcctcgctgtgggaaatcagcgcccacaccccggagggaaacgtccaccacggtgacgtcatcagccataaaacggaaaacagctacgtttacgccgaatccggcctggtgaccaccgtcggcgtgaaagatctggtggtggtgcagaccaaagacgccgtgctgattgccgatcgccacgcggtgcaggacgtgaaaaaggtggtggagaagatcaaggccgacggacgccatgagcaccacatgcaccgcgaggtttaccgtccgtggggcaaatacgactccatcgacgcgggcgagcgctatcaggtgaagcgtattaccgtcaagccgggggaaggactgtcggtgcagatgcaccatcaccgcgccgagcactgggtggtggtggcggggaccgccagagtcaccatcaacggcgaggttaagctgctcggtgaaaacgagtccatctatattccgctgggggcgactcactgtctggaaaatccgggaaaaataccgctcgatttaattgaagtgcgttccggctcttacctcgaagaggacgacgtggtgcgtttccgggatcgctatgggcgaaaatga

SEQ ID NO: 396727 - DNA, 1026 bp, Salmonella enterica; identical to SEQ ID NO: 380192

SEQ ID NO: 396728 - DNA, 1164 bp, Salmonella enterica; identical to SEQ ID NO: 380191

SEQ ID NO: 396729 - DNA, 894 bp, Salmonella enterica
atgactaatttgaaagcagttataccggtagcgggtttgggtatgcatatgttgcctgccaccaaggcaatcccaaaagagatgctaccgatcgtcgacaaaccgatgattcagtacattgtcgatgagattgtggctgcagggatcaaagaaatcgtactggtgactcacgcgtctaaaaacgccgttgagaaccacttcgacacctcttatgaacttgaatcacttcttgagcagcgcgttaagcgccaacttctggcggaagtgcaatctatctgcccaccgggcgtgacgattatgaacgttcgccaggcgcagccgttaggactggggcactctattctgtgcgcgcgtccggttgtgggcgataaccctttcattgtggtactcccggatattattattgatgatgctaccgccgatccgctgcgctataaccttgcggcgatggtggcgcgtttcaatgaaacgggtcgcagccaggtgctggcgaagcgcatgaaaggtgatttatcggagtattccgttatccagacgaaagagccgctggataatgaaggcaaagtcagccggatcgtggagtttatcgaaaaaccggatcagccgcagacgctggattccgatttgatggcggtaggccgttatgtgctttcagccgacatctggacggaactggaaagaactgaaccgggcgcctggggccgtatccagctcaccgatgccattgctgagctggcgaaaaaacagtcggttgacgcgatgctaatgacgggcgacagctatgactgcggtaaaaaaatgggctacatgcaggcatttgtgaagtacgggctccgtaacctgaaagaagggacgaagttccgtaagagcatagagcagttgttacatgaataa

SEQ ID NO: 396730 - DNA, 996 bp, Salmonella enterica
atgaacgataacgttttgctcattggtgcttccggattcgtaggaactcgactccttgaaacggctgtggatgattttaatatcaagaatctggataaacagcaaagccatttctatccagagattacccggattggcgatgttcgtgaccaacaaatccttgatcagacgctggcgggttttgatacagtcgtactattggctgcagagcatcgtgatgacgtcagtcctacctcgctttattatgatgtcaacgtccaggggacacgtaacgtactggcggcgatggaaaaaaatggcgtaaaaaacatcatcttcaccagttctgttgcagtctatggcctcaacaagaaaaatcctgacgaaacgcaccctcacgatccttttaatcattacggaaaaagcaaatggcaagcagaagaagttctgcgtgagtggcatgctaaagcgccgaatgagcgttctttgaccataattcgtcctaccgttattttcggggagcgtaaccgcggtaatgtctacaatctgttgaaacagatcgctggtggtaaatttgcgatggttggtccgggaactaactataaatcaatggcttatgttggtaatatcgtcgagtttatcaaattcaaactcaagaatgttacggcgggctatgaagtttataactatgttgataaacccgatttaaatatgaaccaattggttgctgaagtagaacagagcttgagcaaaaaaataccatcgatgcaccttccatatccattaggtatgctgggaggctactgttttgatatcctgagcaaagtaacgggcaagaagtatgctgtaagctcggttcgtgttaaaaaattctgtgctactacgcagtttgacgccacgaaagtgcattcttctggttttattgcgccatacaccttatctcagggattggatcgtacgctgcaatatgagtttgttcatgcaaagcaagatgacattacattcgtttccgagtaa

SEQ ID NO: 396731 - DNA, 1404 bp, Salmonella enterica
atgcacgcgaataaattctcccgacgtaccctcctgacggcaggttccgcgcttgctgttattccttttctgcgcgccttgccggtacaggcgcgtgaacctcgccagaccgtcgatattaaggattatccggcggtggatggtatcgcctcgttcaaacaggccttcgctgacggacagaccgtggtcgtgccgccaggatgggtgtgtgaaaatatcaatgcggcgataacgattccggcgggaaaaacgctgcgggtacagggcgctgtgcgtgggaatggccggggacggtttattttgcaggacgggtgtcaggtggtgggagagcagggcggcagtctgcacaatgtgacgctggatattcgcgggtcagactgtgtgattaaaggcgtgacgatgagcggctttggtcccgtcgcgcaaattttcattggcggtaaggaaccgcaggtgatgcgtaatctgattatcgatgacatcaccgttacccacgccaactacgccattcttcgccagggatttcataaccaaatggacggagcgcggattacgcatagccgttttagcgatttacagggagacgccattgagtggaatgtcgcgattaacgaccgcaacatcctgatttccgatcacatcatcgaacgcattgattgtaccaatggcaaaatcaactgggggatcggcatcggactggcgggcagcacctatgacaatagttatcctgaagaccaggcggtaaaaaactttgtggtggccaatattaccggatctgattgccgacaactggtgcacgtagaaaatggcaaacattttgtcattcgcaacgtaaaagccaaaaacatcacgcccgatttcagtaaaaaggcgggtattgataacgcaacgatcgcaatttatggctgtgataatttcgtcattgataatattgatatgacgaatagtgctgggatgctcatcggctatggcgtcgttaaaggaaaatacctgtcaattccgcaaaactttaaattaaacgctattcggttggataatcgccaggttgcttataaattacgcggcattcaaatttcctccggtaacaccccctcttttgtcgccatcaccaacgtacggatgacgcgtgctacgctggaactgcataatcaaccgcagcacctctttctgcgcaatatcaacgtgatgcaaacttcagcgattggcccggcgttaaaaatgcatttcgatttgcgtaaagatgtccgtggtcaatttatggcccgccaggacacgctgctttccctcgctaatgttcatgccatcaatgaaaacgggcagagttccgtggatatcgacaggattaatcaccaaaccgtgaatgtcgaagcagtgaatttttcgctgccgaagcggggagggtaa

SEQ ID NO: 396732 - DNA, 1221 bp, Salmonella enterica
atgaaagtcagcttttttctgctgaaatttccactctcatcggaaacctttgtgctgaatcagattactgcgtttattgatatggggcatgaggtgaagattgtcgcgttacaaaaaggcgatacccaacatactcacgccgcctgggagaagtatggtctggcggcgaaaacccgctggttacaggatgagccccagggacggctggcgaaactgcgctaccgggcatgtaaaacgctgccggggctgcatcgggcggcgacctggaaagcgctcaattttacccgctatggcgatgaatcacgcaatttgatcctttctgcgatttgcgcgcaggtggggcagcctcttgtggcagatgtgttcatcgctcactttggtccggcgggcgtgacggcggccaaattacgcgaactgggcgtacttcgcggcaagatcgcgactattttccacgggattgatatttccagccgcgaggtgctcagccattacacgccggagtatcagcagttgtttcgtcgtggcgatctgatgctgcccatcagcgatctgtgggccggtcgcctgaaaagtatgggttgcccgccggagaagattgccgtttcgcgcatgggcgtcgacatgacgcgttttacccatcgtccggtgaaagcgccagggatgccgctggagattatctccgtcgcgcgcctgaccgagaaaaaaggcctgcatgtggcgattgaagcctgtcggcaactgaaagcgcagggcgtggtgtttcgctaccgcattctggggattggcccgtgggaacgtcggctgcgcacgctcatcgagcagtaccagttagaggatgtcattgagatgccgggttttaaaccgagccatgaagtgaaggcgatgctggatgacgccgacgtttttttgctgccgtcgattaccggtacggatggcgatatggaaggtattccggtggcgctgatggaggcgatggcggtggggattcccgtggtgtctactgtgcatagcggcattccggaactggtggaggccggcaaatccggctggctggtgccggaaaacgatgcgcaggcgctggcggcccgcctcgctgagttcagccggattgaccacgacacgctggagccggtgatcacgcgcgcccgtgaaaaagtggcgcaagattttaaccagcaggtgattaatcgccagttagccagcctgctacaaacgatgtaa

SEQ ID NO: 396733 - DNA, 1281 bp, Salmonella enterica
atgaaattattagttttaggcaaccacacatgcggcaaccgtggtgatagcgccattatgcgcggtttgcttgatgccatccgtcaacaggcgccagaggcggagatggatgtgatgagccgtttcccggtgagttccgcctggttgcaggggcgtccgattattgccgacccgctgtatcaattaagccagaaacagcaggcggcggctggacttaatggtcgggtgaaaaaagtattacgccgtcgttttcagcacaaaattttattgtctaaagtcgcccaggaaggatcgctgcgtaattttgctatcgcgccggaatttgccgaattcgcgcaatttattgcgcagtatgacgccgtcattcaggtgggcggttcaaactatgtcgacttatacggtttgactcactttgaatatccgctgtgcgcgtttatggcgaacaaaccaatttatatggtggggcatagcgtcggccctttccagaaccccgactttaaccagctcgccaattatgtttttgggcgcaccagtgcgctgatcctgcgtgaaaccgtcagccgcgatctgatgaccgccgcgcagatcgatacccgaaaagtggagcagggggtggataccgcctggttagtcgaacgccgtcacgccgagtttgtcgccagttatgccgtgcagcactggctggacgtcaccgcgcgccgcaaaaccgtcgcgattacgttgcgcgatctggaaccgtttgataaacgcctgggaaccactcagcaggcctatgagcaggcatttgcccaggtcgtgaatcgcctgattgtggacggttatcaggtactggtgctgtcgacctgcaccagtatcgatcgctataaccgcgatgaccggatggttgcgttgcggatggcgaagtatgtgaacggctcagagcatttccatatcgcgatggacgaactcaatgacgtggaaatcggaaaggtcctcgcatcctgcgtacttaccatcgggacgcgcctgcattccgtcattatctccatgaattttggcacgcccgctatcgccattaattatgaacataaatccgccggcattatgcagcagctaggcctggcggaattggctatcgatatccgtcacttgctgaacggttcattacaaagcgtagtggccgatacgctcaatcaattgcctgcgctaaaggcaaaagtggctaacgccgtcaccgaggagcgggcgaaaggattcacgatgatcaaatccgttctcgacagaattcgggaggagcaatga

SEQ ID NO: 396734 - DNA, 1479 bp, Salmonella enterica
atgaacttacgacaaaaaacgatcagcggcgcgaaatggtcggctatcgccacgatagtgattatcggtctggggttgattcagatgacggtgctggcgcggatcattgataaccaccagtttggcctgttgaccgtctcgctggtgattatcgcgctggccgacacgatctcagactttggtatcgcgaactcgattatccagcgtaaaacgattgggcatctggagctgaccacgctctactggctaaacgttgggcttgggattgtggtatttgcggtggttttttggctgagtgatgcgattgcccatgttttgcataacccggatcttgcgccgttaatcaaaacgttgtcgctggcgtttatcgtgatcccccacgggcagcagttccgcgcgctgatgcaaaaagagctggagttcaataagatcggcatgatcgaaacgacctccgtgctggcgggattcacctttacggtgattagcgcccattactggccgctggcgttaaccgcgattctcggctatctggtgaacagcgcggtgcgaacgctgctgttcggttactttggccgcaagatttaccgtccggggctgcatttttcgctggtatcggtgtccacgaacctgcgttttggcgcgtggctgacggcggacagtatcgtcaattacatcaacacgaatttatcgacgctggtgctggcacgaattctcggcgcaggcgttgccgggggatataacctcgcgtacaacgtggcggttgtgccgccgatgaagcttaacccgatcattacccgcgtgctgtttccggcattcgccaaaatccaggacgataccgaaaagctgcgcgtcaacttctacaagctgctttccgtggtgggaattatcaattttcccgcgctgctgggcctgatggtggtcgccaataattttgtgccgctggtgtttggcgagaagtggcgcagcattatcccgatcctgcaactgctgtgcgtggtggggctgctgcgctcggttggcaacccgattggttcgctgctgatggcgaaagcgcgcgtggatatcagctttaagttcaacgtctttaaaacgtttctgtttatcccggcgattcttattggcggccatctggcgggggcgattggcgtgacgctggggttcctggtggtgcaaatcatcaacaccattctgagctatttcgtgatgattaagccggtactcggctccagctatcgtcagtatattctcagcttgtggctaccgttttatctctccttgccaacatttattaccagctacggcgcaggaaagctggtcgacggttatttaccgctgtcaggagtattcgcgctacaggttatggtcggtattttgagttttattttaatgattattttttcacgcaatgcgctggtgatggaaattaaaaaacagctttttggcagtgcaaaaatgaaaaagttattacgtgtcggatga

SEQ ID NO: 396735 - DNA, 1395 bp, Salmonella enterica
atgacaaatctaaaaaagcgtgaacgagccaaaaccaatgcatcgttaatctctatggtgcaacgcttttcagatatcaccattatgtttggcgggctgtggttcatctgtgaagtcagtggactgccattcctgtacatgcacctgttggtggcgctgattacgctggttgtttttcaaatgctgggcgggatgaccgatttttatcgctcctggcgcggcgtcaaaatatcgacagagttaacgctgttactgcaaaactggacgctgagcctgatcttcagcgccggtctgctggcgtttaataacgacttcgacaaccgcctcgtcacctggctggcctggtatgcgctgtccagtctgggcttagtgttatgccgttcatttatccgtttcggcgcgggttggctacgcaatcgtggttataacactcgccgggtcgccgtcgccggagatttgcctgcgggtcaggcgctgctggatagcttccgtaatgagccgtggctgggctttgaggtggtgggcgtctatcacgatcccaaaccgggtggcgtctctgctgattgggctggaaacttcgagcagttaattgacgatgcgaaaggctcgcagattcacaatgtttatatcgctatgtcgatgagcgacggcgccatggtgaaaaaactggtgcgcgagctggccgacaccacctgctcggtgatccttattcccgatgtgttcacctttactattcttcactcgcgcgtggaggagatgagcggcgttccggtcgttccgctgtatgacacgccgctgtcagggattaaccgtctgcttaaacgggcagaggatatcgtgctggcgtcgctgattctgctgctcatttcacctgtactgtgctgcattgcgctggcggtcaaactgagctcgcccggaccggtgattttccgtcagacgcgctacgggatggacggcaagccgatcaaggtctggaagttccgctcaatgaaggtgatggagaacgataaggtcgttacccaggcgacgcaaaacgatccgcgcgtcacccgggtaggtaactttttgcgtcgtacctcgctggatgaattgccgcagtttatcaacgtattaactggcgggatgtccatcgtcggtccacgccctcacgcggtggcgcataacgaacagtatcgtcagttgattgaaggttacatgttgcgtcacaagatgaagccgggcatcaccggctgggcgcaaattaatggctggcgcggtgagaccgatacgctggagaaaatggaaaaacgcgtggaattcgacctggaatacatccgcgaatggagtatctggttcgatatcaaaatcgtgtttctgactattttcaaagggtttgtgaataaagcagcgtattaa

SEQ ID NO: 396736 - DNA, 852 bp, Salmonella enterica
gtggtgaattccggtaacggcgcggcggggccggtcatcgacgccatcgaagcccgcctgaaggcgctgggcgcgccggtggcgttcatcaaaatccacaacaccccggacggtaccttcccgaacggcattcccaacccgttgctgccggagtgtcgcgatgacacccgcaacgccgttattgaacacggggcggacatgggcattgcctttgacggcgacttcgaccgctgcttcctgtttgatgagaaagggcagttcatcgaggggtactacatcgtcggcctgctggcggaagcgtttctggaaaaacacccgggggcgaagattatccacgacccgcgcctgacctggaacacggaggcagtggtgacggcggcgggcgggacgccggtgatgtcaaaaaccgggcacgcctttatcaaggagcggatgcgtacggaggatgccatttatggcggggaaatgagcgcgcatcactattttcgtgattttgcctactgcgacagcgggatgatcccgtggctgctggtggcggagctggtgtgcctgaaaggacagtcgctgggcgggctggtggcggaccggatggcggcgttcccggcgagcggggaaatcaacagcaggctggcggagccggcggcggcaattgcccgggtggagcggcattttgcggatgaggcgcaggcggtggatcgtactgacggcatcagtatgtcgtttgccgactggcgtttcaacctgcgctcgtcgaacaccgaaccggtggtgcgcctgaatgtggaatcacgcggcgatataccgctgatggaagcgcgaacacggactctgctggcgctgctgaatcagtaa

SEQ ID NO: 396737 - DNA, 237 bp, Salmonella enterica
atggataatgagattataacatatttatattcaagcaaaggatttctttcgatattaattatttccgttttatatcttttaacatttcaaaagaaacacaaatggacttttatttctataatattttttgcatttattttacatacagtattatacatctataatgaaaaaaaacatgccccacaacaattacccaatgatagctataaatcagtcgatacaataagaacaaaataa

SEQ ID NO: 396738 - DNA, 168 bp, Salmonella enterica
atgaatattttatcactatggtctattctaaaaagcaatatggatgaatttaatgtaaaagttaattatgttttagataaggctattgaatccaaatatagatggttttatttgtttctatttttcctttttgaattattgtatttacaatttgtgtttttcaggtga

SEQ ID NO: 396739 - DNA, 1068 bp, Salmonella enterica; identical to SEQ ID NO: 396601

SEQ ID NO: 396740 - DNA, 291 bp, Salmonella enterica
atgaatataataatcttcgcgatcataaccagcttcagtcatttttttctgtataatactaatatcatcgacagcagcagtaactgttgtacctatattggcgaaaataattggatgtggatcattattttcttttatcttttcaataaggtcatcatagtctatctctccattctcttgatcctgaaccactctaccgtcaatacggagcatgcttacaattttagcaaccgaataatgggtttgtttagaataatacaattttccattaggaaaacattcccgtcctaa

SEQ ID NO: 396741 - DNA, 447 bp, Salmonella enterica
atgcctgcccgaacattatgccagaaatttttccgtggcgctctgagcccgtttcatcaatatcgtcagaatgctcttcttgatgctaccgtggctttgacccgtggtgcatcacttactctgacaagcatcggccgctaccttcctggttcagcacaagtcaaaaacaggataaaacgcgttgaccgcctgtcaggtaatacctctttgcatgaggatatcccgttgatattccgtaatattacatcactccttactcgccagttttcctggtgtgttatcgctgtcgactggagcggttacccgtcccaggaatatcacatccttcgtgccagtcttatctgtgatgggcgttcaatccctctgcttagtcggcttgtaccttcagcaaagcaaaataattcgctgatacaaaagaatttctcgatgaacttcaccggtgcgtaa

SEQ ID NO: 396742 - DNA, 183 bp, Salmonella enterica
atgtattattatggcgagcatgttgaagtggattataagcaggctaagctttggtataagaaagctgctgctaacaatgattcgcgtgcgcaggtaaaccgtggtgagatatatgcccacagcatgggggttaatcaggattatcagcagtcaaaatattggtatgaaaaagcggctacgtaa

SEQ ID NO: 396743 - DNA, 249 bp, Salmonella enterica
atggtctcagaatcacttagtcgttctacagatgctcttgctcttattcctggtaactgttttctgttgtgcggttgcggatggctactatccgctgaacttgtatttggattgcttattaagaatgttctatttaaagttgtcatatatttttaccgtgaatttgttttttattactactttcaagtatatctaacagttctgctaacgctgaaccttcatatattgttttattatctctggtattga

SEQ ID NO: 396744 - DNA, 336 bp, Salmonella enterica; identical to SEQ ID NO: 377671

SEQ ID NO: 396745 - DNA, 240 bp, Salmonella enterica
atgagcagtaaagatcaacaatctcaatgtaaaaaaattaaattatataattctgaaataatggatttacaatttaaaatagaaaaaatatctcagattctgaaagattttgatgagcatagcttgcaggttgatgacaaaaaaaagggctcggtagcctcgtggcggcgctctcagtaccaatttttgcaaaactttttacgaacatccaccacaacaaactggctgaaaaacaggtaa

SEQ ID NO: 396746 - DNA, 414 bp, Salmonella enterica; identical to SEQ ID NO: 392135

SEQ ID NO: 396747 - DNA, 228 bp, Salmonella enterica
gtgttaacttttttgttgttatcgtactatagctatattaataagttagaggatgatcttcttgataaagaacgtatgaagcgagtctgttcttcccttatcaatttcatagtcgagaatggcagtagcactgaaagagtttatcttcatgaaaagaagaagtatgaatcgatgccgttaaaaaaagagctggttaaaatggaaaaaaaaaggaagtatggattgtga

SEQ ID NO: 396748 - DNA, 297 bp, Salmonella enterica
gtgaagggagaagaagagaagctccagaggctcaaagaaaggttgaacatgacggaagggcttttctccaaagcaaaagagtcgatgacggaagaagagcttggcgctgaccgctgggttaagcatcatgaatcgacgctatcacgattgagagaacttatctcaattctttccgacgatgcgatccccgatggttcacgaataaaactgggaggtgaaagttttactcaattggggcgagtactaaataaatttgaaaatatcgaaaacaaaggaaatactaattatataaattaa

SEQ ID NO: 396749 - DNA, 240 bp, Salmonella enterica; identical to SEQ ID NO: 379280

SEQ ID NO: 396750 - DNA, 225 bp, Salmonella enterica
atgaagcgacccggtagtgaaaatatcggcgagcatatacagaccggtattgtcgatatagcccactttggcgttattgcagtaaatatccagtacaccatccgcactaccaataaatccgctgtcactgtcgccgatattgatgctcggtgtgctgccgtcaaaagcgccggttcctatgttaccgatactgacgcgttttgtcggattgagggtttcttttaa

SEQ ID NO: 396751 - DNA, 1089 bp, Salmonella enterica
atgtacagtatttgtgtcgattcgtttatgttggaaaatggtgagaggtattgccatgttgtaaataaaaaaactggtgaaccattgtattatccaaatttgtatataacaacacaagtcagaaatcggtcagagtctatatcaacaatgaaggttattgccggtagcatttcattgttatatcgattctttatgagaaaaaatatcaatattgatgaaagaatccagaagatgcagtttcttgctccttatgaaattgaggatttgattgaattctcttcattaaatttccgagatggaggggatggtaattttaggatttcaaatgtcaaaaaaccaactaagtattttcggattacaacaatagctaactatctagaatggctatgtaaaattcttctttctcatacaggtcagaaagatacaatcaaacagatacttgttttcatcaacaacataaaaagaaagaaaccaagaaacaatgacaaatatgttatggatatcgaaaagagcttagacaaagctcaactggattctttgtttagcattctttctccaggaagtaacttgaatccgtttacggaaacagtacaaaaaagaaataacttaatgttcctattattacattgctttggcatgagagccggtgaacttttaaatctgcgaattggtgacatagattttgcagaatcaacaatagcaataaggaggagagcaaatgataaaatagatccacgagtttatcagccattagtgaagacttgcgagagaaaattaatcgctgacaccaaactcatatatgaaatttcggattatattttgaatgatcgtaggaaagttagaaattctgataagcatgattttctgtttattacgtataagaaaggaaagacccaagggcaacctctgtcattttcctcataccataagatagtgagtgttgttcgtcaatcctccacacttctaggtggatggcgaccgggttcagaaacttcaataatttataatcgcaggcatatttttgagctatcgaaaaaagctgcacttgagcaacaagagcaactattcaaaggagaatttgatgaataa

SEQ ID NO: 396752 - DNA, 741 bp, Salmonella enterica
atgccattaaattcggtactttacggtcggatgttggcgctggagtcactgttcagagaaaaaacatttgataagttgattccaactcttatcggggtgcatgaaggtatgtcctacatgaaaaccgttgaacaaaataatattgacacccatgagattggggagatacctccagttccaggggattactggaaggatgaagcatcatgggtgttaaatagccaaatagttcttgccgcctgtataacaagtttttcggaaagctctgtgttgccttcgcttttaaattcatggagcgatgcacttgagcatatcgctgaaccttctacggacttcaaaggacttattgctgttttgcatggagaagcgcctgggaataacatataccaacaggcagcatatgcactgctggcattacagagcaattcgttaacacctgttcagctatggaaaaattcatgccggttattagaggtgtcaaggctggtgaagaactatacggagacagcactggaagcgttgcttgtaaaacgatggctttttgcttctcagcagcagaagttcttgttcagcgcaccaaggatttcagcgactcaaattgaaagggcttgtcttggctgtgagtattcaggattagagaaagttgcctcaatattaatcattgctgaaccttatctggatatcagcgtatcgggcgaattaatgatgctgcttaaatgcattagagataaaaaacaatag

SEQ ID NO: 396753 - DNA, 1443 bp, Salmonella enterica; identical to SEQ ID NO: 377884

SEQ ID NO: 396754 - DNA, 165 bp, Salmonella enterica
atgagtaaccctgaccataacgtgcaaggcatcagaatcaatatggctcaagtcaaataccggatgatcgtggttagtaagctgatcgccaaccacgccgctgtcttcgccattagccaacgcaattaccggggtactcaacgtactatctatcgttaccgttaa

SEQ ID NO: 396755 - DNA, 4272 bp, Salmonella enterica
atgattgggtgtttctttccgttaaggatcaaaaatgcattaaacaaatcagagtcaactttcactgtccaaaagtataaagtgagtggctttgacataatcataacaactccagatggagaaacggaaaccattaaagatggtttatcccttttgattatgggtaaagtcgaactcaaagacaccgctggaaatatcattacgcaaaacgatgtcatatctacaatcaaaggtgaaacgttaggtcttgatacggtgtatttgggggataaattagagggaaacgagttcaatgcgaattccggtgaaaaaaaaactgatgataaaaccaaaacaccaacccttgggggagatgagagttttcaggttcatcagcaacaattgctccaagaaaaaatcaatgaatatgagttattattaaaaaaaaatacggaaactctgaagagtaaagaaatacaggaagcaaaaacacaagacgctgaaaataaagaaattgttgacaaaaaacttgaacaacaattatcgaaaactctcaagccagctcaaattgatgtccagaacagtgtttcagtcaataccactgaaggattgtcgtcttcatcgtcgtcttcatcgtcgtcttcatcttctgtaatgaataaggttacaccaccaacaataacagatactgaaaaattgttatttatctcggggaggttggacgccaaatcagattcgggcaaacatggtgatgcgatcactaactgtgctactccttctttttcaggctttgctacacctaatgctaatgcatttttgatccttaacggaaagaaacacccaatcatttctgacagtgaagggaaatggtcactaaaattagagaatccccttacggatggcatttacgatgtgacatttaaaatcactgatgcaaatgggaaaactgttgaatcaaaaacaacactgacgatagatactgcccttgatggcctgagcgtagggttagacaaggattccgattcaggtgtagtgggtgataacatcacaaataatactctaccgatcattaacggaaaaacagaaccgggcacaatagttaccgttgaaattaatgatacaacactaaaaactatcgctaatgctgatggtttttggagtgttgttccactgcaatctctcattgatggtgtttataaatattcagtcactgccacggatgctgccggtaacactgccaccatcaccaaagaggtaacaattgataccacggcccctgatgcgacaatactgcttagttccgcaagtgattctggtacaaaagacgacttcatcacaaatgtaagtttaccaatcttgtcaggaaccactgataacggtgcaacaatacagctgacctttgatggacaaacctacacaatcattgccgacagtaacggcaattggagttttacacccgcagcctcccttcacgatggtgtatatgcattcactgcacaggtcacagaccttgcaggtaacactgccagtcacgcaggcaacttaaccattgattcgcagattccgacagttacagctaatttagcaccggctacggactctggtcttagcgatcacgataacataacgaataataagcacccaacattgacaggcgttacaaaagctaacgctactttaaccatcacgcttgatggccagcattatagcgttatagcagacaaggaaggcaggtggtcatggtctgtacctgattcgataacacttaatcagggattgaactcttatgctatttcagtttctgatgcagccggtaatactacaaaagtacctttcgctggcagttttattttcgacacaaccctacctcccacatcaacaatcggattcgatcctgaatataactccggggataaagacgatgccattacgaatgtcaatactcctgtttttattggtcaatcagaacctttttctcaggtcacagtgattgttgataatcatacttatagtgttcgcgctgacataacaggggcatggcgtttagaacttcttgaggaattgcatgacggaacttatgacgttgagatatacgcaacagatcttgcagggaacgtcagcattgacaaaactatctgggcattcgagatcgatacttccataccgacagccacggccataatagaagcggcagatgatactggtgtaagcgacagtgatggtgtaacgcaaaataagcaaccaacatttactggcgtcacaacagctaatgcagacattactctcaatatcggcggtaatgaatatcatactgttgcagatgataatggtttatggcgaatcagtttgcccactgagcttacagataatgtttactcctatgatgtgactgtagtaaacaaggccggtacaagtgcaacaacaactggtacattagttattgatacgatctctccttcatccgatgcttcactcagtaaatcaagtgatagtggtcaaaaccattctgacaatattactaatgttgtcaagccgactctgacaggaaaaactgaaccatattctataatcgaagttcagtttgagggaaatagctattcaccaacggttgcagcagatggtgaatggatcctgactcttcctgccaaacttaacgatggcagctatatatatacggttgtagcaaccgatttggcagggaatacctcctcatctgagcaccattttgtcattgatactgtatccgaactcacagcaggcttagacctttccagtataatggaaggagctggtatggataccataaccaacctggcccgacctatgctgagtggtgtagctgaacctggaagcatagtcactgtttgtatgtcaggtaataaatatgtagcctctgtcgacgatacggggcgctggacattcacactgcctaaagatgctgttgcgggaataaacaattatagcgttacatccgaagaccttgctggtaataaaacaatcttatcaggcaactttacatatatttcatcaggcattcttcctcccagagttaccgtacagcttgctcccgacagcgatagtggcgtaattggtgatgcgataacaaatcactcaacaccaacatttatcggaaatgcaacaccgggatgtcttatagttctggtcattaatggctatagttataccactacagcctcagctactgatggctgttggtctattgatgtgttaaatactctaagagaaggctatagtgattatatagttacggcaacagatccatcaacgtcattatccaccacattaaattccggtatttacatcgataccctgaatcctaatgttacgataaatctgaccgacgatacggataccggtatcaagggcgatatgatcacaaaaaatagaaaaccaatatttacggggaaaacagaagcaggcgcgaaagtattactacatattgatgacgaagatatcagcaccatagcggatggcaacggtaactggacattaacgtcccctagggaattccccgcaaactaccaagctagctatactgttactgtcaccgaccttgctggaaatgaaacatctcaagcaggagcgttggttattgataacactgcaccatacttatccggctcgcaactagatagtagcagtgatacagggatcaaagatgattactggaccaatcagctaaccccaactctgaccgggagaactgaacctggatgcaaactcacaattagaattcaagggactatctatgacattacagacatagcaagtgacggtacctggaagttcactgtaccagcgggagttattcccattaatacgtcttattatactatacatttttgggtaacagctactgatactgcaggaaatagcacaacgactaatgataaagtttatagtgcacgttaccacctcggtctgactggtacattatcggaggatacagatacagatgttaaaggtgataacttaacttctaataaaaccccaacccttgagggaaagatcacaagcgaagataatgcccatccttttactggtactattgagataaacagtaaaacatatcctgttaagatatatgacaaccagacaaaatggtctttttccattccagatagtgatgctctgacttctggtatatatgattatactgtcaaatttgtcgatagatttggtgaagtaaatatatttaaatcatctattacaatttctcatttggttgggcatttagtttccatgtataatatgctccttgagaggggatag

SEQ ID NO: 396756 - DNA, 258 bp, Salmonella enterica
  misc_feature (173)..(182): n is a, c, g, or t
atggcaacaacgattactggcgctaccagcaacgtagcggtacaaagcggtaatgtttccggtcagtcaatggacatgacctcttttgacctgaaagaacaaatcattgctacttttaaagagctggcagagcaggcatgtgagattcgcaacatgcagttgacgtcggcgannnnnnnnnncggcgacgactcaggaggtgagctcttggggtcgtcaggtgtcctcatttcaacatcaacgcgattctgcgagtaa

SEQ ID NO: 396757 - DNA, 1116 bp, Salmonella enterica
atggctggtaacaatatcgttgaccttatccgcgagtttggacaaacaaaacttttacgacctgacatcaaaaaaccggtatggcacaattctcttcgtttaccgcatggagaaaaattgtcagaagcgcaatgggaaaccgtagccgacgactatatgtcccgtatgggttttactgatacacatcttcgttgctatgttcttcataatgatgaggctggacagcatattcacattattgccagtcgtatagatattactgacggaaagttgtatctgggaaaaaatgagaaccttaccagcactcgaattatcagtgaacttgaaagaatacatggtctcacagaaacagcgacaacttcaaaccgacgatctcagggcataaagaagctttcgcgcaacgaaaagatgctctctgaacgaacggcaactccctgcccaaaagtcgctttgcaaacttgcatcgataatgtattagccaatcacccagatttgttatccttcattcagcaactggaacaagagggggtaacctgtcagcccaacattgcttcgacgggcaaaatgagtggtttttcatttcaatttcaggggatcgccttcaaggcttcacagcttgggaaaaagtatgcctggtcaaatcttcagacacttattgattactcgccgggacatgtaaaattacttaatacaggacctaaatttgctccttgtaaacagccagaagcacaacatcccagcagagaaactattctcgataaactactgcaacttgacgagcaaatcagaaatgaaagggagaatgaacttgcctacacaattcaattgaacccaaaactacgttttgcggcccatcagatatccagacaacaccaatcccactaccagatgtggcttccagttcttagcaggctcatacacctgctcaggaagataggtagttctctgttgtacacaacctctcgtccctttagacaaatctatcatctttacttacttgcctcctctcctgaacctgtcgacaaaatacattcagaacaattggttagtaacagttcattcattgaaaatgctcaaaaagacatcgtcttaaatcaggttagggagttgcaatga

SEQ ID NO: 396758 - DNA, 246 bp, Salmonella enterica
atgaccggtcaaatgaccagggaagaagcattagagagaatttcaaaacctgaaatggatgaacattttcttaaacaggaatttgagtatgtagcgcataaactcggtattactgtagatgaattgcaacaactttttgatatgcctaaaaaaacctacagagattacaaaaataaacgttggctaataggtcttggtgcaaacgtgctgcgtactcttggattagaaaaaaggtattttagatga

SEQ ID NO: 396759 - DNA, 519 bp, Salmonella enterica
atggatgctcaggcccgtgaacagtggtacagcagcctggagaaagacgacattcccgctatcagtgaagtcaatatactcagcacctttgagcaactgcatcagagtaaagatgaagtattcgaacgtggggtgatcaatgtgttcaaaagcctgagccgggactttaagaccaacaatccatgtaaattcggttcaaaaattatcgtgaacggtctggtaaaatgtgactggtggggatacagcctcaactggagctggcagcgtgaccggcttgctgacctggagcgcatgctgatgctgctggacgggaagcccgttcctgataaccgtgccgatgtgacccgacgcctgggcgatcacattcacgagaacaaagggagtaacagttacgaggacgggatgtttaaaatcaaatactttcagaagggaactgctcacattacgttcaaacgacctgaactggtggacaggctgaatgacatcatcgccaggcattatccggggatgctggcgtga

SEQ ID NO: 396760 - DNA, 1716 bp, Salmonella enterica
atgactacgcagaaaatttgcgcgggtgcgccctctcgcggatcggttacatggcacagcatcgactgggccaagtgtcaccgtgaagtgcgaaagctacaggcgcgtatcgtaaaggccacacgagaaggcaaatatggcaaagtaaaatctttgcaatggctgctaactcactcgtttagtggcaaaacattagccgtcagacgagttactgaaaatcggggcaggaaaactgccggggtggacggcattagatggtccaccccgcagtccaaatctcaggctattttgtcactgaagcgttatgggtaccgccctcaaccgctgaaacgtgtttatattcccaaatcaaacgggaaactgcgaccgctgggaattccgaccatgaaagacagagcaatgcaggcactctatctgctcgccctcgaacccgtgtcggaaacaacagccgatcaacgctctttcggcttccgttccggtaggtctactgctgatgccatcgaacagtgttttaaggtattagccagaaggattgcaccgaaatggatacttgaaggcgatatcaaaggctgctttgacaacattagtcacgactggttacttcgtcatataccaacagacagcatgatcctgaagaaatggctcgctgctggctatatggagaagcgacagctttttccaacagatgccggaaccccgcaggggggcataatttcgccaacgctggcaaatctggttctggatggtctggaagataagctgcgtgtctgctttggtaaaacccgaaaaaccgggaatgtctgggctaaacagatggttaactatgtgcgctatgcggacgacttcattgtaacaggtcgatcgaaagagctgctggaacaggacgttatgcccgtaatcgcagagtttatgaaggagcggggactgacactctctcctgagaaaaccggcgtcacgcacatagacagagggtttgattttctagggcagaacatacgtaaatacaatggcaaattactgatcaagccatccaaaacgaatgtggcaacctttctgaaaaagatacgctctgtagtgaaaggcaacaaggcaatggatcaggagagtttgatcaagatactcaatccaatgatccagggctgggcgaattatcatcagcatatcgtctgcaaagggatatttgcccgagttgaccatgagatttggtgtgtattgtggcaatgggctgtacgtcggcacccacagaaaagtcgcttctggattaaggagcgttacttccattctgttggtttccgtaactgggtattcgcagtacaaacaggtgaaaagcgtcctgatgggcggtcgagcctgaaagcattgcgaaaagcagaagatacccacatcaggcgacaccgaaaaatcaaggtgaaagctaacccgtttgatccgcaatgggaggtgtattttgaagagcgtgcaagtttcagaatgctgcaatcgttaaaaggcaggaagaaactgaccaatttatggctggctcaggggcgatgttgtccgttatgccatcaattgatcactctggaaacaaagtggcatgttcatcacatcatccggcgtgttgacgggggaacggatgaaaataccaatcttgtcatggtgcatccgatctgccacagccaaattcatgccactggtcttaaagtagtgaaaccggttcgcaatagcgggctttga

SEQ ID NO: 396761 - DNA, 576 bp, Salmonella enterica
atgatgtcagaacacactcatgccgaccccgaaatcttaaccgaccataccgacgtgatttgctccaccagcattgaacgtatagtgacaggacgtaacgccgcgctgacacaaattgaatcactgatccaccagcttgctgaaatatcgacgctgacccgcagcatcggcggcaaaactgctctggaatgggcaatgaagcaggatttccgctgtggctgctggcttctggaaaaaccagaaacagcgatgaaagccatcacccgtaatctcgatcgcagcatctggcgggacctgatgaagaagtcagggatgctgtcgggtaaggacaggccattactggcccatcctcccctaagaacggagcgtgcgactttcaccgcactccgctcaagcctttcaaagcccgctattgcgaaccggtttcactactttaagaccagtggcatgaatttggctgtggcagatcggatgcaccatgacaagattggtattttcatccgttcccccgtcaacacgccggatgatgtgatgaacatgccactttgtttccagagtgatcaattgatggcataa

SEQ ID NO: 396762 - DNA, 222 bp, Salmonella enterica
gtgacccacttccccgacggtaaacgtatgccattaaccactgaagaaggcctgcaaatcctgatctgctggctgcaggacaatattgactgcggtacggagatcatcttcgacagcgacgatgctctcaccggttccgccgcactgttgccctgcattgaacaggccctgaacgatgtccggacggtgcactgcctccggcttttactttctccccaataa

SEQ ID NO: 396763 - DNA, 936 bp, Salmonella enterica
atgaataattccggtacgccacatccgcatgattccttcttcaaaatcgttatgtcacaaccggaagccgcacgtgacttcctgaatatccacttgccaccggctctgctggctgtctgtgaccttgacaccctgcagctggagtctacctcatttgttgacactgatctcagaccttacatcagcgatatcctctggtcagtggaaaccacccggggaaccggatacgtttacgcactcatcgaacatcaaagccgtcctgaaaaatatattactttcagaatgttaaaatattctctggctgccatgcaacgtcatctggatgtacataaaaaactgccgcttgtgataccggtactcttctatgccgggaaacgcaccccgtatccattctcaatgaactggctggaggcatttgatgatccggaaatggcagctgcgctttactgccaggattttccgctggttgatatcacccgcgtgccggatgatgagatccttaagcaccgtcgggtggctctgatggaatttttgcttaaaaatgttatccgccgtgacctgatggagctgacagacacgcttactgaactgctggtcagacagttggagtcaggctacactacagagaagactctgctggcggcgattaattacgccgttcgtgacggggatactgacgattatcaccgttttatcaatacgctggcacaacgattaccgcaacagaaggacaatattatgaccgtggcacaacgactccgtgaggaaggcctcgagaaaggcatcatcattggtgagcaacgtgggatcgaaaaaggtcgtctggaaggtaagctggaagtggcgcggcagatgctggctaacggaatggatcgcaacgttgtcatgcagatcgccggcctgtccgaagatgatatgaaaaatattcgccactga

SEQ ID NO: 396764 - DNA, 471 bp, Salmonella enterica
atgagtgaactgatcgggatccatgtacggattgatgaacccgatgagtacgcgtgtcatttgctgactgcattgttgaagaaagcgtctgttgatgtcggtaaaaaacttgcctgtccgaacggagttccgttgcgtccggtttttttgccgcccgtcctgctgaccgtaaaatgcaggctgatacacgacgcagtgctaccatgtcccgaaaaatgcgcgatattcgcgctcatgaaaagagtcattttcattggaaaccatcctgtccccggcccggaacgacagataaatcaacaggccgtttccctgcatgaaagacattatcatcttttgcctgatcatcttcctgacggactgtgtcccggtgaaggtaaaggacgtaaaaaagggctctgttcttccttcatgtaccctctgtcagcattctgtctgatggctatggtcaatataatgaacatgattttttga

SEQ ID NO: 396765 - DNA, 375 bp, Salmonella enterica
atgaataaaataacatctgatgttaaaggtattaactctttaaaaagtgcgtgggaaacgaaaaaaaacatgtcaaatgaatgttttaaaaacttgcttactacgaaaataaataaaaaagaaacaagaaacagtggggtgcatccattaacgtcggggacattaaatagcataatggaattatttactcatcaaattaaacaattaaatattcaaaaaaaagaatctgtcaacatttcaaatctaacaaaagaacaacaatacattatagatgatatgggaaagatattaaaaaataaggtattatattctattaaatctaatgaatttttaaatgaaatagattttaaaaaaagtcatttcataaaaatatag

SEQ ID NO: 396766 - DNA, 543 bp, Salmonella enterica
atgatgacacattgtcatacaacgcccactgaagcacaccttaccggggtggaaagcctccgtaaggtccttcagcagtccaccgaccagtatccacgtctggtggcatttttgttgacattacccggcataactccggaagccgtactgcggtttcacaaaagtgtttatcagcaggtcagcggactggctgccacccgtcagctaagcggcagaccagtgccaccaacgatactgcgctggatttgggcgtccccgccaggtcagacgggcaggatgttactgctgctgaaccaggacaccttttgtcatccccgttacgacagaccaccggaccgctgttttgaaacgatggagacgctgctgcgggatgcggttagtacgttaaatgatgtccggcaccaccagcggccggagataaccgtgttcagggtggaccgaaccatcccggcgcaggctgacgcgcagtataaccgccttcgtgaatgtgccctgtcgctgacccccgcagccactgcccgtagtgagcgtatcagtccctga

SEQ ID NO: 396767 - DNA, 1083 bp, Salmonella enterica
atgagcactaagtattaccctataatcaaaaccacaattgcagaaatgcgatcaatgaaaaatataagtataagcacatggaaaaaaatggtgcctatactggagctgacaaaatcacggaaagggaagaataatccagactcaagtgtttataagaaaatagaagagatttgccaaatagtaaaatcagaaagaattatactagatatcactacaatagattctctttcaaactctgagattgagagttttcgcgacgaccaaaatggttttgagaactggtgtaattttattggatatactaaaacaaaaatcccaaatgtaatccctatcctattggcataccctgactcccaattgagtgaactcttgctacagacagaaaacttatgcaagcacacacaacacattgctatccggttaccaatttttgaagacggattaggtagcctttttgccaatttaatacagctaatccagcacagaccttacctcatcgatagtattatttttgatgcttcttatatttttgagaaaattgaagataaaccatttaaatatataatagattttatctcttatttttacagtcaaataaacggattttatgaaggtaaatatatcttctgctccgagcattatcctgcaaatataactgactacttaaagaaaaaccaagatcagtttaacaatgtcgtgtactatggaaatatggatttatataaaagcataaaattagctttatcacaatccaacattaataatgttctcctctatggtgattatgcctgcattcatccttttagaaatgatgttaaatcatataattggataccaagaatcgactatccaacagaatcatcgatttacttttcgaaagtacgcagagatgtcggtgggtatgagcaatgcgctaataacattgtgaggctaccaaaatttcaacaggataagcttaaatgctggggaatggatgagattatgcaggctgcgttaataaaacctggtggtttgaatccatcgtattggatttctgtcagagcaaatattcacatgtcaagaatttcagaaagctttatatag

SEQ ID NO: 396768 - DNA, 549 bp, Salmonella enterica
atggcaatcctcaagcgtaaaactagtagtgttgctgaaagtttgcccattgatatgttgcatctaagcaatcctcaaagcgttctagattatgcaattaacacattaaaggtaaggccaattccgttcgatcttgatgattttatttctaaaataggaatagatctgcaaagaactgctatggctgatgaactttccggtatgctgcaaaaaaatgccgaaggacgttggacaattactgttaactctttgcatcatccgaaacgtcaacgttttaccttagcccatgaattgggacactatttcttgcatagaaatagagcaaaatctttcgtcgatgaagccttgtatcgcagtactcatatggactcaatggaatatgaggcaaataatttcgctggcgcattattgatgccaaaaaatcaattgatcacttttatgaatagcaatggacctaatgccgaactaatttctgaatattttgatgtttctgttcttgctgcaaaaataagggtggaaactttacagaggaatatttatgagcactaa

SEQ ID NO: 396769 - DNA, 723 bp, Salmonella enterica
atgagtggagatattgaatcaaaagctgaaaggaatgtatttttgaaatacgcagctttttccttaaaatttttcctccagtacactcttgtctctctattactcggcctttttattttcatattgttatggttgtttcatagcccagcaaaagattttgtcagtgcatttaattggtatatatccagtgattcaatttccgcaatgagcatatcggaaaagaaaatgctggcccatttaatgagtaaaaactacatattaagtacaaatgatttattatctcaaacgggtagtttttattcatatacaatcacaattttaatattcttctgtacattttcagcttttttcgcggtattagttataaaaataaatgctgatgataaatttgattatacaattagtaaaaaagttaagtacttctttgctaatgataaaggtttcgatagtgagctcaaaaataaagtttctgatgtagtctctgaggagtttgaacgccttagtgatgaaaatactgatggtaatgatgaagttcttcggctgaaaaatgaagttgacacattaaaaaaagatctgatgggcttaaaggaaaaattgcttccaacagatgagtctccagatgccaatctatattttcagaatatgcttgataccatgaaagataaagtccagtcagcaaagaaagacattgaaggtgataaagatggcaatcctcaagcgtaa

SEQ ID NO: 396770 - DNA, 489 bp, Salmonella enterica
atgaatgatatcgtgatacgccacgctgaaccgaaagattacgacgctatccgtcatattcatgcccagccggaggtatatcacaacaccctacaggttccctacccttccggccatatgtggcaagagcggctggccgagcggccgggcgttaagcagctggtcgcctgcattgataatagcgtcgttggccaccttagcattgacgttattcagcgaccacgccgcagccacgttgccgattttgggatatgcgttgatgcgcaatggcaaaatcgtggcgtcgccagcgcgctgctccgcgccatgatcgatatgtgtgataactggctgcgcgtcgaacgtattgaattaactgtatttgtcgataatgcccctgcggtagcgctttacaaaaagtttggttttgaaattgaaggcaccggcaaaaaatacggtctgcgcaacggtgaatacgttgacgcctattttatggcgcggattaaataa

SEQ ID NO: 396771 - DNA, 459 bp, Salmonella enterica
atgaaaaagatcctcgcaatcgccgctcttactgctgccagcatctcgagtgcacacgcgacagtcaccccggcgtcaaccaatgatatcaccactaatccagtggtaaatacgtataccttccaatacaacgcggatgcgccgtcggtggctccacagttcgtcactaccgtcaaaaccttggaccccatcaatgcgggcaacaatactgtcttggctgataccacatttacgacagaccaagtcagcaccgtatacaaagtggaagcacactatgacggcgacaaccaaaacgcctatactgctgcgttctccgaagacggaggtaccggcaacccggctaatgtttacgcgactgtgggctacaatgacgttgcgcatatcgttctgatcaagacgggcgaagtagcggctgggacgacaaccgtaacgtacacggtaaccgggtaccattcgtaa

SEQ ID NO: 396772 - DNA, 795 bp, Salmonella enterica
atgaaaaaaaatgaaactgatgaacactttgataaacttattaaaaacttttcattacgatctccaattttcatttcagaaattgactttttcctaaacaacggataccactataacgatgctgaattgcatgatctgatacataaaaaaaatcatgacattacaacaaaaagacttgaacaaaaaatttctagtgcatggcatttgtatcaagactcattcaaaaacaatgacaatgaatttataagtacactgtcctccattctcaatacagaattaacaaatattccgctaaatagctttgatagtatagtagacatgctcaggaattttgacgtgaattgtgatgagtatatcaataattatttcgttgatatagataaaagaattgatttatcaaatcgacgccttgggtatttcttaggggatttacgttgtcaagatattcaagaacgattaaaagaaaccattagaaaattaaaggaaagtaatcgaaacataacaagcattgcaattgatttggcccaaaccaacggatggaacccagaggacattaattatttgaactcattctccactcatgattttgtcatttggataaaggaacaagaaaataactcagtagaccttgttcgtaatggtttattaaaattcagaaatattcaaaacaacgatcctatttatgaagagataaccaacaaggtcattgaagctctcaaagtaatagcattagagagcaaaataaaccaattgcgagtgaagaatattttcaaaatcgatattaatgaacaataa

SEQ ID NO: 396773 - DNA, 219 bp, Salmonella enterica
atgcctgaaaatctaatatcattggatattgctgagttgtatgcctgtgggtgcaacttttggttgggctttgacggcgatgaagatcggttgatctatactttagattttgaaaatagttttattaagaatgtgaagttccggggaactcatcttgacgcggcgattgcaacctgctcaggcgacagaggtaaccctggtcgggtgttgaagtactga

SEQ ID NO: 396774 - DNA, 480 bp, Salmonella enterica
gtgaagaaaatcgccgggttgtatcgtcttgagaagaagatcagtagccgtcctgtggagaagatccgtcagtggcgacagcgttatgcccgtccgatactggaagacctgtggtcatggcttgaagagcaggagccgaaatgttctccgggaagggcattacacaaagccatcgtctatgcgctgtctcatcgcgtggaactgagccgcttcctggaagatggtgcggtgccgctggataataatgtgtgcgaacgggccatcaaaaacgtggtcccgggccgtaaatcgtggctgttcgccggttcactgatggcgggagaacgcgccgcgcagataatgagcctgctggaaaccgcgaaacgcaacggtctggagccgcatgtctggctgacggatgtcctgaaacgactgccgtcgtggtcagaagatcgtcttgaagatctgctgccgttgccggggttcgtcttctccgattaa

SEQ ID NO: 396775 - DNA, 375 bp, Salmonella enterica
gtgcagccatgctgcacaagagatgagggaaggcccctcggtgtcggcgtgcaggcgcaggcaccaaaccccccactgctgctgcatttaagagatgtggtggtgagcgagatgggaaaaggttggacaagatccaatcaggtaggacccgaagagacgaacgaaagtgaaccgttgatgatgtgtcgaaagcgtatagatgatgtcaaaaccatggtggagtcgttcctgtgggataagtgcaggaggcaacctgtttactgcctgcgcggcatccggcatgaaagcggcgtgaagtcgggtcaggctcttgtgtggaacgtgggaatctgtcaccccggtgttaagggagaagcacaagtggaagccccatga

SEQ ID NO: 396776 - DNA, 1131 bp, Salmonella enterica
atgagtgccagagtaccgatacggggtacagggacggagcaggccgtagtagcggtgaaggatcgtaatggattcctagcaaagggcctgccccattgtgctgacactccaatggcaaccgttgatgaaaacgtcaaagggaggactgttgtgggatcagcaaagccatttcctataaccaaaagacaggtatgggaagcctacaaacgagtcagagcgaatcgtggtgcggcaggtgttgatggacagacactggcctcatttgatgagaatgcggttggcaatctctacaaaatatggaacagactggcctcaggaagctatatgccatcagcggttcggtgtgttgaaattcctaagtcggatggaggaaagcgcccactcggcattccaacagtgtccgacaggatcgcccagatggttgtcaagcaggctatggaacccgttcttgaggctgtttttcacgatgattcatttgggtatcgacctggaaaatctgcacacaatgctattgcgcaaacaagaaaacgctgctggaaatatgactggatagtggagatcgatataaaaggattctttgacaatatcgaccacgacctgctgatgaaggcagtgcggcatcatactcaggagcgttgggttatgatgtatgtagaacgctggttaaaagcaccggtacaaatgcgtgacggaacaatagaggggcgggctaagggcacaccgcaaggtggcgtcatcagcccattgctggccaacctgttcctgcattatgtgtttgatatgtggatgcaacggtgtcatcacgatataccgtttgagcggtatgctgatgatgcggtatgccattgtagcagtcaggaacaggctgaaaccctgatctgtcacctacgccagcggttcgcgcaatgcgggctggaactccatcctcagaagactcagatagtctactgtaaggatgtggaccgaagggggaattaccctaaaacaagctttgattttctgggttatacattcagaccccggttatcgaagaatcgttggggaaagaccttcgtgaacttcagcccggcgatgagtgccaaagcggggaagttgatacgacagggagtaaatcacatgcagaacatataa

SEQ ID NO: 396777 - DNA, 720 bp, Salmonella enterica
atgagcggagacgttcacgtccggttccgtgagcgccttgaggggaggttcctcagggcgactcgacttgtgataaccggcagttcgaaagagctactggaaaacagaatcaaacccgcggtaacgatattcttgcgggaaagagggctgacactatctgaagaaaaaactgcgatcgtttcgatatcacagggatttgactttcttggttttaatattcgtaaatacggcaggaaactgctgataaaaccagcgaaaaacagtatcaagtccttcctggatgttatccgagaagagatcaaggcaggcgtagccttgcccacagccacattaatcggtttgcttaatcgtaaaataacaggttgggtgaactattaccggcatgttgtggccaaggctgtcttcagcaaaatcgatgccgttatcttttgggctctttatcgcatgataaggcgtaaacacagcaataaatcaacaggttggctttaccgaaaatattacggtagcaaagggctgcgccgctggatctttcacgccgtctatcgcacgaaaaacggcgaagtcagggacatcagtctgaaacgggcttctgcgacgctaataagacgtcacagacaaatccgttccgccgccaatccttatgatgtggaatacgtcgattattttaaagagagaatgcggaaatatcctccacagcagaaaactgccgggtcaggttaa

SEQ ID NO: 396778 - DNA, 906 bp, Salmonella enterica
atgaaaaagaagattgtcattgcgcttggcggcaatgccttattacagcgcggagaaattttgagtgcagaaaaccagcagcgtagtattcaggtatttgccgaaatggcatccgaattagcccgtgattatcaactggtcattgttcatggcaacggtcctcaggttggtctgctggcgctacagaacgcggcttacaaagagtccccggcctggccgctggacattctggttgcggaaagtcaggggatgatcggttttgccatttcccaggcgctgacatcatctacgggtaacgcgcgcgtgacgacgctgatgacccgtgttgaagtcgatccgcaggatggcgctttctcaacacccggtaaatatatcggacctgtctaccagccagatcaacagacagagctggaagaacgctatggctggcagatgaaagcggatgggcaatatattcgccgcgtggttccctccccgacaccgctaaaaattctcgacagtgatgccatctgcacgttgatggatgcgggacacatggtgatttgctgtggcggtggcggtattccggtcattgcgcaaggcgatggctatcagggaaccgaagccgtcattgataaggatttgaccgctgctgtgctggcgcaatccattaacgctgaccacctgctgatcctgacggacgccgatgccgtgtatgaaaactggggaaccccccaggcgcgtgcgctacgacatgtcacaccagaagagctggcgccgtttgccgcgcctgacggtgcaatgggcccgaaagcggcggcggtgatacagtttgtcaaacagaccggaaacgcagcatttatcggcgccctgaaggatgcgccgcaggtcctggcgggtgaaaaaggaacctgcgttatgcagtaa

SEQ ID NO: 396779 - DNA, 1224 bp, Salmonella enterica
atgtctggttcatatgaagtggctgaggccacaaagaaaagaggaataccggcctggtgggtcaccgtttttctgttctggctgggatggatttttatgtatgccgaccgcacggtgctcaatccggtgatgggcgaattagaaaaagaatttggcttaagcggcacacaattgggtattcttaattctgtgttctatttttcttacgcattacttcaggtacctgccggaattctgggtgacaaaattggaaagaaaaaggtgctggttccggggtttattctttttggtgttttcaccgcggtaaccggctgggcaaaaagttggtacaccctgctgtttgcccgcgtggtgacgggggcgggtgaaggaacctattatggtccgcaatacggtctttcctctgagcagatcccgaagaagtaccgctctcttggcagcgcaatcatcaacagcggtatggcttttggtattgcgctggggctgatgacctcaagctggctggtatacgatcagggatattcatggcggatgccattctatgcgatggcggttccatccgtgctggttggggtggctatctggctatttgtgaaagagaagaaacgtaccgctgacgccgatggcgcgccggttaaaaagggtaaattcagcgacctgctgaaaaaccgtaatttaattatcacctatattatggtgttctgtagcctgttcggttttttcgttatcctgacctggcttccctattatctgcaaaatgaacggggtatcgctggcagcgaaaccggatttatctcttcgctggtggcctggatttccattcctggggcgctgctattctccagcctctctgacaaattaggcaagcgtaaacctttaattatgttcctggtgccggtcgcgattatcagcatgttgtcaattatttggatgccgaatatgacaggtgttatcactgcgctgtgtgtctatggtctggtgggtaaactggcgctggatccgatactggttgccctagtagccgacagcgttgatgaaaatgattacagcaccgcatttggcttatttaattttatcggcatgagttcatccattctcgccccgattattgccggggcggctcgtgatatgaccggaagcctggcttccagtttctatgtttcagccgtactgctggctattggtttattcgcaatgctgtttttaaaagaacaacgcacataa

SEQ ID NO: 396780 - DNA, 1662 bp, Salmonella enterica
atgatttacgcctttattaaaaagggaagttttcaggattccgtcagcctgatgatcatttcccgaaaactcagtgagcgcccggaagttgatcaggtttcggtcatgatgggaacgccagccaataaatcgatgctggattccacaggattctggcacgacgactttgccgacgccacgccaaatgatatttgtgtggcggtcagaaccgaaggtgagcagcctgagatcctggatttgattcgtgagcaactggagaaagagctaagcgcgatcgccaacgcgtcggggagttcacatcaactggtgaaagctcgccgcttcgaaagcgcgtgccagaaattacctcaggccaatcttctgctggtctccgtcgccggagaatatgccgcatctgttgccagagaggggttgcaggccaataaaaacgtcatgttgttttccgataacgtaccgctggagcaggaagttgagctgaaaaccatggcacgcgaacgcgggctgatcgtcatggggccagactgcggaacggcgatgattgccggaagcccattagcttttgccaacgtcctgcctgaaggcgggattggcgtgattggcgcgtcaggcactggtattcaggaaattacctcgcagattgcgctgcatcagcagggcattagccatgcgattggcttgggaggacgtgacctgagcgctgacgtgggcggtatcagcgcattgaccgcactggaaatgctggctgcggatgatgccacgcgggtaatggcttttgtctccaagccgccgtctccgcaggtgcgaacccgcatcattgctgcgatgcaaaaggtggggaaaccggttgtcgcgctgtttctgggcagcaagccggagctgcgtcgtgaagggaacgtctggctggcgaattcactttctgatgccgcgcggctgtcggtgctgctgatgcgcgtggcgcagcagagacgggttcagccggaagtggcaggcaaagggatttacggcctgtatgccggggggacgctggccgcggaagccgccatgctgctctcagcggggctgggggttcccgtgagtgaaagccacgaccagggcgtgatgctggacgccggtggtcatcgtattgtcgacctcggggacgacagctacaccctgggcagaccgcatccgatgattgacccaaccacccgcagcattgaaatcgaaaaactggccgcgttgctggatgtcggggtactgctgctggatgtcgtactgggctatggcgcctgcgccgatccagcgggggcggttgctgaggcggtagagcaagtgcgagccaaacgcactgcgccgctggtggtgatagccactctgaccggaaccgagggcgatccgcagggccgcagcgagcaggaagagaaactccgtgaagccggggttgcagtggtggaaaccctggaagaggcggtactgctcgccgttagcctgacgcatcaccaggatctcaatattccacagacacatagcgcgcttcttgcgggcgtacaggtcatcaacgccggattgcgcagcttcgcgctggatctgcaaagcagcggtacgccggttgtgcattatcagtgggcgcctgttgccggtggcaacgcccgtcttgccagcttactcaaacagttacattaa

SEQ ID NO: 396781 - DNA, 1263 bp, Salmonella enterica
atgtattcatctattgcacaggccaacgaagccattatcgaacgaattaaagctgcacgcccccactgggttgccgtgcgtcctgcaaaagaagcggtggccgaattatcttctggacgcaaattactgcacgctggtccgccgatcgcctggggagagatgactggcccaatgcgcggagcctgtattggcgcatcgctgtttgaaggctgggcggtcacggaggaagatgccctgtggatgctggagcagggagaggtcgagtttattccttgccaccacgttggcgctgtaggtccgatgggcggtattacgtccgccaatatgccggtgctggtcgtgcgtgatgtcgtccatggcaatcaggcctgctgcaacctcaatgaggggatcggcaaagtgatgcgctttggcgcttacggcgatgacgtgcagaaacgtctgcgctggatgcgcgatacgctggcgccggtattgcaggaagcgctctcgcagatggaaaacggcgtcgatctgacggcactgatggcgcaggctatcacgatgggcgatgagttccaccaacgtaatattgcggcctcttctctgctgctacgcacactttctccggtgattgccggactggcgcgtccgaaggcggaaatcattgaggtgttgcaattcctgagcgtcaccgaccagttcttccttaacctggcaatggcctacagtaaagccgttatggatgcggcggcggaaattaaagccggttctgtggtgaccgccatgacgcgtaacggccgtgatttcggtattcgcgttagcggcacaggcgatcgctggtttaccgcgccggtgaacacgccgcaggggctgttctttaccggctatagccaggctgatgccaatccggatatcggcgacagcgccatcacggaaacgctggggatcggcggtgctgcgatgattgccgcaccgggcgtaacgcgcttcgttggcgcgggtggcatgggggctgcgctggagacatcggaagagatggcggagatctatcttgccaacaatccgctgttccagatcccgtcatgggatttcaaaggggcatgtctggggctggatatccgtcgcgtcgtggaaacggggattacgccgctgattaacaccggtattgctcacaaggatgcggggattggccaggtgggggcgggcaccgtacgcgcaccgctgctctgttttgaaaaagcgcttgaagcgctggcggaactgcatcacatcacggcataa

SEQ ID NO: 396782 - DNA, 873 bp, Salmonella enterica
atggtgacgattaaggcattagccagcgcgggtttttatcgacttcccgatggcgaatggagattgcacagccgcttctcgcaggcgattaacttttgccgtcctgacggcgagctgttgacgctgtttcgatacggaaaggggatgggacctacgggcatgctgctgagcaccacacagttttcccgtgtggcgcatattgaacgacttatcaaacaggggtccatcctgcggggacagggtatagcgctttgctcacgtcgcacactccggatgtcgctggatcctgccgtacttgcccctgtcgatctctcttttagcactcaacacagtggtcttgccggggcgctgaatcagccactcaatacaatgttgcactatcctgaaattattgagcaacttgaacgctggcatcgtggcgtgacgcctgactggcgctggctgatcggatacggcccaggactgacgcccagcggcgatgatatgctgacggggatgctggctgtgctgtatgctgcggggctttctgccaaattgcgctattttttacccccgacggagcaacttgtgccgctcaccacgtcagtaagctgtagctatctgaacagcgccaaagtgggcgaattttcaacgccgctacagaaggtgatacgtggtttacagtccggacgcgatccgcattctgcaatcagacgcctgcttgctgtcgggcactcctcgggggcggacatattgctgggaatcgcgatagcgcaacggtggttacaggtggtcgactcaaggggaacacatgctcgatcaggaaacaatacgcacttttattcgggttgcacagacggagagtttttcccgcgcggccagctccctgcataa

SEQ ID NO: 396783 - DNA, 804 bp, Salmonella enterica
gtggggacgcagctctttttacgtacaacccgctccgtcagtctgacgctggccggacaacatctgcttgagcattgtcgacagtggcttaactggctggatgcaatgccggacgagcttcagcagatcaacgcgggcgttgaacggcaggtgaacatcgttatcaacaatctgctgtaccagccgcagaccacggcagatttactgacctggctgcaccaacaatttcccttcacccgatttcaaatttcccgacaggtctatatgggcgtgtgggattcgctactgtatgacgatttccaattggcgattggcgtcaccggatcggaatcgctctccaataatatctctctgttgccgctgggagatatcagttggcggtttgtggtggcgcaaaatcacccgctggccagccatccagtgccggtactgtcagacgatatgctgcgccgctatccggctatcaatattgaagatacctcgcgtacgcttacgcgccgcgtcgcctggctgcttagcggacaaaaggagatcaaagtgccggatctcagcactaagctggcctgtcatttaagcgggcttggcgtcggctttttacccgagcggatgtgtcgtccttatgttgaatccggggcactggttgcccgtgaggtgattaatccgcgccagccatcgccgctctcgattgcctggaagaatgcgggtagcggaaaggtggtcagtgaaattgcggacatttttaagcaaaaagattcgctggtgagtgggttcctgcggatggtcgaccgaccggcggagaactga

SEQ ID NO: 396784 - DNA, 366 bp, Salmonella enterica
atggaaaattgggatgagatgcttgcctcgctgtggttcaccgtctatccggatgtcggcaatcttagcgcgtggggaaatgacgttaccgctgaactcaaactgggtatcgatcgtattgccgccatccatttaaaggatacgcaaccggtcaccgcgcttagtccgggccagttccgcgacgtaccgtttggggaggactgtgtggattttgtcggtattttcaaaacgctgcatgagctgaattattgcggttcatttctgattgagatgtggacggaaaaagccaaagagccggtgctggaaattatccaggcacggcgctggattgaatcacgtatggaggaaggaggatttacatgttag

SEQ ID NO: 396785 - DNA, 150 bp, Salmonella enterica
atgttagagcagctgaaaggcgaagtattagcagcaaacctggcgcttccggcgcatcaactggtgacgtttacctgggtaacgtcagtgcagtggatgaagcgtgtcagtttatggtcatcaaaccttcctgtgtcgaatatgacgtga

SEQ ID NO: 396786 - DNA, 204 bp, Salmonella enterica
atggaaagaaattttttcggctctgaaacaggacagttacgtagcgtaatgctgcattgccctgacctcagcctgaaaagacttaccccttcaaattgccatgagcttctttttgatgatgtactttctgtagagcgtgcagttgaagaacataatatttttcggatacattgcgtaaacaaggtgtcgaagttttattactga

SEQ ID NO: 396787 - DNA, 390 bp, Salmonella enterica
atgctgaccgtctacagttcaaaacataatctgcaccacggtatcgaacttaaagatggtgtgctatccccctcttttgaaaatccgcaacgcgctgagaccgtactggcgcgcgtacacgccaccgcgctgggtgacgtcatctccgggcgaacgtatgaaagaacgtgctacgtggcggcgcacagcgagcggtacataaattttctggaaaatgcctggcaggagaggagtgggctgctaccggaaggacacacgatgccctgccactggtgtggccggtgcgcaaccttgccggggatcgggagccggagttcatcgatggcaaactcggtttttacgccatggatgccggcgcaccgattaaagcagatacctggcaggctgtaa

SEQ ID NO: 396788 - DNA, 1623 bp, Salmonella enterica
atgcgtttttccactcgatttacggcctgcatacaaatatgtgttcatataatatttttatttattaactcttttgtattttcattcccgatcagagcggaaactacccccccgtcagcgccgcagacaacggtcacagcggcatcaaacacggcgaaagaagacgatgcaggtaagaatctcgcgaatgtgctttccagcactggtgctatgttgaatcaggataacaaaacggatacattaatcaattctgcgattaataatggatctgcttacgccactaatgcagtacaaaactggcttcagcaatttggtacggcgagggtaaatctgggtctcgataacgatctgtcgctggaaagtgctagcctggatatactgttgccgctttatgatgacaagaaacacaacctgttatttacacaattaggcggaagacgcgatgacgatcgtaatattatcaacgcaggcgtgggctaccgctatttcgccgaccactggatgtggggcgttaacgcattttatgatcagcaaatctccagtgttacccaccagcgtctgggtttcggcggcgagcttggctgggattatttcaagctgagcgccaacgcctatcagcgtctttctggctggaaagattcgaaagaccatactgattacgaagaacgtgtcgccaacggctatgatgtgcgagccgaaggctatttaccagcatatccgcagctaggcgctcagttgatttgggagcagtattatggcgatgacgttgctctgtttggcgatagcgacgacgaccgtcaacgtgatccttatgctttgaccgcaggcgttaattacaccccggttccgctgttttccgttggcttaaatcaaaaaatggggaaaggcaatcataacgatactcaaattgagatggcggttaactggatgctcggctcgccgctcaatgctcagctcgacgccgataatgtcaaaaaccgccgcacacttctcggcagtcgccttgatttggttaatcgcaataacactatcgtgctggaataccgcaagaaagagttaatttcgctgaaagtgccggaaaaaatgaccggcgtggaagatgaaaccctgcctgtcaacgtaacggtgaagagtaaatatcctctcgatcatatcacctggcaggatgatagcctgatacagaacggcggcaacatcaccgaggaaaatgggacgtggacggttacgatgccgcactacgtgcaaaatggtgccgagaagaatatgtatgttgtcgccgccacggcatacgacaaccagggtaataaatctgacgtcagccatatgaccgtcgccgtgagcggctttaaccctaatgacattgttaccgcaaccacagcggccagcacaactctgccggcagacggcgtcagcaccacgcaggtgagcgttactgttacgtccggtagcgggcaaaaaattaccggcctcgccagtagccttagcgcccagctcattcgtaatgcgaaggtcgtaggttcgactcctattatcggcaccactaaccacgcgggttcacgcgatgttcaccagttcagaaaaagcgccttgtgccatatttgtgccatttcccgccaggaatga

SEQ ID NO: 396789 - DNA, 1014 bp, Salmonella enterica; identical to SEQ ID NO: 375744

SEQ ID NO: 396790 - DNA, 168 bp, Salmonella enterica
atgaatagtaacttttttgaaattattaggaaatattgtcttgttgaagacattgattttgtttttaaaaataaaagcaaagataacaaaaattataaatattccggtaacaaagaaaacagaatgataagaatcactgtaaatcaaacgagtattaaacaagtttga

SEQ ID NO: 396791 - DNA, 1290 bp, Salmonella enterica
atggaaaaaattgttggtaaccgcagtaaaaacactgatgtacttattcttaaaggtatgttgaataatttaaaagatggtttaaataattttgaattattgcttaagttgcagtttaaaatattggcgtgcgtgatgagatgtgagcgaaaaattaagtctcttaaaaaggataatgctcatttaaggtcggcattaaaaaaatcaagacttccaaaagaaaaatctctggcagtaaaagaaaaaattaaatacaattctgaagtaattaatgctgaaaaattcaagatatatacgtataaaatgtttggcgatgctgttgcatttttatacatcgataaatatacaattaaacagttatactacaatgtacataattacaatgttaaagaaacgtcgggggatttgagcggtaagtctggattgcgagaggaatgggaatgcgtaaaacttgcatgtgataataaagttccagctctgttgcatgatattacaatgagtataaggcatggagatgtatcacttttaggtaaagatgagccatttattattgagatgaaatcaagctcaaatacaaataagagagttgagcggcaaaaatctaaccttgaaaaattaggaagtttcatagcaaaagacgaagctgaaaattttcgagggattccattgttaatcaggagaaatttgttaactgaagaggaatcatattctcagattttaaatgagtgtcttaatgattgtcgcagcaaaggaatggctttggtcgaagctgaaaaaggattttatatctgcgcagttagagaagggaatatggcttctatgctagaaaatatagattttgatgaaaaaaaagaagttttccctatatttctcaatcaatataaaaataatggggagtggctaccattaacaccatttactctattaattaacgatccctacgatctccatgattttattgaaggggaattaacaatagcttgttttttaatgctcgatgaatacaaaaaaattgctatagaactaggctatgaattagtttttgtttctaatgatgaatatagtatcttgttaaaaagaattggtgaagatattatatttggtgtttcctggcaaatgttgttaagagttccattagagatgatgtcaatgtcatggttgataaaagaaagtattaatgtatatagtaactccctagaaaatagcccccataatgatgaattaaatcaggggcagggaaatactaaaaattcattattcgaaaaatacaagaatttattttcttactaa

SEQ ID NO: 396792 - DNA, 1374 bp, Salmonella enterica
atgagcgggtgtatctttaacagcaaaacattgggctcttatgatttttcatcacatttaattgagatttcaaacgatgaattaaatataagtttaccgcaagcacaaaatatcatagacaataaaagcatatatgattttgatgatagcgaaattgaattttataaaacatatctccatgaaacaatccatttacttgattgttctacaactcactgggggttaaattattcatgtcggctatataactattttaaacatgaaacaaaggaggcttttgataatttattagttgatgatactgaaattagtttacattatcacttcaaaaacaacagcactaataaattaaattataaaaatattaaagcatcattacaatatgatgacgatatgggtgtgtatatcagagtccatttctttgggtatgttaataattatcaagaaatcctaaacattcctttaagcatgctagctattttagaggggcatgcgtacgctcaggagcaattatttcattggggaatattagaaaaaaggaatgacttttttaaattaaaaatgcttgaaaatgaaataaaagaaaagttgcaacaaacagacttagcagagtatacatgtattttatctttcatcgatcagttattcccatcattttcaataaaattaaaattaaagatgtgtatttttttatgtcgttcaagtttgaacgctgacattctaacaagaatcactattccagactggttaataagagaaattttctcaaactctccgcctaattatgtcaacgcacttagacttgatataaacagaggtaatagtactcccgcagttttcttcatatatcttatgtctcttgcagtctacaatgaaactaatattatcatcgatggtactgatttttactcttacatggagagtattttattaaatactatctacgaaaacatgcattttgagtctttaagagaaatatctgacattggcatcgatcacaaaatatctctcttgcaacaaaatggggctcatctagtttctgaattagccaatgagtctaaaaactatagttggtattctttcgacctacgcgaaattaaattaccaggagtactattgtgtgatgaataccaatatttatatccaaaaaggaacttgtccattgatttggaagactacatcgataaaactcttcaaagagcaataaggcttgataagctaaaaaataatgagccgagtagaaaacagcatttagaccctagggttgcctcagcttggcttcaagatattaagtcaggtaaaaatagccgtatgatagtggagtactcttttgacgatgaagataatatggaagtaaaaaaatatattagataa

SEQ ID NO: 396793 - DNA, 1080 bp, Salmonella enterica
atgttaataaacaaactcaacatagattcttgtcgctcaattgatattggcaggaatgcaagagatcaaaaattaaaaatgcgagttgataaactcagtgttgtaagctgtttccaaaacattgaagaaagaaaaaatacatataccaaactaaaaaaaatgagacagaaggaattcaaaaaataccgcgtacaatatatccgaaaaaatgacgaaaagccttatcgaaaagcaatattaatccgagggaagaggaaacactcacctgtactgttgcggattgattatgacccaataaacaaaagcacgggaggaatacgtttagattttcacccccaacatatggcgtccacagaaatagatcatttgttatcgtggataaatcatcgactagggggaatattttaccaactgctggcacgggcttgggttacgcaaattgatgtcgctcttgatgtctataactgcaagttaaatgattatatatgggggttggatcgttcaggaaaaacaaagtacttcaataaaagaaatggtttaccgggaatcagagtaggcagttgccgttcatttttacattttctttgctatggaaaagtagatgctaacagcggcagaaaactggtatttagggaaagaaccaaattcatcaatatcaatctagatgagtatcagaaattcctgcgtattgaggcccggtttaggcctggcgctaaacccacaagcagaaaaggtagtgttttaatgcttgcccatattttagatatgagaaaccctttcgaacgacttagggtttattcgaaagatttaggcggcgagctattgaaccggcagtatctgtgcgtactcccaaatgcccccagcatcgctagaatgaagcgttacatgatggcagatatgcaatgctcacgtttgcctcgcaaagtcgatagactcattgcagagtacgagatagagctgttcgataaacatacagtttgggagcagtggtcacgctgtgttgctcaactaagcggcattttcagtatagcgtctgttttctgtgtacatagatgtgtacatagtgaaagtatggagtga

SEQ ID NO: 396794 - DNA, 663 bp, Salmonella enterica
atgaaatcaaataacaaaaaattgcatgagcttgatgagcctgtagtgcttgaagagcctgatgagtttgaagaggtagatgcggagcttgggtttctcggggcaacagggggttataaattagatggggctgatgaatcagaggattttgagtttgaggagtcagaggaaattgatgaagcgataaaagctcgtcgttcagccaatattgtttatcagaatgcgcgcaagaaaagactggaaaaactaggtaagaatgaaattaaaattcggcttgatgatgaaacctttaaaaaattatgcgacttatgtgaggtgctagggtatagcagacctaaaacccaaatgcgtaatcttatagaaatgtactcggaagtttttaaatatctattaagaacaagtgaagataactttgaatacattccaaaaaccaatagggcaataaacacattaaaaacatataaatatgttgatcatctcaaaaatgagaaaaattttgataggaaaagcatcatatccaggctacaagaaaaaaatgtaaaaatcccgacgagatgggatggtgataggctcaaggtatcaggaaatagtgagcgtcttgaaaaatattttcataaaaatgaaatagtcaaagcccttaaattagttgatgaaaaaaagtga

SEQ ID NO: 396795 - DNA, 735 bp, Salmonella enterica
atggaacggagatttaggaggcgcgagtgtgagtccagacctgttttcttaccaagcggcagcaagactatatctcgatcactggcactgattcgatcttatattcgcctgatttatgttatgaaattttatatggtgcagctagtgagaaagcagaaaatattgattatagaatcgcgtagtgatcgtgatatttataatgaaagaaatgaaaggagtacattaaaaagcattttggagttgcaaggagtatatgcgaaagtttttgaaattgtgaatagaaacatgctcgttaaagcattaaaagtagcccaaagggaacatgtaaagtatgtgcatataagtgctcacggtacaaatgaaggcttttttttaacagatgagaggtttatcaaatggaaagattttgaccaaatagcatggccaattttgcgcgggaaatgtatttgcttttcaagttgctctgttgggaatggaatttcagaattatttgattttcataaatcattttgcaatgcaattgttgcaccaataagagatattacatggagtgaaggccttgtcgcatattcagcattctatcatcgtgctcaattatcagataaatcatcttaccaagatgttcgggtaatgaatcatattgttggtgaaaatacatttaagcttattcaatcaccatatatatcctcaacttacacgttagatggattaataaaagttagtaaggagaaataa

SEQ ID NO: 396796 - DNA, 813 bp, Salmonella enterica
atgaataactcagttaataaaatgcttttacttttatcactcacgatctgtagcacaagttatgctgcctcatttgattgtaagcaagcaaaatcaagtacagagaagatgatctgctctaattataagttaaacagacttgatgatttcttggataagaattataaaatcgccatgaattctgtaatgcctgataatgtcaaatcaaaaataaaacaaagccaagttgagtggcttgggaaacgagacacatgtggggatgctaaatgcgttcaggatatgtactctaagcgtatagattatctctgggatgaatgcttcgattatattcgagggagaatagaatacgttaaatatactgaagcaatggatgtaattaataaagaggagaatgcgaaaaacaataaatcaccagaagatattattaagagtttttctgttaagcatggcggccagatccatgatttagggtatacagaatcacagttacaatctactatatttatcaatctcgatggttatgttaaatattctactttagagaattacttgtcattaatgtatgaattaccaggatttaaatcgttagataaaattgactataaagattatctaggatttaggataaaaatttcaggacagccatatactggttttgttttaagagaagaagatgatgagctttatttatctggccttgtatcgggtgatgaagtcattgaacctattacagtaagagatgtaagaggtctttccagcgtatttatgagttacgccagttacgccatcaataaagataaatttaacccatga

SEQ ID NO: 396797 - DNA, 360 bp, Salmonella enterica
atgaataaaataattacagcttttctaatgatcgtaaacttatctgtggctcaggctgatgaatatgtaaaacggaatggtgtattatccctgtttttaaataatggaatagctgagtttaatattaatgcatctcatggtaaagcgtctggtgtatgcaatatagatggcactgcaagggcggtgagcgcggctgaagggcaacgaaatcgctgggtatacggcgactcatcgagtgcatgtgtggctgtaattagcgaattgagcgatggctctgttaatgtgatgacccgtagttgtgaaaactattgcggcatttctgctgtaggctctatggatggtaaatataggataaaatga

SEQ ID NO: 396798 - DNA, 633 bp, Salmonella enterica
atgattagctattgcaccgaaaaaacagtagagtacgcattaatcccagcattttctgacatccttaatgcgctaggtgaaaatgctccaatatactactggaaatcacgagagggtaatcttacatcgaagcacgtaaataatgctgaaaaagtttacttaatcgtttttttcgcgaggaggcccaaagttgaacaaagaagtaactctgatatacaagggaaaataaaccaatatatatttgaatttaatgcgttagcaaaaaactacccaatagcagtgttttgtggtattcctttagccagaaacatattcgagatcaagaattctggtaaaatgtggttctatgtcccaggcaattcacctgatgaatatgaggtcatatttaacatctcaaatggagagtatagacaagtttatgatcccctaaacattataaatccaatcatgaatgaggatatttgcaaaattatagaacatagctgcaaagctatttcgtggacagaggctttagaaattatggcccagttaaatcataggaataataatacttatatgccttggtttcttcgtagatggtcgtataagccagtttattttcttgttaaaagtgaactgtggaataaatcataa

SEQ ID NO: 396799 - DNA, 174 bp, Salmonella enterica
atgaaacattttttcgtatgcatgaaactcaaatttaatattaatttccgtgaggaaattcacacttacataaagctaaaagatacgcaaaatattttatgtataaaaaaacctaccagatttaataatttttatttttttcatgaggttatgtggtttttcacaaaggcttag

SEQ ID NO: 396800 - DNA, 219 bp, Salmonella enterica
atgagtgaatcacttaagacaaccatcagactcaagaaacaggaatcagtagaactccgtgatatcgctttttcattaacgaaaaaagcgatacagaaagggaaacacaaggtttattctgagtcagatttagttcactttgctatagaaaaaacgttaaaaaacacagatttggacgatgacggtaatttgatgtacacaaagcataagaacaactaa

SEQ ID NO: 396801 - DNA, 150 bp, Salmonella enterica; identical to SEQ ID NO: 392121

SEQ ID NO: 396802 - DNA, 960 bp, Salmonella enterica
atggatgttcagattattcagccagtttttgaggcaatagataacggtttaaatggtacgctggctaccggaacatcaagaatgatggcggtcgtcagtgttatcattggcggtttctgggttgtatatattggaatgcgctcgctttactggtattttcaggggctgacaactgttattgaagatatattccggcaggtgctgaaatgtacatttattacattttttgcttttaccattcagccttatatttccgtggtcgttccttttgtcactaatgccccggctgaattatccgccttattgacgggtaacagttcgggacataacaatcagattgatatattaatcagttcgtttattaatactgtggtacaggtatttaaggctgtagactgggggatctggggagatgaactgaaagccaccattgccggagggatttgtctgatattgttaattccttcaggaattatgtttctgggggtatgtatctctgtcctgattgttctgaaagtatccacaacattattccttgccgtaggtccattatttattgcgctggcattatttgaacagacaagacagtatttttatgggtgggtcagtgttattggtggttttatgctggcaagtctgatgtttggcgttattatttccatagagattaattatatcatggaaaatgtgattggttccggtggaattattaagattcagtggacaagcatagtatccattcctcttacatttagtgcatttaccgccattgctcagtcattgcctgattatgcggctcaggttatgggcggtgcgtctgtgggtaatggtggcggactcaggggaatgctgggttccgggactggcatcagagccggaattaatgcaggtaagggaattggacgggggattaataatgtccgcaggatatacagtaaacgcaggattacaggagggtaa

SEQ ID NO: 396803 - DNA, 684 bp, Salmonella enterica
atgaaaagaaaatatctggcagtgtgttttgtttttatattatcaggcggtatcacatcaccggctgcggcagccggtgttccgaccgtcagcgttccggaattatcacaactgatacagaacgcccagcaacaggcaaagcaggcgctggcacaactggaaaaagcaaaagaagccattcagcaggcgaaaagtcagtacgagcattacaaatctgttacggaggggaatgacaaattaggcgcatttctgaacgatccgtatgttaatcaactcctgcccgttcgtgactggcaggatatttataatcagactcaggatttgacggacttacgtaagcggtatggtgtaagcgggtatgaaccacaggaacagaaattcttcgacagtctgttaatgcaggtcggagttcttgaagagcagtataaggccacgaatacccggataaaacacgccgaagggttacgaaagcaactggataccgtgaccacgcctaaagaacgtgagcagctcgcattacgttatcaacaggaacggcttgaactggaggcacaacaggcacagctacagaatacccgctacttaatggaagaaaaaaagcgtctggaaaagcagaaaaatgcgcaggattttctcgattatatggatggcaaacgggacaccttaccggagatacggcgatga

SEQ ID NO: 396804 - DNA, 204 bp, Salmonella enterica
atgaatgactggcgttctgcaccccgcaggggtaaagcgcggtttatgaagcacctggacgaaataaaacagcggttacgggatggatatacaaacagggagatatatcacgatctgacgaataaagggcttgatctcagtgaagcgcagtttaaccgttatatccgacgttttctggcggacccggcagcacgggaggattaa

SEQ ID NO: 396805 - DNA, 423 bp, Salmonella enterica
gtgagcgacaggcgtttaaaactcaggacgggaaaatctcagtttgtaaaatttgccccccagataagacaacggcggcgggaaggatataccaacaggcagatatactttgatctcgttgatgaaggtcttcaaatcagtgagacgcagtttaatcgttatatccgccgtttttacggagaaggagcttcacagggggaaaatgttgttgctgaagacaaacggcactccgggagtaagacgactgattcagcaccgtatgggtggaataatatggccgtcacaaataaaaggctgattcatgacctggaagcatatggactgacgccggatgatgtccggcaatgggggctaccgaatgaaacggctatcaggcaaagattaatgataatgcaggtgaatgattcgcgcagtaagtcttaa

SEQ ID NO: 396806 - DNA, 219 bp, Salmonella enterica
atgagtgaatcacttaagacaaccatcagactcaagaaacaggaatcagtagaactccgtgatatcgctttttcattaacgaaaaaagcgatacagaaagggaaacacaaggtttattctgagtcagatttagttcactttgctatagaaaaaacgttaaaaaacatagatttggacgatgacggtaatttgatgtacacaaagcataagaacaactaa

SEQ ID NO: 396807 - DNA, 1116 bp, Salmonella enterica
gtgttttttgactggctatctatcgaacaagatttcggttatcaacttccgattatctcggcggtagcttatcaacggatacaccttgaaacaggggaggccagtgcgctttctcagccgaccttccagcatcgtggatcgttctgtgatgttgtatcagtttcgatccgtggctctgtcttaaaaatgtcggggaatccgtccagatggggacgcctggagaatctttttggtctcccaactgttgacatgtgtgtcatggtctttaatcagatcctttcagatctgggtttacctgtatttacccggtgcacaagactgatgcccggtcagtcaaaagaaaatgaaaaagcacatttatttaccgatggtgcattaattaaagaattacatataacgtccaataaatcagtaggcaaaggtaatgaggatgattatatatcaggtatttccactcagccttacagaaatagtgttccccgtttacattctaacggtaaatctgttgactggctttcaaaaaagggaaatgttaatttaatctatcctactgtttataataagtctcacgaacttgaattacacacattatcaaaagtgaaaaataaatttggttcagactcaaaagagtataattatttattaagtgtcatcgagtattgcaaggataacggaattgtaagatttgagcagaaactaaagtcccgctttctgcaaaaaaaatccctgtactattggggactgtctgattattcagttttgaataaattacatgctgactttcttgaccttgataaaaaattatcggtgaatgctatggactttgaaactattagtgaatgtcttattagtagtggtgtagttgatactactcgtgcagctaatactacagctatgtatgcaattcaatggttctgtggtcgttcttttgatttgaataaaaatcaagttcgcattcatcgtgccagattacgtaaaattggaattgatatagcgcaaaagtgcaatatatcgaaattctcacctgttgttgtgaaacaaacgagagaaattaaagtgtctgaatgtattattccgcaatggtatataaaaccatcacatttacgtgttgcataa

SEQ ID NO: 396808 - DNA, 324 bp, Salmonella enterica
gtgtctgattatggtctgtttataaaagggaaaatgctcggagccagacaacaaccgaaaagaaacgggcaggggtattataatgaaattggcgtggagcttgaaatccccaatggttttggaggagtgaaacaggatttgattattattcgggtgtctcagtcgctggttaatgccggggtgttgaattgtgccagtaaactgaccggaaaattcgtacagatacccgtatatgtccgaccgtggtcaatggatgggcgtgaaggtgtgacttataacctttcttctgattcagtaataaaagagactaaaaaggaaagttga

SEQ ID NO: 396809 - DNA, 228 bp, Salmonella enterica
atgcaatatgtgaaaattttactgatatctcttgccggattttttattactgcctgtgaagaaaaggttaatgatattgactggtacagaaataactatgggcaggcaaaggcagtagtggataaatgcaggaacgggaaaatgtctggtcagaattgttttaatgcccggcagggaataagggaatatgaggccggaaaatttttagagcaactcgacggtaaataa

SEQ ID NO: 396810 - DNA, 576 bp, Salmonella enterica
atggctgaacatacattagcaacaccggagcaaaagatcacggattctttaaagtataaaattggcgaacttgtcctgctggagctggcaaactatgtcaccagtgaagcgcggctgaatgcttataaattttctgatgcaatccccccggaactcattggcgcccttgaatcgctcagtctgggagctatacgtgatgtgtccagacagtttgccgagaaatatattactttccggcttgatttcactgcactggttcatgactttgcacaggagaggatcaggaaaaatatcattaaagagctgattctgcggctggcgtcatacagctatattaaggaagtgacaagatgcagcataaaggaaattaatgatattgaacgggaaattaatttttccggaagtaagacaggtaaaaagatccctgttggtgaacatgattatatccgacgggtatattctgaacattatgactttttaaagggtgttgaattttctcaggcaagggcattaattgccacatccaggaaaaccggttatccggtatttcgaatagaaaatatcatcttaaaataa

SEQ ID NO: 396811 - DNA, 768 bp, Salmonella enterica
atgaagtccttttttctttttttaattagtgttttttattcctcttcttcattttcatccggaactataggaattttgcatggagacaaaacgataacgtataccgcactttttgatactgatgtgaaatatattgaatcaaaaacaggcgttatactgaagaacaaaaaggtgtacagcctggatgatgaagtattaaaaaaagatgaggatgttcttgaattaaaagaacgtgttctcaacaacagactctcccgggcaagaaaaaatgtcaccacaacccgggaaggtctgaagaaagggtttctggctgagtccgatctggatgaggctgagcagagcttatatgagttaatcattcaggaaaaagagaacagaaaaaatattgatgtgctgaataaaaagaaatcgcacctttcactgactgtcccgggatactttataataaggaacagctttgtttactgtaatgcttatctgaaggcaggtgatgatattgttactgttgaatttttaaacactcttcaggtggatgtgaaaacggacccggtacagctttccgcattaaaaacggggagtgatataacctggcgttcacttgtcagtaataagagtggggcgggtaaggtatcatatataaaacaggatgatgatattacgtcaggttttaaaaaagtggttgtatccattcctgatgaatggagagaagaactgattaatctggtcgatacgccatttgaggttatttttgatgataaaactcattaa

SEQ ID NO: 396812 - DNA, 423 bp, Salmonella enterica; identical to SEQ ID NO: 391962

SEQ ID NO: 396813 - DNA, 1365 bp, Salmonella enterica
atgaacttaaaatacaaatccacaaaaaaacaaaaaataataatgtctttagcgcttattagctcatttattgtttttgtggattcaacgatagttaatttagcacttcctcatattgaaagttatttcaatccagatcgttcgcaattagaatgggtgataaatagttacactctttcttttgctgctataatgttaagttcaggttcattatccgattgtctaggccctagaaaaatttttattctaggcgtatcaatttttttgttttcatctatagcctgtgctatttctaattccatccttatattgaatctaagtagactcatacaaggtatcggtgccgccttaatgttgccgagcagtttaatattagcaacaagaactcaggatgatgaaataaaaagaagtcatactataggatactgggccgctgccgggggaattggtttagctgccggaccattttttggtggtattttaattaattttctaggttgggaatctattttttgggttaatgtcataatttgccttccattattaattttggggttaatccatctccctataattgcagctcaaaaaagaaaactagacatatcagggcaattgtcagcaactacatgtatcgctggattaatatttttgttaatagagggacctgtattaggctggtctcacaattggatagtcacatcactaattataatgatagccagtttcattatatttatagtggttgaaaaaaaaacagactcaccaattcttccaaatgatatttttttaaataaaacttttttcatatccatcttgcagggggcgctttttaatttcatgttctatggattactgtttgcccttagttttaattttcaattacactataaactttcatctattttcagtggattagcatttttaccttttacaggtttagttgcagtaggtaatctttctgcatccaaattagcaatgaagtttagtagaatacatgtactatatatagggcaattcatattgattacatcgcttatattgatactttttttcgctaaatttcatatccctctatggtgtactcttttaactcttctatttacgggattttcatcagggctattagttccaacaatgactgcacagactctaagtacagtatctaaagaattacatggtgcagcatctgctgcattcaatacgtctcgtcaaataggaggggccattggtgtggcaatatttggtcccttattaggtgttactgccagccttgaaaaaggattcattatttgtttggctttagcaagctgttctgtttttatttccttgctatgtaaccatttctatttcaataaaaaaaattag

SEQ ID NO: 396814 - DNA, 123 bp, Salmonella enterica
atgaataagcgggtgagaaacaatcgttacttcgccatggaaaaggagttacgggaggaaatacaccgcttcttcagtgaaatattaccggaaattgacgagggtattatcctgtcggattaa

SEQ ID NO: 396815 - DNA, 315 bp, Salmonella enterica
gtggagttctatattcatcactactgtacgctcctgaaccagcgccacactgtgattacctgccccgtcgaagatactatgttctttctgcgttatcggattcgttttctggttgtcaatgatgaatcgggcgatattcagagtccagtgatcagcagacaaaaggacacaccgaatccgatcacagataaatcaatttcaagtgatacgaagcatggccttcagaacctaatttttctcctcaaccagatgaatgctcatgttagtaaaaaagaattgctcatgaaaaataaagcatccaaaaagaagatgtga

SEQ ID NO: 396816 - DNA, 759 bp, Salmonella enterica
atgaaagaaaccccctcatatattcctgactggataacagtatttgaatgtgtaaagttactaaacaacttcacatcacgacaacttaaagaaggtgatgtttatcgttgtgctttatcaggaaaaattaaactctcaatttatttccagtctccatttgcgctacgtaaaatatcaaaagcaaatagtaagattaaactaaaaaattccaatccatcacttatccacagactgtgttttctggataaaaattcgtttctcaacaacacgtcttttattgccagttctgaaggaaagtatcttacacctgataaaagcattttagatacatctttaaacggacatgagtatgtttctgttcaacatttacttgctcattcactggattttcctccaccagtaaaaggcagacattcttttaattatggtatatctgtacttatatgtggtgaaatttttcaggtgtttgaaaaaacaacctggcagaaaagaatttctcagcaactaatgaatttacccaaatcacttgttcatgaagtccgtaagactctttccggactctctccccaacttttatacgctcaggaatatttcccgttgtatgacttacctcctgatgcctgtttgtcattcggagaaccgaacttgagaaattactcaaactgtacatttctgctcccgtctcaacccgcatctccagcgcccttgcccgcttcttctggctggcctgctggcataatgaatccatacgttcattaa

SEQ ID NO: 396817 - DNA, 192 bp, Salmonella enterica
atgacatctcaccagctattacgtctgaaacaggtggaagctaaaaccgggataaaacgctcgcaaatttatctgtatatgcagtctggcaacttcccgcactccatcaagattggtcctgccagcgttgcctggcttgaatctgaaattgatgaatggatagaccagaaactggaacgacgtaaacggtga

SEQ ID NO: 396818 - DNA, 582 bp, Salmonella enterica
atgttttcccctctgaattacgtggtattaactgccgtactgtatgccctgaaagaaggtcatctgcggtatgcctattccctgggatttaccgttgatgaaatgcaacgactgattcatctgtcccccgacgatctcttttttatcagccaggcatcttctccgttcctgtccattcaggttaatcacaataatctgcgtcatattcttgaccgggcaaaacaggaagaaaatcacctgctgttaattgagcgggccataaagcttggtgcttcacatgaaatactgaatgaatattttggactcaacagtcgtgacgtagctgtccgccgtcttttgctcggtgtcaccattccttccggacgtaaatttataccggatgaaaaaaccgatgccgatatatggctcctctggaaaaaataccgcccggttaacctcgattctctcagtgcgctggatatcatgatgcaaattaccgaagcgttgtcttcgccggagaataatctgtccctgacttccgttcgtaaccgcattgtactttttgaaaaaacaatgcctgaagggagaaaacctcatggctga

SEQ ID NO: 396819 - DNA, 216 bp, Salmonella enterica
atggctgatgaacttgaccgcgatcaggaaatatatgatctggatcttgagttgctgattgaaaaaaaccggttcagaactgtttcaaccacctcattattttactgtcatctgtgcggtgaacctattcctgaaaaaagaagaaaaacacttccgggtataaaaacctgtactgactgtcaggaggaaattgaaagacgcctgaaaaataaataa

SEQ ID NO: 396820 - DNA, 222 bp, Salmonella enterica
gtgcgaaaacccctttattacgtttatatcattcaggaaaaccagactgaaacaccgggagaaaaaaatacctggtggacaaaagtcggggtggcgtttccccataaaaacaaacctggcctgaatattattttgatacccggaatagccgtcaccggaaaactcgtattactggaacacagggaggacgcctccccacagacggacaccccggccagttaa

SEQ ID NO: 396821 - DNA, 693 bp, Salmonella enterica
atgctttcaaccaccacttttctttccctcgcgatgcactgcgccgctgctattcatcctgacacctcagccattattgccaaggctgaatctggttttaatccttacgccatcgctgaaatccgcccggcaagagaacatccgtccggtcccggtcatgtaatctcacatttacccgacacccgtaacgccgcgctgcatattatcagtcgcatcaaatctgaaggccgacgctattctgttggcctgatgcagataaccagtactaattttaaacactacggcgtcaccgcccgtgatttacttgatccctgcatcaacctgtctgtttacgaaaaaattctcactgactgctatctgcgaggtggcaccctgaaaagggcgctcagttgctattattccggcaattttgacacgggacaacagccggaaacggcctttaacgggacaagctatctccagcgaacgggctattctcctgtggcgacacagtataccgttcctgctccccgtgataatcacacgctttcaccacactccctgcaaacctctcctgcggcagtccccgtccatccccgtctgatatggccggaagcagtcgtgcgcggtgtttcatccgcgctcagacagcaacagaccagaaccactgtacggagaaattacagcatacccgctactgaggaggaaaaatga

SEQ ID NO: 396822 - DNA, 291 bp, Salmonella enterica
atgatacttttccgtaaaataaaaaccgctgtccgtcgcctccccgcttatttgcttcccgccgtaccgtgtcctgtattcgctgatggtttccagcgggcaaataccgtcatgcaaaaagtttcaaccgggttgcatggtctggctgccatcacgatcaccgtggctgttatctggattggttacaaaaccctgtggaaaggagaaagcctgtcgcagtgcggctacatcatcattggcggcattttaattggcggaggcagtgaaatcggcgctctgctgatgagctga

SEQ ID NO: 396823 - DNA, 183 bp, Salmonella enterica
atgaaaaaaatcatattatttacaatcatatcaagtatcgtttctctggctgggtgcaaagaagaagccaaaacgacaaagtggtatcgtgaccatccagatgaattaaaaattgtttatgacaactgtcagaaaacaggaagtgcatcagaaaattgtaaaaacgctaatgaagcccactga

SEQ ID NO: 396824 - DNA, 1071 bp, Salmonella enterica
atggctggtattttttcgtcagtagagaaaaatttaattggtggaataacccacgctaccagcggcctaatgatgtcttattcttctatgatgatgggactggcggcagcgtcagtcaccatctacatcatgtggcgaggatatcagacgctggctggtaagctctctacgcctatggaagacacgatgtgggacatcatgcggatggcgatcatcctgtcttttgtggctaacgtcagtggttatctcaatggagttacagacgcaatcaacggattaaaggaggggttttccggcggagaaaacatatggcaaatgttagataatttatggaaaagtgcaagagtattaggaaaaactctacatgacatggataattctacttatgttaaagatgaggggtggatagctcaattctatgtctggcttggcatatttattttaatgattattacagcttttgtttcgatgatagctgaagttatgattctattactgagcattacagcccctgtttttatattttgtctgatgtatggttttttgcgcccgatgttcaacaactggctacaaaatatttttgcagcgatattaacaatactattttcagctttatctcttcgtattgttatcaattttttaacgtcgagaatggcagaagccaccgcacaagcggataaagcaaatatcgtagaattaggagcacaagtctgtcttgctggtatctgtgcggcaatattggtttatctctccgcaaaactggccgcagcactggccggggcaagcgctaccgtatccatgcaggggctggccgctgtaggtatcggtgctgctgcttttggtgtcgggaaactggccgggggagcagttaaggaaaccagacgttccgccctggacaacattcagggctggaaggatgcgaatgcaggtaagcccagcaagcccggaggtgagtcaggctataacgcttctaaagcgcgtaaatacgcgattgagcagatgatagcccggaacgaagcccgaagagtggcacagtcgagggaatccgcggttaagaagttcaacagctag

SEQ ID NO: 396825 - DNA, 399 bp, Salmonella enterica
atgataaataaaattaaagtaatcatcctggcggcaatagttaccggatgttcgtcgccaccgcctcccgtacctgtagagtgggataaagccgctgaaccattaaataccagtttaccgcaatggagtgacaataacgttatagttccttccccgacaattaacggtaaatggacatcatcaatcagcgcacaaaatttctacgatacaatatggactccggcagtattttacgcagtcgcccattcaacacgaattgtcgtcactgcacaatccggtactgatttctttaatgccaaaagctggcttcgccagaatggcgcaaaaggtgttattgaataccagcccgtctttaattgtctgacatgcagagaaactactatttatttctctcgctaa

SEQ ID NO: 396826 - DNA, 306 bp, Salmonella enterica
atgaaaaaaaccgttatcgcggcgactgtattatgcctgaccgcaggaacaccgttttgttcctttgccgctgacccgtgcgaagttgttctttgcatgtacggaaaagctacgggtaatagtggtgggagtgaatgcagttcagcagaacgtgcattttttaaaattaatgcctttaaaaaacaccatcgttttaatccgggtaaaacattcgatatgcgaaaagaatttttattcgaatgtaaagccgcagcgcctgaatcaataagcaaaatcctttcaaaatttggcagagtgaaaggataa

SEQ ID NO: 396827 - DNA, 303 bp, Salmonella enterica
atgataaatgaatatttattaagaatatatactcaaaaaaaccaggacagaatatctgtatccctggtatatgacacgttatcaaaagaagcccacagatgttgtgggttgtattacgaaatatacgaaagttgttttatcggtcttttgcgcgatcatctttcagaacttaatgaagctgacgcaaataaattaagacgctatgccgaaagcaaaggcacgaaaattgatgatgcgtcctggagtgaagcactggaagctgaaagggagtgcagggctgaaatataccgcgaccagatgtaa

SEQ ID NO: 396828 - DNA, 1737 bp, Salmonella enterica
atggattcccacctgatgcaaaggctgaatgcctttgctgatgcattttcctttttcctgttatggctgcaaaacagccctgttatattatccctgctcgcaggtcttacattaccatttatattccaccttccccgcgaggatagaaagaacgccccgttctggttaaagtcggttgcgtgtgtgtccattttcttttttatatctggcaccctgtcaccgcttactattcaggggttaagctacttttttaagccacttgacaacaacatactgttcagagttccgctatggatcatgaccgtaacatttacggcagcaggattaatctttcatattgcagcccaacgacttttagcaggagaaattgacaatttcaaacatcgattgataaagaaaagcaagctggagagaaataccagaacggatgtacgcaaagtaaaagagctgttacctgacagcacagaatacaacccactcgattacattgatttaaagaaaggtgttttcattggcctgaacaaagatgaccagccgcaatacataaccataaaagaattcaaaacccaacacgcagcaattatcggcacaacaggttccgggaaaggcgtaactgcgaccgttctgctttaccaggccattctttcaggtgaggctgtttttgtagaagacccaaaagatgatgaatgggcaccacatgtactcagggaagcatgtaaaaaagcaggtaagaaattcacacttataaatttgaacaagttaaatttccagcttgatttactggctgatatctctcatgaacaactggaggagctttttaatgccggatttagtctggcgaaaaagggcgaagcatcggatttctatcgaataaaagatcgcagggctgccagaaacacagcggcaatttatgaaaaaggaatgacgcttcgtgatttatttaacactgactttgttcagtcattacgtgaagatgttcccgcattttgtgttgagctggaagaaattgctttagttaactcaatcaatgccaccaatggattttcattaaaagaggtttttgatgaaggtggttgttgctacattattggctcaacgcgaaatcaaaagataatttccgcacaaagaatgattctgacccggctgatacaaatagcagagaccagggacagaataaacagcaccccgcgtactgttgctattttcctcgacgaactgaaatatcatctttcacgccctgctcttgaaggacttggaacggcacgagataaaggcgtgcatatattcatggcttttcaggcgacagatgacctgcgtgactgcccgtctgatttaaatggtgattcagttattggcgctgtcattgaaaacgccaaattcaaattaatttataaaatccagaaccccgaaacggcagaatgggcggccagaatgacaggctctatcctggtcgatgatgaaatgaggaaagtacggactgatttatcattaacggaaaaagtggatacagaccgtatgataagacaggcagaaagttattacgttgacagtaatatgtttttaaacctccctgaaaaagttggttttgtatttacctcaaccgaactaccaagagctacaaaaatgtttcaggttcaggtcaaaaaagaaaatatcgagctgctttcatttgagtataagcaagccacgccgggaaaaaatgaaagtcaggaacataagccatcaattaatctgtga

SEQ ID NO: 396829 - DNA, 135 bp, Salmonella enterica
atgtataaagaatcaaatatccgaaaaggactgaaatattcaaaaggtgtcaggatatttatcgcgggtctctttctggctacgttattttttatggtgttttttgtctacatagtgaagactgcctgtctttga

SEQ ID NO: 396830 - DNA, 543 bp, Salmonella enterica
atgaaaactgattccagtatgattgaaattaatgttctgtgtgtgattgatactgaacttgtaaagaaaaaatatgctcacccaagtaaggacccggcgaacccgacaggaattgtacatgacagtgagtatatgctggtaactggtgcccggggggatgttcgtgggcagggtacagcagacctgagttttcgtgccaacgtcggggataaggtttcatttaccgggacatcaatctatgcaaattctgatgatgccgtgattgtttatggtattaaatttggaagtggtacagatgttttcagccagtttatccctgtagtatttactcgtcatggagccgtcatgcccgcttcggggactccgtgtggaattccacctttaaataaggcggttaatttctcaaagtatagtgccgatgttcaggatgcgggaacagagaatttcattgtttgttttgcattatatactcttgatgccacaggagagaatcaggagctgtttggatactactgctgggacccggcgataactgtcttataa

SEQ ID NO: 396831 - DNA, 246 bp, Salmonella enterica
atgaaattttgtgaacttcatggggatgttgccgaagtatttaatgatgcaacaaaatcttttgtcggtgtgaagtattcacctgttctttatgtcggtaaacaggtagtcagtggttgtaactacatgtttgtctgtaagcaaatcctgtctacagagcataaagatacacatgtggtgaagatggtggtttataaacctgtagccggtaaagcagaaattctttctgttgaacaactgctttaa

SEQ ID NO: 396832 - DNA, 474 bp, Salmonella enterica
atgaaaaaactgattatcgcagcaggtatcgcagcagcaactatggcatcttttggtgcgagtgctacagattatacttcttatgcgagcgtgaatactgtagtgacgggagatagtggtttctccatcactacggtagataaaacattagattctacttcctttaaggcatccgcggctgaacttggccaatttgttgttaaagtcccgactggcgcaactaccgttagcctttccgatatccatgctcatgattatccgaatggttacgtggttaagattacaggtggcggtagtgaatgcattgcgactgttggtgcggctggtgcaacaaccctgaagggcggggcatgtgacatcactggggtgtcaggttcagtaactctggacgcgactaataatgcagcctttgttggcgacgttatccctggtaccaaaaccctcactgttaaatttacttctacagttaactaa

SEQ ID NO: 396833 - DNA, 735 bp, Salmonella enterica
atgcgtttacgtacaggaatattagtggcagttttttcgtttttttatgcgggaattgttttagctgaaaatcatcagcagacattcagtgttgacttgggggcctcccgtatgatttatccgcttaatggaaagaatgctgccatccgtgttgataacaaacaggattatccggtgcttgtcagaagcaaagttttgatggggtcagataaaaaagttcctgctccttttattaccactccgcccatttttcgtctcgacagccatcagtccagtgtggtgacggttacccgcacgggcgggaactaccctgatgacagggagtcgctgaactggctgtgtgtaacggcagttcccccggataaagatgctgagtgggctaaaagggaaggtgaaaaaggtgtcactaataatattcaggtggtacttgaaaactgtatcaagttgcttgtccggccggatggtctcaacggtaatccggctgacattgctgaaaaaataaaatggaaagcagaaggtaaaaatctacatgcccataatccgacgccttactatatgaatatatccggtgtccgttttaatggtgaaaagctgaagctaaaggatggatatattgctccttattctgatgtggacatgcctttttcttccgggctaaaaaaagccggggtcgtgaagtggaccgtaattggtgattacggtgaggcgctaataatgagatctgatgtgaactaa

SEQ ID NO: 396834 - DNA, 138 bp, Salmonella enterica
atgaattttcaggaaataaaaacaacgctattccccttactgacacttcgttccgtagcgaattattctgttccggataaggctatactcagaaacttctacgctgaaggatactcaaatggaaacacaacaggttaa

SEQ ID NO: 396835 - DNA, 957 bp, Salmonella enterica
atgacgatgaacctgcatacccggacaagtatttctaattccgcagaggcgaccagcgtattgccgctggagcactcaggctcctcaaaaacgaaattttgtaaaggcaatgataaaaaagatatttatcagacagtaactgaaagcattattgaggcgctggagtccggcgttaagccctgggtatgtccctggaagcgtaatggtactttgtccggcattccctctaatttcaccacaacaaccgcctacagcggtatgaatattatgttactgtggtgcagtgcggcaaaacagggattcaatgattcccgctggctgacctataaacaggctcaggctttgggggctcaggttcgtaaaggtgtccgggggaccacagctattttttataaaacgctggagaaagaaaacggacagggggaacctgagcagatcccaatgctgaaaacgtttacggtatttaatgtggagcagattgacggcctgacacttaacagtgaggaagggataacacaacccgtacctgaatttgatccattaccccaggttgaagcgctttttcaacgtagcggggcaaaaatcactgaacgtggacaacaggcatttttcactccggtaacggatgaaatttatttacctgaacgtcatttatttactgatgctgcaaatttttatgccacaggattacatgagctgacccactggagcggcggaaaaaaacgcttaaacagagaaatgaaaggaaaatttggttcagaagattatgcttttgaagaattaattgcggaattaggcagcgcttttttaatggctgatctgggcgtatccggcgatgttcagcatgaaagctatatagcgtcatggttaaaagcactgaaaaatgataaacgctatgttttcagggctgccagcgctgcttctaaagcacatcgttatctgatggataagcgctga

SEQ ID NO: 396836 - DNA, 219 bp, Salmonella enterica
atgctcaagccactgataaaccaaagcaatttgcagtattctattccgttgaaatctctatggaatatattgtgtattacatcaataaaaattccggaaactatgctcggtggtattcaactcaagaatcagcacaaaaattatatagaaaagaatgcggtgctattatacctaaatttactaacgaattttcagatgctaaacaatgattacttttaa

SEQ ID NO: 396837 - DNA, 465 bp, Salmonella enterica
gtgtctgtgttacccaaaattgtctggccgatcccctccaacaatcggggaagtgaattcaaaaatcagaaagagatcctctctcatctgggaggagaatccaccgggctgtatatgataggccgcagcgggatgtggcatggagggatccatatcaccgaagccacgcccccgtggtgtgcacttagtggtaaagctcctcttgaagcgatggatttcccggttccctttaaaggtgagcaggcggtgcaatgcatggctgacggcgaagtagttgcttatcgtgtctgcaaggattatctgacgcttgcatgggaatccggtccgctgagtttttcgggttcgttcgtcctggtaaaacactatatccagcttggtgagaagaaagaaagcgggctgcatttctataccctgtatatgcacctggctccgtattctgcttatgagtcagaatcggaaaattag

SEQ ID NO: 396838 - DNA, 711 bp, Salmonella enterica
gtgtctgtgttacccaaaattgtctggccgatcccctccaacagccggggaactgaatttaaaaatcaggaagagatcctctcacatctggggggagaatccaccgggctgtatatgataggccgcagcgggatgtggcatggagggatccatatcaccgaagccacgaccccatggtgcgccctgagtggtaaggctcctcttgaagcgatggatttcccggttccctttaaaggtgagcaggcaattcgatgcatggctgacggcgaagtggttgcttatcgtatctgcaaggattatcagacggttgcatgggaatctggtccgctgaacttttccggctcgtttgttctggttaaacactttattcaaccgggggagaaggaatccagcgggttacatttctataccctgtacatgcacctggccccctattcagcctatagtgtcaatccggcagaaacaaagtggaccctacaggactcactttcagcctacgatccagagtgggtgatgtctgccagcacaaagaacaaagatgtcagcgacagctattcaaaaggcacgatgcctaaaggtgcaattgtagaatggaataagtctgacggaagtcttcataccgttgcgttcaataaccgtgagtacggcctggttacctttgtcagtttgtcagaggatgcactgaaaaaaggcaaaaaaaaaatcctttaa

SEQ ID NO: 396839 - DNA, 810 bp, Salmonella enterica
atggaatttataaaaaatgaaataatttattgcaatgaatttggtaataatactcgctgcgcgatagaactagcattaattgactgggcagaaaaaaacaaaaatataccgctattacctacaccattaattaacagtcgcccttttgtaccagttatagatagtgttggacggtgtagcgtggcagcagaaatattaaaaaaatcgagttttataaaattaaaaaacacaccaaacattaaagatatatgtttaagaattacacaattacgaaataagacaaaagctaccatacttatagatatcaataactctttgccacaacatgaaatagaacaatatgtattgaattgtttaaatgctggagctgaatggtttgaagaaccatgcctattgcgagattatcaatttttaaataaattaagatcatatgatgcaaaaattttacttgatgaatcagttcaatcaattgaagatctggtaatggcacttgaaaacaaagccattgatggagttaatattagaatttcaaaatgtggtggatttaataactcatggagcttagcccaatttgccaaaaaaaacatgctgaaaagatactatggtgtccaagtagctgaaataggtagtttaatttccgcaggacgaattttatcattgtcagacaaagattcattaggtgttgaagctggtcaatcagatgttttcttcaattcagataaactttggataaatgatcctgcggtaatcagagagaaaggaataattaccagaacacaatatgataaattaaatggacggaggccctga

SEQ ID NO: 396840 - DNA, 336 bp, Salmonella enterica
atgagttcacctatcttattgaaagacataaaaatcggcttaggatgtatgggtatgagtcaatggtacggctcaaccaatgataaagaatcagcagaaacgatattggaagctctagataatggcgtcaattatcttgatactgctgttgtttatggtccatatactaatgaagaactcatagggaaaacaattaaagggaaacgtgataaggcatttatagacacaaaatttggttttcctatgatcaaatcagatggttcacaaattccgccggatagcacccccgagagtattttagtgagaagcgatttaaatacgtttcggataatataa

SEQ ID NO: 396841 - DNA, 1257 bp, Salmonella enterica
atgcctttaaccgacagtaaaatccgcgcagctaaaccttcaacaaaatcttataaactcactgattcgcagggtctctatctgaccatatctgccagtggttccaggctgtggtattttcgataccgtttctctggtaaagaatcccgtctctctctcggcagttacccacatgttactctggctgaagctcgtgaaaaacgtgacgcagcccacaaaaaaatcctctccggtattaatccatcacaacaacgtaataaagataaaaagtgtataactgaaactaacacatttaagtctatagcgacttcatggcatacaagtaataagaaacactggtcagaacaccacgccaataaaatcatggtttgcctggaacgttatgtatttccccatacaggcacaatggatatccaggaaattgaaacccgacatctggcggaactggtcagggcggttgacgatagcggggtgcacgatgttgccgcacgtatacgacaatacctcactaaaataatgcgtcatgcagtacagcaggggattatcaggtacaatccagcgattgatctggcaggcatcgtttctcccgtaataacccggcaccaccccgctcttcctctgcgctgtctgcccgaacttctggaaaaaattgataattacaaaggccgggaactgacacgccttgtactagaactcaatctgcatgtatttctgcgttccagtgaactacgctttgcccgctgggaagaattcgacctgaaatcctgtctatggacagtaccagccaaacgaacagccatagagggagtgcgattctcagaacgaggttcaaaaatgaaagatgagcatctggtgcccttatcccatcaggctatttctttgttaaaacagataaaaacactgacaccccagtcggatctggttttacctagtgcatactctcaggataaaccaatgagtgaaaacacaataaataaagcattacgcgtaatcggttacaacacaaagactgagatttgtggtcacggtttccgcgccatggcctgtggagcccttaacgaatcagggctatggtcaaaagatgctattgaacgtcagatgagccataaagaacgcaataaagtacgtgctgcttatgtacatacagcggaacatctggaggccagaatagaaatgatgcaatggtggtcggattacctggatgcaaaccgaaaaaaatatatcgccccttatttgtatgattcactaaaaaaataa

SEQ ID NO: 396842 - DNA, 399 bp, Salmonella enterica
gtgcccggactcggaatcgaaccaaggacacggggattttcaatccatggtgatattcctgctgtcgaacgagaattgcatccggataagagcgaacaggagaaagcagccctgttgcatctaacacattctcttggtgaaaagcaaaggaaggaaattctgtcactctggcaggaatacgagcatgccgtctcgccggaatcgaggatcgtcaaggcactcgataaactcgaaactatcctccagcacaaccagggcattaatccaccagacttcgattacgaattcaatctgacctatggtctggagtacacaagcacacatcccttattcatattgatgcgcgaaatcctcaatgcagatacgcgccaaaaaattgcagagcgcgcacaactgtag

SEQ ID NO: 396843 - DNA, 492 bp, Salmonella enterica
atgtctaaccctgcattccgtctggccactgctgccgatgttgaccgttgctatgatattgaaatctcttcctacgaaggggatgaagcagcaacgcgcgagaaaattgccacccgtattaaccgctatccggaaggtttcctgtgcatggagctgaacgacgacattattggtttcattaatgcaggctgtgcgtgggaagtcgtgatgtccgacgaagaattcaaagaactggtaggacacgatccggatgcgcccaatgctgtgattatgtctgttgtggtgcatcctgactaccagggcaaaggatactcgtcgttactgatgcgtgaatttgtggcgcacatgaaggcaatgaacaaaaaaaccattcacctgatgtgcaaaggtcgtcacgtagatctgtacgcccattttggatatcaatacatcaaaccgtcagaatcagaccacggtggaatgacctggcatgaaatgatgatgactctctga

SEQ ID NO: 396844 - DNA, 972 bp, Salmonella enterica
atgatgtcgacattgtgcaagatcgatttgaatttattacttatattcgattctctttatcggcatgggagcgtgatggaggcggccaacgagctggcgcttagcccttccgcaatgagtcatgcgctcaaccgcttacgagcctcattggacgatcccttatttgtacgcaccggcggaagcatggtgcccacttcaaaagctgagaacattgcggctaatgtttccgctgctctgggcagtctctcgtcctgtctacatgagcctgaaaactttgagcccgaaaagagcaggaagacttatacctttgctgccacggactacactgccgccgtgatcctgcccagcctgattgcgagagttaacctcctcgcgccggggattaccattaagcttatctactcacgcgattttaacgccgatgaagatttgctttcaggcaaagttgatttcgcccttggttttgaagaagaacagaaagccccacggcgtggcattgagtccatcacttgctttactgatgattatgtggttgctgtgcgacgcggtcatcctgatatccatgattcccttactcatgagagttatctgagcgccggacacgtggtcgtgcgtccatggctggaatcacgtggggttatcgatcgttatctggaaagtcagcaggtacgtcgccgggttgttgttgaattgccaagcctgatgattgccccgatcatcgtttcaaatactgatctggttatcacgcttcccaggcgcggtatctcgtcagtttttgatatgaaaaatctgatggtgtttgctcccccgtttccgacaccacattacattctgaaagcctattacagcccggcgctcggtaactcgccagggcatttatggatgagggagcaagttttgcaggtatgcgatccacaaaacgcggttattcctgtaaatgcagttgttccagcccctggcgcagatagttaa

SEQ ID NO: 396845 - DNA, 783 bp, Salmonella enterica
gtgacgacagaacatttttatcccgagtctctggatgatgaatacatggatattatgcatctgatggatgatttatcaacggtgaaaattgatattaaagtcagaaaggcatctatctataaatacagacagtctgaacatcagagtaaagagcgtgaagattatttttcctccagcgagaaagaggttatctatctcgaagaacagaaaaaacgactggaagcgaaaatagatagcttccctccgttgccggtattaccaccgcttgaaccgttgataaaaatcagcggcaccgttgatgaaataacctgtaccaaagcactggcctgttttgacgtgggggcgtacaccacgatgcaggagcaactggagcgcaaacgccgccgtgacagtatcggtacatctgcggcaatggttgcacaggtactggcgggtagcgcaccgcatgtagggaaaacggataacgtttggcagcgggacaagagcgtttatgttcagggaaagattgatggcaggtcttttgccggatgggtggaagctgcggatgttcagtcaggtgagcaggtgatgatggctgcggtgccagatggtgacggatatatgatttacgctattgtagcctgtgaaagaaacgtctttttttaccgccaaagtgtcagcggggagaatatacgaatagtattaaaatctatgtcgttaacatactatgtgcttacattcttttatcgccgatttttgttcaaccattatttaaacacggagcatttattggctcctttgtga

SEQ ID NO: 396846 - DNA, 399 bp, Salmonella enterica
atgaaaatacaatttatatctttacaagagcatagtgatgaacgtggttcgcttattgctttagaagaaaacaataatattccatttcaaattaagcgagtgtattatatatttaataccaagaagggtgtaagaagaggatttcatgcccacaggaagttgtcccaagttgctatagtcatcaaaggatcatgctattttttattggatgatgggcttgcgcagaaaaatataatattaaatgatccttcgaaaggtctgctaatagctcctatggtgtggcatgaaatgtatgatttttcagatgattgcattctcatggttctagcaaatgatgtatatgatgaatcagactaccttcgtaattacgaatattttttaaaagagctatctagttaa

SEQ ID NO: 396847 - DNA, 1278 bp, Salmonella enterica
atgaccgctcgcgggcgacggtatgcgcacgtgtcactggtggaaggtatcaccgataaaatgaacctgaacgccggggacctgctctgggtggtgtgcgataacggcaatctgttgccggaccataacgggccggagcgcccggtatggtggagtaatctgctgcctccggcaaaagagacgatgcagtttgataccgtggtctgcccgacaccgtacccgatacggtccggggatgccatcgggcatctggggtattatcaggcaccgaaggatggcggttataacgggcgctatcaggtgcatattgagtgcgttaccactgatgacttgccgcgctttctgagtaattctgaacatgtggagcgggataaacccgcgtttggcaaatacccggcgggtataccgctctatatgaagaacagcgtaaatgcgatatatcaaagccagttgactacccatcaggacggtatttttcccctgaatggcagccagcacacagaagacaatcaggtgacttactggcaggctggcgcatcgcggggctatcttgcagaatccgacctgaaactgctgtcacgctatgacctggcggagcggggttttgaaaccgttgaagccagcccgcgtagctttgaccacctcgacggcaaaaaccagcctgcgggactggtgcggcatatttttcagatgctgtttaacgcttcctcaaaagacccgcgtaccagtcatgcgcaggtgaaacacaactaccagcggctgctggataaaatcgacagcggtgagccacgctattcggcccaggagtaccgccgggcagtacagaacccggattacattgatcacctgcaacacctgtgtgtgaaacatccgggtgactggtactgtacgtcagatgaccccgtctggcaggctttcttcaccacattgctcaaaaaggaagcgccggaatggtacagctatggtatccgttttctgaacgccactcgctggatggatcaggtaccggacatgtcgcgaacgccatggcatatgcacccgctggtgtttctggatgccatcagcacgtcgaaaaaacgcggctgggcgcacagtccgtttgcagacctgctgggctgcgtggagtcaaagaacgattacacggcttacaaccagatatttcatagtccggaaaggtcggagaatttgcatctgctggagttcgaaaaggtaagcaaatcagtaagggacgaattagcgcgaatgatgggcatggttattatgatggcgatggtttaa

SEQ ID NO: 396848 - DNA, 192 bp, Salmonella enterica
atgacaacccaaaaaacgattaaagagcgcctgttggccctggacacggcagcagtctctgatgcgctggacagcctgtacatttcggggggctgttggggattaagccgcaggtcagcggaaagaaaatcgcggggccggcttttaccgttcaatatgaagcttgtacaccggaaaaaaatcgcttcatga

SEQ ID NO: 396849 - DNA, 624 bp, Salmonella enterica
atgcctgtcagtgccttgctacttatctgggcatttttaacatacagacgtgataataaagaaaaatccgaactggcaaaaaacagttatcttagcgctcagaaaaaagaaatcactacgcctaaatttgagttccagagtaaaacctatactttcaaagaaactttttcaggcaccgttatcgatgtttgtgatggtcatatctgggtcaaaaatgcagatggagttgaaaaacgttttaagatccgcgatgtacctttcagaaaaggtcatcatatcagaaggtacgcacttgttcagtacattaaggatggtgcatatcgaacaattaataacgcgcttatcattaatgacagtacaaacaatagagaaattactgatttttcagaggatgtgttcacaccatcttattttacacctgttaacattattctttacattaccttatttgtttctttttgcgtatgggcgttcacactaaattacggacaagtcattctttctgcattagctctaatttatttcttaagaaaaataacaaaaagaaatcgtcaaaaatttagagctgaagtccatcagattgcaaacagacttgacaataaagaactaacaactattgaatag

SEQ ID NO: 396850 - DNA, 1161 bp, Salmonella enterica
atggcatggaaaatccccgcgccggatgcggttcactggcctgccgcgccgtcgtggtcaggctggtggcggtcgctgatgttaagttgttcagccgtagtgatgaccggatgcggtatttatttctggctgcatgactcgcgggcgctggtttacgcctttgccggtgtggtggtgctgatactgctgtttgccgggattgcgggctggtggatgtaccgttacggcgtactcctggagcacgctgatggcaccacgcagtacaacgccatgctggaagcgcagtggcagaggtgggctcaagaaggcatggtggtgtcaggcgtcagtactcttttccctgaacaggtgcggacaccgcaggacagtggtgagccggtaagtacgttggctccgctacgtctgcctgaatgtccggggtccacgtatttgtttaccgaattgctggctccgctgcgcgtggcgttacagattttcatccgcaatcagtcgctgacggtctgcctgccggaaagcgcgtctgaggacgactggcaatgtttccggtcggtgtgggcggcgctgtcactgccactgtcggcgatccagctttcggaaatgaagcctgagcctttcagccgccagatgacactctggcaacagaaagatgcggtgcgtacgggctggctcattatccgtcataactggacgcctggcagtgaaggcactcagggggcggtggcctggttgttatctcatccggatatccgtaccgggctgcggccctgtgccacgctgcaccgtgtgttccccaccgataataccttacctgacggtgatctccggcagtttctgcaatatcagtgtgtcagcaatacgatgaaaggcgtgtggtctgatacggtcactcagccacatatcagtcgtctgatggtcgccctgagcccgcggcataaggctgtagccgagcagggggaagcgacggtcattccacccgtatcaccggttcagcagtatctgcctcactggctgggcgagatgaaagacggcgaaacatggtttgcggtcacgcaggcaatacagatggcagagcatacccgtgaaacgcaggtgctggcactggctaagggaagcgaggcgtttttgatgagtgtcagcagtggaggtgataatgtcgcttaa

SEQ ID NO: 396851 - DNA, 735 bp, Salmonella enterica
atgaacatacgttatccggtacggaaagccgacggacgggactataagaactatgacgagctgctgaccgacatccgcaaaaacgcccacggttggtggttactgggcattagtcgttactggcacggggggatccacatcgggacgtcatcgtctccggcctcggtgctggatcaggaaacgccggaaaaatccgtgccgctccagttcatgatggacggtgaggtggtggcatggcgggttaaccgcgattacgcgcatattgaatgcatgcaggcgcaatcgcttcgccagtccggcacctttgtgctggtcaaatcggtgtacaagcccgacgagcaggatgaatcctcctggctgacgctgtaccagctttacatgtacatcgcaccattatcagaatttccgaaacgccccctttaccgcgtcacgcaaaaaggccacggggtgcgaatgcgtaaacattcccgccacgatgataaccgtgaaatcgtgccggacgtgctggcaaataaacacggcaacgccagaacgctgatgcaaggtgaaacgctggccgtgctgcaacaaaaatcgtttctgctggatcaacggctggagccgttcgccctggtgcagcgtcttcagaacggaaacccgcaggcgatctgttctgggtctcgatgcgcccggaatatcttgagctggacggggaatgttacgtgtgtctgcctgactggatgcacagcgccctga

SEQ ID NO: 396852 - DNA, 417 bp, Salmonella enterica
atgaccgccccggaagggatggcgctgaccagcggtgaagatatgcaactggccgctggccggaacctggcggttaacgccgggggggatatcagcgtcggaacaatgggcaatctgaccgcactggccggggagaaactggggctctttgcccacaccggacaactgagcctgaaatccggagaaggggcaatagatgtccaggcgcaaaacgccagcctgcggttgtttgcagagaagaagctgaggctgagctcagcgagtgacatctcttttgccgggaagaagcgcatcacgctgattggcggcggaagctatctgcggcttgaggccgggaaggtcgagtatggtacgacggcgtcgtatatgcgcaaagtgaagcggactatggctgctggtgcaaccgattccacttga

SEQ ID NO: 396853 - DNA, 1050 bp, Salmonella enterica
atggaattctatttcattatattattctttctaagcactttgggactgttatccttagcaaataaagaaaaaaataatttttcgttttttgcatgttttataatatgcttttttttcatagtgttgtcttcaatcagatgggatagaggtactgactggtccgcatattatgagatctatcaggcgacgaacattatcggcgtatgcttgaagatatattgcataggtgtcgaacccggattttattttattaattggctattctcctctttttattcttatagcttttttttgttttttttagcctgcgttataattccattaaaaacgttgtttttctttaagaaaagtgaatatccatttattgctttattactatattttagcattttagtgtttgacatttttcctgttaggcaaagtttatctagctctttatgtcttttattttacttgatctataagaaccataaaaaaagttcatttttagttgctctattggcattaatggtacattattcggcaataatattttttattggtttattagtctgctcaacgaaaaaaattcataagggaaaagtagtaattttttcaatttttatattggttttattttttatagttgttaaatacccaccagaaatcctttctagtaggataaatgattatattattaaccaaaaggtttactcagacgacatcacaccgttgaggaatttattaaaatgcctagatcaaatatttattatgtttctatgttggcgcttaatgttagttggttgtgtcgataagattattttaagattatcaatatttggctcatttttatttatatcagctacgcttcttgctcctcaacttgctcgacttgggttattctttgttccctttcaaataattactttatcttcacttatattactcttctctaaaaattcaagacttcttgcttatttgattttagtagtttatgcggctattaaattgaatttaataatacggcctttttatgatttatttgtgccattcaaaacgttttttatgtga

SEQ ID NO: 396854 - DNA, 708 bp, Salmonella enterica
ttgcatggtgaattaaatggcctaagagagttaaataataatattacctcttatgctttttgggtgaagttatatttcaagtctggcctttataaatatattgaaaatattgttgtcggagagcatattaaaaaaggcatttctgaagttcattatattaatccagatgaacttaaatatataaatcatcctatagtgccaatgttttccaataaggaaaaagatattgattgtgcttccataggatacgcaaatggaaaggcatatgatgagcttttcgagtccatcagcaagctagataaaccatttattcatataggcatggtcagtaacgtattatatgagaagtataagtccagttgtatcaagtttcatgctatgccaggtaatgctttaagttacgatagatatttaagtctcattagtcgtactaaatatggtatttttatgtatgcccatgattatagttttactactagtggtgctatgcttgatgctatgagcaataatacggttattttaacgatagcaaatacatttgcagcatatttggatagtatcgattatccagttctgtcttttgattcatcggagaaattatttgagcaaattgataacttacctgattatgacgatcttcttaagaagcataaccctataatagcgagaaaaagattttcagagctttcttccgattgggtgttgtag

SEQ ID NO: 396855 - DNA, 330 bp, Salmonella enterica
atgcaccgtgtcgctgtgcttgagtccgtccggctcaggggcaatttccaccacgcacatcgacggcagcgggcgcagatagtgcggccacagcaggctgataacaccttcggtcagttcggggtagtcatcatcgagtttctgccgaacacgccccatcaggaaggcaaagccctggaacaggcgggtcacagactcatccatcgcaccgttcatcgtcagtcccatctgccgggcctcttccggatgcagctcagcaaactcccgcgccgcatcacgcaggtagcgcatttcggtgtcgaagtagcggagggtcaggtcgtccattaa

SEQ ID NO: 396856 - DNA, 993 bp, Salmonella enterica
atgacgtacactgatgttggaaatggattgtataaaatacatgataattttagagatgccaacattcctgacataagaagttatggtaatcagcaaattggtttaactcgaaataatagtcttattaaaatcacaatgactggtcagaaactaggacataaatttatagtaagtgctaaatatgcaaactcagaaataagagcatttagtaatgttagcggatacttttcgacatataaaaataatggatgcacaaatgttcaacccgcaacagaagttataactggagctacatttgttgattacaatataacatcaaacagtaatgtaaatatggattgtgcagctagcactattgacgttagctgggctttttggctgtatcctgtaaactctataagagttgaaggtgtatccagagacgtataccttgatattggcagtctaaataagtcaaaacaatatcgtgatgtcccgcctgatatttatacggggaaatctagttacaacggcgaggtgataaaaaacagggttggtgatggatatcgagtgtattactataataatattaagataatcaaaaatccttattttgaaaatgtgactctcccggcaggggataacatatttgatgttaaaactataggtaacgatatcaatgggaatctggtgataccttatgttattaatggtcattttacaccttataacagaatcgttcttaatgtattgtcattgaatggttttaagctgaaagattcaatatcaaataaaagtataccctattcattatctacgaacattggtgggcagaagaaatatactctcgcaaatcttggggtaggtgcaggtgcagtaacgatcggtaatcttgcaaatgaaagctacgccttacaggggaagtttgatgcggattttactatagataaatctacagctgtagttggagattataatgatgagctaactgcaatttttcagattgaattatag

SEQ ID NO: 396857 - DNA, 423 bp, Salmonella enterica
atgaatatatccaaaatgaagttgcgtttaatgctggtgttaggtctggctgtaatgaactcagggctaaacagtgctgttgccggcggttcttcagcctggcaaccaccatccgcgtctcagtgtatttatcaggcgaatacatccagactgacatttctgttaacagcaaataccacatgggataagtgtaaggaggctttcagacgttatcagggtattgatattaaagttaatggcagtctgcggcaaaactcaaccggaagagtgctgagcgtgcgccatcaggatttgttaaaacccgggaaatatatctacccgtcagtaaataccgggtcagggacccagatgctgtatcgtcttaatccaaaggattacaccgttttgggagcgttcagttacagtgcagaatggcgtaagtaa

SEQ ID NO: 396858 - DNA, 687 bp, Salmonella enterica
atgcgacttatcttttttttaattagtttaatgcctttgacttcaagtgcatttgatatcgatgggatgattaaagtttctgatacagaagacttttttttagtcaatggaagtggcagtggtcgggaatatttgtatgttactctttctgaattaataagtgatcagaacaataaataccatgagataatatttgatgctggtaacgtgacaatctggccaataattgcagagccttctgaggttattgtttcaaagggcgaacaggttaaagttaagattattaaaaaatatcattcttccggagctgacaggatttttggtgtcacatttacacccgatgtaattgaacctaataaggagggtaaaaataaaaaaatcaatcttcctctggggtataagtcatggtttatagttcctggcaaagaaccaatgatcggcagtctgaacgtgaaaaaaggcgaacacacaggtgattatattattaacaataataccaacaaggtgatgaacattaaagtaaactattgcaattatgcaaatgaacatggttgtgtaacacagattatatccagaccatacgccgaaaaaaaagtgtctctaggttcaaatgtaaaactggcagaaatagaattttataatatttcaggtgaccaggctaaaccagtaaagaaaattaagctatga

SEQ ID NO: 396859 - DNA, 543 bp, Salmonella enterica
atgactaaagatgaagtctttgcgtctatcctcgatagagagggcggttacgttaatcatcctgacgacagaggcggtccaactaactgggggatcaccctgatgagggcgcgagctaatggctacatgggcgatatgcgaaatcttacccgtgatcaagcgttaaaaattcttgaggctgattactggtatggtccgcggttcgatcaagtcgccatgatatctcactctgtcgctgctgagctttgtgatacgggtgtgaatatggggccattaatcccgattaagtggttccagcgttggctgaatgtctttaataatcaacaaagattttatccggatttgatagtggatagtcagattggcccacgtaccctatcggcgctgagatttttcctctctatccggggaagtgaaggtgaaatgatacttattcttgcgctaaattgtagtcaggggcaacgctatctggaactggctgaacagcgtcaggctaatgaatcatttatttacggatggatgaaagaacgtgttaaactgtag

SEQ ID NO: 396860 - DNA, 240 bp, Salmonella enterica
atgactctcatacttcacagtctgattaactttctcaggctgactttcaaaattaacaaaatggatgggttattaaaaaagcatggaaagcttccatgctttaaaatagcaattatgattcttaacggctttactgttccatcgacagtgacacaaatcgtattgatgcatccatcgcaaatagccatattgcagattaatgaaaactacagtttaacacgttctttcatccatccgtaa

SEQ ID NO: 396861 - DNA, 357 bp, Salmonella enterica
atgaaggatactccttcatctcttctctatgagataattaatgatgcttatacatgcagttataataatcctaacagacttgctacttcaggtttacctgctgacatatctcaggtgaataaaggctacaaatatagtgttactgtgccaggggggagacaaattgatttggggggggggcgctctaccaccattagcgagcatgaagaatggttaccctcgcaaggtaatagtagctattttattgatttaacattaaatattacatttcctgatgttacagtttacccggtactgatgaataagggggggatttgccgtggaagtgtgacaatgcttattagccaaaaactgtag

SEQ ID NO: 396862 - DNA, 1473 bp, Salmonella enterica
atgaatgtacaggaaaccaaattttcatctaaagaatttctaaggcgccgtcgccctgaaaaattttctgattcaacaatcagagagactggtactttagatagagttgtactggaacacttcctctctacgctaaatacaagaaatcaagaattacaattcgaagattttgcaaaaaaaatatgtgaaaaaataatttgccctaatctccttgaacagactggtcctgtagcagggggggatggtaaaactgacacacaaacattccctgtttcggaacagaataagcttctttggttcgaaggtgttaatgaagcatcaaataaagaacgttgggcctttgcggtaagtacacgtaaagactggaagaaaaaatgtcatgaagatgtacttaagataaaagaaacagagcgtgggtatactaaagtattttgcgtaacgaatcaatctgcaaagtccaatattcgttcagcggttgaggatacactaaaaacaaaaactggaatagatgtccgtatattagatattaattggctattagatcaaatttacaaaaaccattttgagcaattggtcattgattcattgtcagttccaacacaatataaaagagaagttatttttggagaaaatgattataagaaacataaaaaatatgaagaattaaccgagtatattagagagaaaataaaccctgctgaaatttcatatgaacaagtggatgtttttttagaaattgcagagttaagcgctgaacttgagaaaccactaattgaaacacaaggtctatttgaaagagctataaaaatctcaaaaaaattcgggactaatcaacaattgctagatgcgtattatcaatacgcctggaagtcccatttttggatggaagattttaatctcttcgaagaaaatcttcatttagcgtatgaaagtatagcatcatcaactaattcctcaaaatgggaaaaagttttaaatttagttaccgttcataaaagttatattagacttaacaacgcaacatctacaatcgacattgagaatattgaacgtaacatgctcgccaaactagatgagatagctgtcgatgattcacgtcccagtaatgcgctaacagcgagaactcacaaagccatttataaattgacaacgttttcagatgtagaagatgcttcggttgtatttgaagagttacatgaaatttttaaaaatagtgggaatttaataggctatccctttgagaaaaacttccaacttttgaacgaactagatgacatttttttcgatgtagatgcatatgaaaatttattagactatatgactgagcaatctgctgttagaggtggtgaagttaaaggggcattattaaatctacgaagaggtataaagaggcttcaaaaaggcctaatctatcgagttcatcggggatattactctgtcgatttattccctttaggtcagtgttcaaaatga

SEQ ID NO: 396863 - DNA, 804 bp, Salmonella enterica
atgatttctgttattatttccacgtcagtaatggtattgcttgttatatataaaaatgttgatggggctttgttagcaatatcaatacaaaatgcaataatcggttttatccttttaatgctctctataaacgaaccatggctaaaatttaaatattggatcgggaaaattaataagacagattttctatccatattgcgttatattttgatggcattaacaagcgctttagcattacctacggcattgcttttgcttagaaatactcttattgctaatgtgggttgggatattactggacaatggcaggcagtttggaagatttctgatgcttatcttgccgttatgacattagcgctatcaacttactatttacccatattatcaaaaaccaatacattaaaagagttaaaacacgaaatcaagagtgttgcgaaagtcattattccaataaccattatattatcatctattatttatatttttagagagttcattattagattgctatttacagatacttttaatgaggctgaatctctctttttacttcaattaatcggagacaatataaaaatagtagcatggttatacgcttatccgttaatagcatatggtattgctaaatggtatattatagcggaaattgtttttgcaattattttcgtttgtctagggcattttttcgttttatattatggtgttgacggggcgaatcttgcttatctatgtgcgtacatattctatttgatttttacctttatccttgttaataaagtaataccttattcaaaattaagatga

SEQ ID NO: 396864 - DNA, 888 bp, Salmonella enterica
atggggaaaattacagatggagacgaagttattgttcctgcgaatacttatattgcaacaattttagcaataacaggtaataatctaaaagcaattttaacagaaccggataaaaatacatttaatctatcttatcattctatagaaaaggctatcacatcaagaactaaaataattctccctgtccatttatacgggcagatcagcccaatggaagagattatgcagctagctaaagaaaataaccttttagttctcgaagacagcgctcaagctcatggggcatctattaataataaaaaggcaggttcatggggcaatgccgctggttttagtttttatccaggaaaaaatttgggggcattaggagatgctggggcaattactactgatgatgatgaattggcatctatgcttagagcgttacgtaactatggatcgcataaaaaatatgagaatctatatcagggcgttaatagccgtctcgacgaaattcaggctgcaatgctaaatgttaaacttaaatatttagataaagaaacgagtcggcgtagagagatcgcgcagaaatattgtaagtatatagataatgtatatgtaaccaaaccaattatcatggacgaaatgactcatgtttggcatttatttgttgttcgctgccagcatagacataaatttgcagagcatcttttaaagaatggaatacatactcttgtgcattaccctattccaccacatgagcaaattgcttataaagaatggaataaattttgttttccattaacagaagagattcataagactgttatctcacttcctttagatccaactatgtctgatgaggagatagataaggtaatcgaaattgtaaatggctttagagaatga

SEQ ID NO: 396865 - DNA, 381 bp, Salmonella enterica
atgcataaacaactttttgctcgtattgtagaaccggataggctgaccatccaggatcctgaggttctgtgtcaggaagaaactcagttcagttctgtctataagacagaagcgttagtgtgtacagaacacatctgctccgaaaaaagagtgaaacacgtcagtacgaaagtgttcacttcggtgtccaacaggaagaatcgcaccggatgttgttcagcgtttcctcagaaagttcatcagagggatggcaactacaaaacagaattcagtaagagagtagtgatcgtgcaatttacatcagcggcaaactgtgaggtaatcggggcaataacaaaccatgtagaaggaaattgtaactttatatcccccctaatttga

SEQ ID NO: 396866 - DNA, 543 bp, Salmonella enterica
atggtcaataaacgtgcagatataaccaaggttaacatttcagttctggatgaagcagcattaactattaagcattcctataagaagagaactgcctatgactatggacaggaacttcagaagcttgtcggctttctcagtgaaaacggtctcctggaagctggaactctctcatggctgagtccgattaaaccagaggaacagtcaaatcgcatatccagtaaagcagaggaagccaggataaaaaagctgccagatgaaacagctttgaatgcgatggccgagatcttctccttaccggacgatgagcttagcgaacgagaccttttcactacttctgtgtttgctcttctgatgtgtgctccttcaaggatttctgaaattctggctctgtcatgtgattgtgaagtcaatgaaaccgactcgaagggggttcagaagtatggcctcaggttttattccatgaaggggtatggagcagacatcaaatggataccagaaataatggttctgtcgagtgattcagttacatttctgtcctga

SEQ ID NO: 396867 - DNA, 666 bp, Salmonella enterica
atgaaatctgaaaaatataaattatcactagttaaaagtttaaaaggccgtacaggagtttatggttttgctaaaagttatacaaatgacaattctaaagacgatactccccccccttacttttatagaggtgagttgaacaatcaaatcatagctaatgaaaccattaacatcaaagcagaccaaggttttttaagtgaagaaatggaaattatatggcttttctcagttgaaaatggttctgaatgtaaattcataggtttctcatttggaaacgacatcactgatctggctgaatttagaaaagatgcagccagaattcttcatgcaaaaaaaaataaagctagcatttgtaagcattggtgggaaagtgataccccaccttctgatctggatataaaagtaacaagacacaggaataaaaaaattaaaaattacgtttcaaaactaggttcaaattttatatcactaacctttaatgatactgtaaagagtataaaagcaatggccggatgggacaacttcgattttataatgttatttactggggctccacgaggttttgcttggttacagaacgagccaatattaagtgatgatatatatgatcttcacgtgaaaggttttggtatggttcttagtaacaggattaaattttatgactaa

SEQ ID NO: 396868 - DNA, 333 bp, Salmonella enterica
atgcagacatggagattcaacagaccaaatctgggggaagttgttaagagaagagaccccaaacaaggacctttaacagacgtagaggtacagagttttaacgattgtgtgataagagcatatgagaaaaaagacatttctctgcttatgttaactatggctctgttagtcagttataccgggcgcagacctttacagctgctccagatgaaaatcagagatataatgaggatctcaaaagagaataatgacatttattatcttgttaatattcctagaattaagcaaggtttagacttcagggaggagttcctgtctcttatacacatctga

SEQ ID NO: 396869 - DNA, 144 bp, Salmonella enterica; identical to SEQ ID NO: 380269

SEQ ID NO: 396870 - DNA, 162 bp, Salmonella enterica; identical to SEQ ID NO: 380305

SEQ ID NO: 396871 - DNA, 459 bp, Salmonella enterica; identical to SEQ ID NO: 391019

SEQ ID NO: 396872 - DNA, 315 bp, Salmonella enterica
atgtatatagaaaaattaatggttcatatatcaattatttctgactataaacaagcatggaaaattgaacataaattatcagatattcttccactggctatttgttccgttatttctggtgccgaaggttgggaggatattcaggttcttggtgaaactcatattgattttttaaaacaacatggcgacttcgaacatggtattcctgttcatgatacgatcgctcgtgcaatttcctgcataagccctgatagtttccatgattttttagtaacggggtgtgtgcttgctatggttcaaaatatagttgtgtga

SEQ ID NO: 396873 - DNA, 480 bp, Salmonella enterica
atgaagaaaagcaaagagcaaatctggaatgagttgaagatatatttcacaagcaaacccttattttcattaaaatctaaaacaactatttatcggttagactggaaaagcgaggtctataataaaactggtcattggtattcattttgccgaaatgaggcaatgaaatataaaaattttggtgcagcgaatagattagacaaagatctaatgccatatcttatagaaggagaggttcagatagacttatcgttaagggaagttagggaaaatcaccttgcggtttttgacaaaatttatgatagcacttttaatcatagtaaaatcgctgaagatttaagtcatatatcaaagacatttatttctgaattcgatggttttatccgtataaaagaagacccattagagaatgaagtttttataatacatccattacagcacttcacacaaaaatttataactccattaccacttccttga

SEQ ID NO: 396874 - DNA, 759 bp, Salmonella enterica
gtgggtgaagaacgcaagaacatcaatcataatacgcatatagttttatatgatgaggtaagtggtctttgccctaaatgctttaaacctttaatggttcagaatggcaaacgaaaaataaagctctatgaagtagcacacatatatccattttcccctcgtgaagaggaaaaggaattacttaaagatgagcaacttctttgcgatgatgttgatagcgaagataatttaattgccttgtgtagagactgtcataagctgttcgacaacccaagaacgattgagggttatcgggaaatgtatgctatcaaaaagcagttgagacaagcagcacaaatcaaaaacagccaatttaattttaagattgaagaagagatcaaagagataattgatatactatcaacgcttgaaccaagtgaaaattctcaattatcgtacaaggctatgagagttgatgataaaatcctttccgactctggtccagcattcaagataaaggtcaaagctcaagttgcttatttttacactgaaataaaaaaattattccaacaactcgatcaacgagttccaaacacatcagaaataatattcaacgaagttaaaacatactatttgattttaaaaagagagaatttatctcaatccgaaatatataaccatttaattaattggataaaaacaaacacaaaggacactaatagtgtagccgccgaagttttagtgtgttttttcatccaaaattgcgaagtttactcatga

SEQ ID NO: 396875 - DNA, 222 bp, Salmonella enterica
atgattacaccaagtaaatctatctcaatccaagattcaatattatacaagatgacaatcatcttagaaactgagtttaacgaaattaagattactgatttatacgaaaaaacatcaagcaatttttcatctctggacgaatttgtttactcactcgattttttatttattttagagaaaatcatactaaacccagctaatgggacggtaataaaatgctaa

SEQ ID NO: 396876 - DNA, 1215 bp, Salmonella enterica
atgtgcatttatagtgtaaggaaaacaattttcgaaaacggggaaagatattgtgtcttaattaataaaaaaacattaaagccattattttaccctaatatgtatctaacagccaattttcgaaataaagggctttctattaatacaattgaatctaatgctaaggtgttaggtttgttgcagtcttttttcgatgaaaagaacatgaatataatggaaaggatttcaggaagaaaatttcttacttcttatgaaattgatgacttaactcaatacctgacaaaacgccataaggtaagaaaggttgttaatatcaatagtaatattttaaaggattatactaaatatagcagactaagcactgttgctaattatttagagtggctctgtgagtatttgataaggtgcgattacgaacgccgtgaggatatatcgaggtttataaatagtattagggaaagaagaccaaggaaacaaatagattttgatttctatactaaagttcaaaagtcattaagcgattcacagatagtccagatttttaagtgcttacaaccggaatccgaattaaatccttttagaaaatctgttcaatcacgaaatgaattaattattactatgttgtattgcctcggcattcgtgctggagaattactcaatttaagaatcagtgatatagattttgagaagaagattataaaaatagtccgaaggcatgacgatatattcgatgatcgattaaatcaaccattagttaaaactctcaatagggacttgtatttttccgattggttagaaagtaaaatatataactatatgactggtgaaagacagaaatattctaaaaaaaacaaacacgattttttgttcatatgtcaaggtagtttatcgaagagtggtttccctttaaccatatctgcatacgagaaaatgattatgaaaataaaacgaatagacccagcattgaatgatttttcagggcatcgtcttagacatacttggaattatgtattttctaaagaatcatcaaatcttcgaaaagaaggagtaagttttgaacctgaagagattagatcttatttaatgggttggtctccaaactcagggacagtaaagttctataaccataaatttaatatagagcagtctaatttattgatgagaaaggtgcagatgaaaatagagtgttttttaggtggaggtcaaaatgaataa

SEQ ID NO: 396877 - DNA, 747 bp, Salmonella enterica
atgtttcactgtaaggttgttcatttctcagctagtgaatttttcttactattggcttttagttggttttggattttattggctgaggttatctttctgagaaaatatttaaattttagcttttcagtaaaaccaatatatgtttgtattatgccaacctggaagactaggattgctaatagtggatttattattaaagatctattaacgtcttatatgttaaatacattagttccaagtggtgggttaacaatatattcatatgcaaataaaatttccacggctatttttcagttattttcacaatataagattaattgttggattggcgagataaaaaaagtaggcctaaaaaaagttcgaatagagaatataaagaaagtatccttattgtctgcagctgactactgtttgtttttatgcatgacttttgccattgtcttttcaataatctttattgctaaaataaaaatagatatgaactgggctttgttaagttttataagttctggaacattatatttaatacaatctgttgaacaaccgttcgctcgttttgtttatatgtcccgagcgttttcaaatattacattcacggatggcatgaattttatttcatacatgctgttttttatctttgggtatattgatgcaaatatctatattataatgctcggtattatagttgctcagttattttcattgtatttatattcgatatattgtaataggctgctttcaagatga

SEQ ID NO: 396878 - DNA, 243 bp, Salmonella enterica
atggtaaacgatttaacgaaattatggttaataagaaattttgatatgcgctctaatgtcttgccaattttagcaacaactgaaatactatatttagattttgagatcctcactgcattatcaaagaccattatggtacagttagttatcttagcattacctgtcaattggataagcgacttctcgattagctttaaagctctcatttcttccttaagctttattttattaccaagagcctga

SEQ ID NO: 396879 - DNA, 462 bp, Salmonella enterica
atggatggaaggcggttcagattgtttaacgtagtcgatgattttaatcgggaagcgcaggcagtcgaagtggacttaaatatcccggcgcatcgcgtagtgcgcgttttggagcggctcagcgccgaaagaggctatccggcgtttatccgaagtgataatggaccggaacttaccgccgccatcctgtcggagtgggccgagcagcatggagtcatactggattttattcaaccgggaaagccaatgcagaacggatttatcgaacggttcaataagacattacgaacagaaatactcgatatgtatctgttccgaacgctgtctgaagtccgagagttaacagaaaaccggcgaacggaatataacgaggaacgcccgcatagctcacctggcggcataccgccggttacctatgcaaggcaaaaactggccggagactctaactggcagtggtactaa

SEQ ID NO: 396880 - DNA, 165 bp, Salmonella enterica
atgcgctggcgtccctgtaatccactctttaattatttgattattatatatattaatgatttgtattttacattgaggtgcaataaagggataaaaaaagtattgtggctaaaaatcaatcacattttgaatgtcatgactagcggtgaggagttgaactcatga

SEQ ID NO: 396881 - DNA, 375 bp, Salmonella enterica
atgcagatcatgccggggacggccacccatacggtgaaaatgttttcgatcccggactaccgcagccctggccaactgttggagccggagaccaacatcaacattggcacccactatttgcagtatgtctatcagcagtttggcaataaccgcattttcgcctctgcggcgtataacgccgggccggggcgagtacgcacctggcttggtaatagcgccgggcgtatcgacgccgtagcgtttgtcgaaagcattcccttttcggaaacgcgcggctacgtgaaaaacgttctggcctatgacgcttactatcgccactttatggggcagaaagagaccttaatgagcgactctgagtggcagcgacggtattaa

SEQ ID NO: 396882 - DNA, 567 bp, Salmonella enterica
gtgggcacagtcacaggggataaacatcggcagtgccggtgcctacttgacaaacactggactgacgccccggggggcaatacgactacaaccgaccggggagagaggtactcctattacaaatcagcagattcgaacgtggcaggacctgccactggaggcgaaacgcgaagtagggggctggatgacgtgggcacaggcacaggggataaacatcgacagtgccagtgcctgcctgacaaacactggactgacgtccctgggggcaatacgactacaaccgcccggggaaagaggtacccctattacaaatcagcagattcgagagtggcaggacctgccactggaagcgaaacgcaatgcaggaggctggataacgtgggcacaggcacaggggataaatatcggaagtgcaaaaacctttctgacccacagcggtctgaccccctttggtacagatcgcctgaaaccgcccggggaaagaggtacctctattacaaatcagcagatccgagcgtggcgggatctaccgctggaagcgaaacgcgaggcaggtggctggattag

SEQ ID NO: 396883 - DNA, 465 bp, Salmonella enterica
atgaaccgcataactactggcgtaatagcctcgttgctgatagtggccgccgcgctggcgtggactacagaacgctatcacggtaacgcagtgcgctacaaagaccagcgagacaccgccactcacaacctgaagctggcgaacgagactatcatcgacatgcaaacgcgccagcgtgacgttgccgccctcgatgccagatatacaaaggaactagctgatgcgaaagctgagaatgatgctttacagcgccgtatttctgatggtagccgggtgcgcgtcaaaggacgctgtacaatgccagccagcaccaaaaccgccaaccccggcagcgtgggcaatgctgccaccgtcgaactctctccaggtgctggacaaaacgttctcaatatccgcgccggaatcatcagcgaccaggcaaaactgagatatttgcaggagtacatccgaacgcagtgcaggtaa

SEQ ID NO: 396884 - DNA, 627 bp, Salmonella enterica
atgactgtaatcacagatgtccgtaacgcgcgttataacgaaaatggcaccattacagccgatgttcgttttgataacgaaatcgcgtcggacggtacgccgctttatctgccctatacggcagcggcgcatgaccctgctccgtatggtgtgcaactctacaacaaccttgtgtcaggtaaatacggcagcattacgttgttcactgtcacaccagaaatgatccaggcggcgaaagatgcaaaacatgctgaaattaatggctggcgtgacatacaggaaaacggcaactatccgtttaccctcaacggacaccgatgggactgcggaaaagcttcacaatcccggctgaggcctgtggtcagcgtggcgaaggaaagcggtctgccgccaggtttcttctggacggacgccgacaacatcgatgtgccaatgacagcggacgaactgagtgtgctggaaaaggcgatggaaaagaacatggtgctacagggttttaaaatccacgaacgccagcgccggatgaaagaggaggtggacaaactcaccgactatgacgctgtaggcagttacaccgtgggttggcctccagccagtacaacagattcaaacgaagccggtaactga

SEQ ID NO: 396885 - DNA, 399 bp, Salmonella enterica
atgattatcacaggaaaaatgccgtctttcggaacatccggaactggcaatggtggtgacctcaccactgtaaatacagacggcaccactattaccggtgatggcaataccatgccattagcgctggggccgggagaaatggacagtatcgggagttatgtatgggcttattgcgttgcagcacaaagtaataatactcaccatgacagatattactttaatcgtggtgatattgtccccggcggtactttagcgccagcttttattgacgattatggacacgcgtccagtacagcccatattggcggaaatcctatatggatgtccggctcatggcagatacttggtactggtaataatgcagtgggtaactttgtccttctacgtcgggtagcttag

SEQ ID NO: 396886 - DNA, 549 bp, Salmonella enterica
atgaaaaaatacattatttttataatttcattcttttttattttcccctcattatcttttgctgataatgacataaattacacaccctctgtgacagtaagaggagtattcactggatttgttatgagaaacaatgtgtctattggtgaaaaggatgaatctgtgcattatgacttagtggaagtgagtgatccatcctttcctttatcacaatatccgtatggtatagtccagttcagagagccccggggattcagggccagtgatttttgtgtgcagccaatggacggtaaaatcaccacatatttatgctccctaagaggcgcgaatttagtcgggacatatttttctcttatcccaacaaacacaggtgctgttttaataaagaatatttctacaggaaattgtctgacctctgatggtggaggaattgagttccctgttctggagaaatgcatgctgatgtcgtcacaatcagataaaatatacaagcaactatggttcttggctccggcattttccgcttcgatgatgtctcctcttttataa

SEQ ID NO: 396887 - DNA, 648 bp, Salmonella enterica
atgaaactcaaaggaatatatctttctatcttcattattttttttacagggtgttcctcccatcatcaacaaaaagagagtaaagaaaatatttatccttcacaagattctccggtgccaccgacattgccattgccatctcccggactcagaatgtctcctgaaataaactctgatggcgaagtatcttatacatcgctaagaactattatggctcaaaatggtcgtgtcctgactgtatgggcactggctgaaggcaactggttatgggcatatggtccggcagcatcatccagttttgccgggataagaaactggtatatagttccggttaacaaaggaggacaaaacttttttagatttgtcaatggcgtgacaggaacatgcatagaagcgtataaaaatggattgattcataccacctgcaagaatgaaaataatgcacagaattttcttctcatccctgccactaatggtggcgtttttataaaaagcccggtgcagaataaatgcgtgagatacgatattatcactcatactatctattccactgtatatctgacggaatgtgtttctgctaagaataaaagttatgaccagatatggtatatagcccccgcattaacagataccactcctttaccttaa

SEQ ID NO: 396888 - DNA, 159 bp, Salmonella enterica
atgccggattgtctgatactgaccacgcagaagccgttaccgaccctgcagcccaagcaggaactgatgcaaacgctgaggaaagtgtgtaaactttcagctcgtaagcaaaagcaaatggcggaacttatcaagctaatcaaagggccgcagcaataa

SEQ ID NO: 396889 - DNA, 234 bp, Salmonella enterica
atgccagacactggcaaccatctgctgtccaaaggaccctttacccgcaggcagggtgaggccgtggtagcagcgtaccggaatgttgtaattgaagatgaccagggtacgcattttcggctggtcattcgcgaccatgagggacaattaatctggcgggcatggaattttgaaaccaacgccggggaatggcttaaccgctatctgctcagccacggtatacaccgacactga

SEQ ID NO: 396890 - DNA, 375 bp, Salmonella enterica
atgaaaaaagatacattcaaatccggggttattttagtcaggccccgaatttacattaatgacaatatttcgctggggccgggaaaaatcgacctgttacgtgcaatagatgggtttcattccctgtcagcagcagcaagggatctgggaataccctacaaaagagcatggctcctgattgataccttaaataaagggataggcaagcccgtagtcatgacttcaacaggtgggagtaaaggcgggggcactgttttgaccccacttggtcagaacttgctcgcctggtatgacaacgcagaggccagccttaatgagcaatcgcagcaggatttgcagaagcttgaaaaaatcatcttcggtgatggctggtag

SEQ ID NO: 396891 - DNA, 837 bp, Salmonella enterica
atgtcacctgtatcgaaacgaaatggaaaaggtatattttcaggtgtgataataggggcgctgggaggacttatcggtctgggaggtgcggaattccgtcttcccgtacttatcggtggatttaaaatccccacactggaagctgttatctttaataaagcaatgagtcttgccgttgttgctgtcgcactgtttttccggacgaaatcaatatcacctgaacagttgatggcccattttgatattgtcattaatcttctggccggtagcctgactggtgcatggtgggcggcaggcagggctatcagaatgtcccgggtctggctggacagaatcatactgactctgcttgtagtattgtcgttcgtcatgctttcagaagcatggatgccattacacagtatttctggcggattatttcagcctggtcttgcaactattattgcaggtgtaatttcaggcttttttattgggatcgttgctgcgctgctcggtgtggccggaggtgagctgctcattcctgcgatcgttattctttttggggctgacattaaactggctggtagcctgtccctgatgattagcctgccgacaatgattgtcggtttttcccgttatacgaacgccgatgcctttcagattctgagaaaagagaaatcactgttcatgtggatggtcacaggttcagttacaggtgctgccattggcggacttctgctcggtctgtttccggttaaagtgcttatgacgttgcttggtgggatacttcttatctctgccataaaaacgttcagacatacccgaaaaaatgcattttccagagaaggttcagaatga

SEQ ID NO: 396892 - DNA, 1023 bp, Salmonella enterica
atggcaagaccgcgtaaatatgtgaaagacaaccgattaccgcccaatgtttactacaataaatacagctatttctggaagcctaaaaataaccagacatgcatcacgctggccccaattaaaggtacaagcatggctgtattgtggcagaaatatgaggcaaaaaaagctgaacataataacgtaatgacggtatccagattatggcatctgtttcttgattcaccggcatttaccgagctggcgccacgaactcaaaaagactatcaccagcaccagcgtaagctgctggctgtttttggaaaaatgcgtgcggatacggtaaaaacagaacacataagaatttttatggacaagagagggctggaaagtaagacccaggctaatcacgaactcgcgagtcttagccgtgtttacggatggggatttgaacgtggatatgtgaagggcaatccctgcaaaggggtgcgtaaatttacctcgaagccacgtaccgtctacatcagcgatgagcaatatgcggcaatttatgacgaagccacacctgcattacgcgttgcgatggaggtttcatatctgtgcgccgcccgtcagggggacgttctggagatggtctggggagatgtgatggacgctggtttatttattgagcagaacaaaaccgggacgaaacaaattaaggagtggtctcctcgccttcgttccgcttttcaactcgcgagaaatactatgggcgaaaacgggaaatatgtcattactaactctaacggcgaaaaagtaacgagcaggacgattaataaatggtgggataaagcaaaaaaagccgcggagcaaaaagccggggttccttttggatgcaccttccatgatatcaaagcgaaagccatttctgactatgaaggcagtagtcgtgataaacagcttttctccggtcaccgtacagaaagtcaggtactgacttatgatcgaaaagtgaaggtcacaccgacgctggacataccgcttttgtcagtcaactcatga

SEQ ID NO: 396893 - DNA, 9585 bp, Salmonella enterica
atgacaatgaaagaaaacacctcctcaacagataataccaaccttaagccagaaactatttctgatataaaatcatacaaagtaagtggttttgacttgatagttacgacctctaatggtaataccacaactttaaaagatggcttaaccaacctggttttgggaaatgttgagttacgtgataccacgggaaaaacaattaatcaggatcatattatctcttctataaaaacttatcagcttgggttagatacagtctacctggctgacaagttagtaagcgatgaatccacaccagaaactacaaaggatgagtcagaacaacaggtaaaagatacttttgctgatataaataaagctctggaagaatctttacagcaaaaaattaaagagtatgaggaactcctcaaacagcagactacagatttaaaagaaaatatacagctcgaaaaaaacgaacaattatcacaaaagaaagaaattattgacaaaaaagcaaagcaagaactttctaaaaatttaaaacctgccgaagaagaggtcgtgaataacgctcccacaccacccgctacaccgccagtcccaccggcgtcatcaagttcttcatcaagcgagcaggcagaaaaggccctggagccattacctacgccagaggttcctctttttattaccggtcaactggatgcgaaggccgattccggcaaaacaggagacggtattaccaatattactacaccaacctttaccggcaatgctacgccaggcgcgacggcaagccttataatagacaagacgcactacccgttaaccgttgataaagatggtaaatggaccttacaactctcttctcctctaccagatgggcagtatgagataaactttactatcaccgatagcggcggcaaaacggtgaaatctactaccaccgtcgtaatcgatagtgaagtttccgggctcactgcctcacttgcccctgcgtcagactccggcattgtcggtgattcgataaccaataatcccaaacctgtgcttcagggcacttccgaaccgggttccatcattaatgttattattggcggcatgacgttaaccaccgttaccaatgcagacggtcagtggtatttatctccaggtacgaatttgccagatggggtatatcattatcaggttactgctaccgatgaggcaggaaataccgcaacggtgaataacaccgtaactatcgatacgaccgcgcctgatgctacatttgcgctatccgccgccacggattccggacagcagggcgattttctgacgaatattccccagccagtattgacaggaaaaacggaacccggtgcccatgttattttgaccctcgatggcaacgtttatgaagtcattgccgatcgacaagggcagtggaaacttgaaatcactccggcgctcaacgacggtagctatgaatttaccgttgaaacgaccgatattgccgggaatagcgctacgcaaaccggtaaagtgacaattgatacccagcctccgacaataacggcaacattatcgacagaatcagatacaggtagcagcaacactgacggcgttaccaataacccacatcccctgttaaccggaaataccaagcctttagcgatcattaccgttacgctggccggtaaatcgttctctgtccaggctgatgaaaatgggctatggacctggaaagtgccagaagacctggtattagatgatggcgagcatgtttatacgctttcggtaacggatgccgcaggtaatagtgcttcctcgccattagaaggtaaatttacgcttgataccacccctccgtctgcccccacggtgtaccttgacgccgatagcgattccggcgattccggcgacaacatcaccaatattactaccccaactctgagcggaaaatcagagcctcatacggaagtgttcgtcactattgatgaccatatttattctcttcaggctgatgaaaatggcgactggcagctcactttggatacgccgctggcagatggccgctatgacgttaccgtggccgcaaaagataatgcgggaaatatgagcgaaaccacggggaatatgacgctggttattgataccagtatcccggaaatcaccgtaagcctgcgtgaaagcgatgatagcggcgtgagtaacagtgacggtatcacacacattaatcagccaaccttccacggtacagcaacgccaaatacctccgtggtgttgaccatcaataatgtggaataccgtgtcgctgccgatacagacggtaactggtctttaacgctcccggatgtgcttgcggatgagacatatgaatatacggtaaaagttgaaaatgcggtgggcaccagcgcgacggcatcaggcagcattaccgtggacacaacccctccttcatctgaagcaagtttagacgaagcatcggatagcggacggaatactcaggacaatatcacgaatgttatccgccccattcttaccggtacgacggagcccgaagctgacatagaaattatgtttaacggcgtgagccatacattgaaagctggggctgatggtacctggcactatgcaataccggacgaccttcctgatgcaacatacacttatacggtcaccactactgataaagcgggcaacacctcaagcagcgaacatctgttttctgttgataccgtttcccaactcagcggcgggcttgatctttccagcgtaatggaaggtacggcggggaataatactacccagcttgtccgcccgatgctcagcggcatggcggaacctggcagccttgtcaccgtcgccattaaaggcatgacctatacggcttccgtagatgacaccggaaggtggaaactgaccttgcccaaagatgcggagcccggcctgaatgaatataccgtaacctcagaagatctcgccggaaacacggcaacaattacaggtaattttaattatgtcccatcaggcgtagtaccgcctaaagttacagcgcagctggatgctgatagcgacagcggcatcaagggcgataatattacaaatgacaatacgccgaaaattgtcggacaggccacgccggatacggtgatcgtcctgaccatcgccgggcaaagttataccacaacggcggcggctgacggctcctggtccattgatgtaacccacgcactgaacgaagggtttagcgaatatacggtgactgcaacggataccggtaccgggttatccgccatcaccacgaataatatttttattgatacccttaaccccctatcgacagtgggattaacgagcgattcagataccggcatcaaaggggatatgatcactaaaacgacccggcccgtttttaccggcaaaaccgaaccaggcgctacgatcaccctgcatatagatggtcagatacgacacaccacggcagaccataaaggggactggacactgcaaggtccaacctggggtttgccgcctaattataaggccggttatacaattatcgtcacggataaagccggaaataaaaccaccactaaagggagtgttactactgataatacagcgccatcgttaacgagctctgaattacacagcagcagcgatacgggcgacaaagacagatactggactaatgaccttacccccactctcacaggtagagccgaagcaggctcaaaagtgaccattcgcattaatgataaaacctataacgtcacagatatcgccagcaatggaacatggaaattcacccttcctgcgggcctggttcaggataatggcaattatcacaccattcgtttttctgtcacagcgaccgatgcggccggtaataccaccactacgtctgacgccatctatatttgtaagcgtaaactgaccatcactagcgggctctctgacgagacggatagcgataccaaaggcgataacctgacatcagtaaccaaaccgacgctggaaggcaccatcgccggaggccagcctagcgacaacttgcgcggcaccattaccatcggcggtaaaacctatccgttaacgattaccgccgggggaacaaagtggtcgtttacagtgcctggcagcgcgccgctgagttcaggaacacatgattatacgctgactttcaaggataaatttggtacagaaaccacccactccgcctcggtgacaatcagtactctgatcggatttctttcccccgaagatgatactggcgtagtcggcgataaccagacacaaaatgcctcaccatcattaagcggcaaagcgagtatcggttccacattacgtattgagtttaatgcgcaggaatatactattccggttaatgccgatggtacctggacgtttacattaccgggagggccattcgttgaaggggaatatcactacaaactgacagagattgtcggacactcggtcacctcatttaacggttccttcaccatagaccatacgccgccggaaattaccgggggacttcgtcctggcgatgcgacaccgaatgatccttcagcctcccggtgggctacgccgacgtttaatggaaaagcagaacctaatcgggaagttattgtagagatcaacggaaaacgttactcaaccacgtcagacggtaatggtaactggcaaatctggttacaggatgcaaatcttcttcccaatacacgttatgattacaccataacgtctaccgatgctgcggggaatagcggcgtatttcatggcacaattagcaatgtcgtcgccgcgcctaatgcacaatttggcggtcatgaagattatctcattggcactgctggctcaactaacagtattttctatacggacacctcgccggttatcgtcggacgcggtaatccaggcgatacgattaccatcagaaaaaactcaggcgggtcaggccctttaaccaccgtcgttgacgcggatggcaactggaaaatccagttgcctgcgtcagaattcccggcagatacgccccagggcggatacttcacctggagtcttaccgtaaccaatagttatggtttggaaaccacttacaccgttagaatcacccgcgactccgttcctccgacgttgaccggcgggctggacaacgccagcgataccggcatcgagggcgataacattactcacaactccacgcctacgtttagcggaagcacggaagccggtctgaaagtcacgattacgcttaatgggcaaaactacaccgtaaccgccaataacgccggtaaatggagctttaccgtgccggaaacgttgcgggacggtaattatgactacagcatatcgactgtcgataaggcgggtaatctttcccctacgattaccggaacgcttaccgtcgataactccagcgtagcgctaacaggcggactggatactactgccgatccgaatatcgccaatggctggagtaatcataacgatcaaacgttaaaaggcacgaccacaccaggcgcaacggtgatagtgacaatcaacggcatgacttatacccccatcgttaccgctgatggcaactggactctggcgctccccggcttatcaaacaatagttacagctacaccgtgacagcgactaacaccgcaggaaaatcatcgaccattagcgggcagttcgtcattgataacacgccaccaaccacaacggtaggactcagtgctgctacggacagtggggtattaggcgattttatcactaacaatgaaacgccggtttttacaggcaaaacaaaacctggtgccacgataacgctcacgattggcgggcaaacgcatacggtggtagcggacaaccaggggaactgggaagtcactgtcaacacgccattaaatagtggtacgcataactatactgtttccattactgaccttgcgcaaaacgtcagcacgcctctcaacggcgagttgaatattcagagtggaaatatggcgggcttagtgactggcggcctggatattgatagcaatactggcgataccggagataccatcaccagtaatacaaaacctaacttttctggtacggcgcccactggcgtcacggttatcgtcacgattggcggtaaaacctataaaaccgttgccgatcagcatggtaactggaaactcgccattaccagtccattacgcgatggcgatcatgattactctatctcgctcgaagatgtggcaggtaatcaatcccctccgataatggggaagatcacaatcgacagtgtatctcacctccagataaatggactgagtgacgatacggactccggcgccaaagcggacaatgtcactaacaataccacgcccacactcatgggaaccgctgaggccaatgccacgattacgctcacgattgacggtaatcggtataccaccacagctaacgtagacggaacatggacgataccgttgactcatgccttaacggatggggattatcattacacggtcactgccactgatagcgcaggcaatacgacatcctctacggcgaccatcacgattgacaccactgctcccgattatttaaccggcgggctggatatcgccagcgaaaccggggcgctcggcagtcatctcacgaatcagactacgccaacttttagcggagccacagaaagcggcgcgaccgtcacgttaatgattaacggtaaaacgtataccgctattgcaggcgataatggtaaatggaacataaccctgccggaggccggtaaattagcagatggtagctacccatacacgattacagtgacggatgccagcggtaacgtaagcggcgtacaagtgaacggtaatgttaccgttcaaaatacgccgccctcagcaaatgctggattacacgccggaagcgatagcggggttacgggcgatcagataaccaacaacacccagcccacgctgtcgggcaaaaccgcgcccggcgcgtctattgtcgttatttttgcaggcactacttatcctgtggcagtcgatgcgtctggaaactgggcattccgtctccctggtacactaacggatggcggctactcttatcaggttttggcaacggataatgccggaaacgaaacacgctatgacggcgattttactgttgatacttcccctccggacgctcctgtagccgctctggcggaaagtgcggacagtggcgtcacaggcgatggtattacgcatataaagaatccgacctttacaggaacagcggaagcgaacgctaccgtgatcttgacgatcaacgggaaagactatacggccaaagccgggagcgacggtgcctggacaataacattacctgtgggtcattcgctgccagacggaacgtatcagtacactgttttagctcaggataccgccgggaacatatcagcgcccaccgccggatcggtggcgattaataccactgcgccaactatccctggcggaggtctcgacgccactaccggcacagataatatcaccaacgtaacgacaccgacatttagtggtaaggctgaccccaacagcatcgttattctacgtatcaatggtaaagcgtatgagatccaggtagggaatgatggcgcctggaaattcacgttgccggcagacgatatcctcaccgatgggacttacgcctataccttacagagcaaaaacgctatcggaaatacatccgcagaacaatcaggttcggtcattattgatactatgccgccaacagctcccactgccgggcttgcgcccggttatgacacgggagtggcgggcgataatatcacgcgcattacaacccccaaattcactggaaaagcggaaccaggaacgactatcacgctttctattaacggcaaaatatatgaatgccctacggcgaccgacggtacatgggcctttactttaccttcggccgatgcgctggcaaccggtaactatgcctatacagtgttagccacagacgccgccggaaatgtttccgcaaccactaacggtaatatcacaatcgatctcgcccttcctgccattccaaatggtgggcttgctaccgagtctgatacgggtacgcccggtgataatattaccagtacggatctccccaccttcagtggtacggcagaacctaatatcaccgttattttgaccctcaacggtaaacgttacgacgtaccggtcaataatgatggcacgtggcgttttaccttacctgccggagatgaactgaatgacggctcttataacttcacgctacaaggccagaacacggcaggtacgacatctgatgcctttacgggatcaataactatcgatacaatgccgcccgatgcggctgtcggggagctgactgccgatacggatacgggtatcactggcgataatatcaccagtgtgagcaccccgacctttaccggtacgacagatccaggcgcaaccattattttcactatcaatagcaaaacgtatgagttccaggccgatagcagcggtgtatggcgcttcacgttgccgacggaaaatgcgctgcctgacgatacgtacatttatacggtacaggccaaagacgccgccggaaatacgtctacgccgaccaacggttcgctcaccgttgattctacctcacccgcgcctaccgctggcacgcttaccgaagattcagataccggcaacaaaggagataatgtcacccgtgataaaacgccgacattcactggcacaacggaacccggagcgaccgttattctgacgctcaataagaaaacacataccttccaggcggggaatgacggtagatggcactttaccttaccggctgctaatgcgttagatgatggtatttatcaatataccgtacaggctaaagacatagcaggaaacacctcttcgttgtctgccggttggctaacaatcgacactacgccgccagtgctttccctggaagataacagtgataccgggacggctggtgataatatcaccagcatcaatacgccaacctttaccggtacttcagaagccaatgcgacgatcacactgaacatcgacagtaaggtgttcaccacaaccgctgacagcgccgggaagtggacaattacccttgaccagtccctcaatgacggcgcttatgaatatacccttaccgctaaagatgctgccgggaacgaaaatacgctgaacgagcggctgaccatcgatacgcaaccgcccgccgaacccacactgggatcgacggctgacggtgttgatagtaccgtcaccctccagggaacggtggaagccaatcaggatattcaggtgaaggtcacggttaacggtacggaatatcccgctagcgtcgataatgattctggtgactggcatgtttctgttccgcaatccgttattctgtcgggggagaatcagtacaccataacggccaccgatcccgccggtaatagtgctgttgccagtggaacatttacgggtacatcaccaacggaaaatccagttaacaagagttccggcgcagatgaaatgatttcgcttagtgaggcgactttgcattcggtaagcgttgaggaagaatattatgccttataa

SEQ ID NO: 396894 - DNA, 186 bp, Salmonella enterica
atgattttttgtcgtcttgcccatcaggggagagagacggcgcgatctgtcccgctgccggtgctgttttgcctgtcatcagccaaagtgtatatttttcaaaccgctgtactccaacagcacgttcaacaatttcagctctggccgattgatgtccagattcatatttttttactgtcccaatag

SEQ ID NO: 396895 - DNA, 276 bp, Salmonella enterica
atgtgtaactgcattgaacaaattggcgagaaaatagaggcttgcctcatggagaaggttcccgataacgctgagatttcgaggggctttgatacaggttggaacggcaccgtattaaatctgtcgtctggtaggctcatggtgaacatgacctacaagcttgcgtaccgcgcagtaaaaaagaatggtgagttagcaaaaaataaaacacacatggattgttctgtagcaatggcttattgcccgttctgcggtgaaaagatgggggtagcatga

SEQ ID NO: 396896 - DNA, 462 bp, Salmonella enterica
atgagcaacatcgacaaacaggcgcttcgtgaagaattccagtgcatgcaagaccattacagcgatccggcagaccgagaccatcagattatatatatcgcggcagaggcgctgctggatgagctggagaaagcgcagcgtgccaacgtcgcccaagatgaccatatcaaccagcagcaggaccgcattgagcaactggagaaaggtcacaaagaagccgctaagcaaataaattcctggcgtcgactggcgaagcagaatatcgctgagcgtggaaaggatatttctgagctggaggctgcccgtcagcgcatagcagaactggaggcaaagttagctaatcccgttttgctgccaaaaacaaacggctactggaatgagcaagaaaaggcgtatgaagaggccattacgctcgccaagcggcaggttcgtctggctggattcagtgttgaggacatgtaa

SEQ ID NO: 396897 - DNA, 321 bp, Salmonella enterica
atgagagcctcaattagctatgtcgacgatcatcatcttagcgtgagagttgatgaaattgtgtcattagtcccagctttcccgacaaagaaagcggccgtgaatgctggtgcgccattcggatggagggtggcgatccttattgagcgccgcttcgaaagcgtgtgggtagtcggtaagaaatgcttccaaagtgataactctgcttgccttaactttgaggcgtttcgcttcccactcctcaaatgggaaaaagaaggcggcattataaaatgcccgattctttctgtgcgcagatttaagcaggagacagcccaatga

SEQ ID NO: 396898 - DNA, 540 bp, Salmonella enterica
gtgaaactatacgaaatggaaggatttcttcgcggtaagtgcatcccgggagacctgaaggttaacgaaactaacgccgagtatctggtgagaaagtttagtgaggcggacgacagatgcgcggcgctgtctgcaaagctgaacatgattaacgacctcatggaagccgccgaacaagcaaacaaactggcgcaggaagcaacggaaaagctggttcaggagcgtaatgcgctggcggcggagaatgagacgctgaataagttcattgcagcgagttgctttgtgcaggctggagaagaattggcatggtatccagccattgaccatgctccagaaaccccagccaccgacgcttttctggctgaagtgcgagcgcagggagtagagatgtttgcagtgcattgtcagatgcgtcacggcgaaatgatgaaatctgagccaaatgaggcggcaagcaatcaggcgattaccgctacgcgccacgctggtgaatttgcaatgtacttcgccgcccagattcgcaaaggagtagcccaatga

SEQ ID NO: 396899 - DNA, 708 bp, Salmonella enterica
atggatttgaataaattcgacgccccattcaatcctgaagatatcgagtggagaatacagcgtagcgggaaaacgcgtgatggaaaggtgtgggctatggtgcttgcttatgtcacgaacagagcaatcatgaaacgcctagacgatgtttgcggcaaagcaggatggcgcaacgagtatcgcgatattcccaataacggcggcgttgaatgcggcatatcaatcaaaattgattccgaatgggtaaccaaatgggatgctgctgaaaacacgcaggtagaggctgtcaaaggcggtcgttccggcgcaatgaagcgcgctgccgttcaatgggggattggtcggtatctgtataaccttgaggaagggtttgcgcagatatccagtgataagaaacaaggatggcacagggccaaactgaaggatggaacaggattttactggctccctccatcgctgcctgactgggccatgccagcatcaggcaatcaaccatcaccagaaaataccaaccagaaatcaccatcggttgactgcgagcaaatcctgaaagacttcagtgaatatgcagcaacagaaacggacaagaaaaaactcattgagcgttatcagcatgactggcaattattggctggtcacgatgatgagcagacaaaatgcgttcaggtaatgaatatcagaataaatgagcttaaacaggtagcttaa

SEQ ID NO: 396900 - DNA, 540 bp, Salmonella enterica
atgaattcagcatatttatcgaagattcttgaagagcacaaattgtggattacctcaatgcgtgagagcggatcgagagccaacctgtgcggtgccgacctgtgcggtgccgacctgtgcggtgccgacctgcgcggtgccgacctgtgcgatgccgacctgcgcggtgccaacctgcgcggtgccgacctgtgcggtgccgacctgtgcggtgccgacctgtgcgatgccaacctgtgcggtgccgacctgtgcgatgccgacctgtgcgatgccaacctgtgcggtgccaacctgcctgatctcactttcgtaatcctgggtgagaaatacttcataagtataacgaacggtgaatatgtacgagcagggtgccagaaccacacagttgaggaatggagaaaatatagtaagcaggaaattgctgagatggatggtcgtaaagctcttaaattttatccacgcttgctttcgataattgacttttacctcggtgctggagaatggcctgattgggttaaaaacgatgggtatgagtga

SEQ ID NO: 396901 - DNA, 324 bp, Salmonella enterica
atggctgtcaaaatattcagaagcgatcatcaaccagccagcgaattagcttaccgtaactggcttcgtgataaccctgatggatttgtcgtgaatgccttaaagagcgccagtggacagaacacgaaaagtgataagcgctttacccgaattcaccgggccaaatgtaaaacaattaatccgctgctgagttcaacggaaaaatctggcttcaccacagggcgataccaaaagctttgcgccataaattttgacgccgttaatagcgaggcccggatagttactggcctgccgaccattaaaccatgccgctgcgtcaaatga

SEQ ID NO: 396902 - DNA, 234 bp, Salmonella enterica
atgaagatagaacttacgatcaataagtcgaaagaactgccgcgcggcgccatacccgcacttgagaaagagctgcttaaaaggcttcagaatcaatatgaaaattgctctctggttatccgaagagctggcggcgatagtttgactgttttcggtggtgagaagggcgataaaaagaaggtagaggagatccttcaggaaacgtgggaaagcgctgacgactggttttattaa

SEQ ID NO: 396903 - DNA, 834 bp, Salmonella enterica
atgaacctcgaaaacaccgtgaaataccacttcgccaaatcgacgatgattagcgattccccgcgtgctactgcctctgattcactgaccgggacggacatcatggcagctatgggcatgacccaggaacgcgccgccatgggctacagtgccttcctcggcaagatgggcatcagcaacaacgatcgggagagggctatcgagctgctggtccagtatgcgctaacaaaatgcgatagtgtagcggcgctgcgcaagcttgacgccggggttaagttactggtgatgcgacagttggctgccttcgctttcgaggactattcccgcagcgccgccagcgtgaaacagtgtgattgctgcgtcgggaccgggtttattcaggctgaagtgttcaccatgaaaagtgccatgcccaaaaaaggcgatctaccccctggctggaatgaggccaggatggcgcgcgccgtgaccccaagtatgtgggaaaagcgccgtaacgtcagagacctggtcaaagtcatatgccagaaatgcgccgggaaaggggttgtcagctgcgcctgtaatgactgtcacggacgcggtaaagttgtcagcaaggagctgactaaaaagcagggtgtacctgttctggctgactgcaagcgttgcggcggtcgcgggtacgagcggcttccctcgactgaggcttatgcggctgtatgccggattaccgatgcgataagtctcgacacctggatgaaatcggtcaagccattttacgaccaactgattaccaagtttgatattgaagaaacttgggctgagtcacagctgaaacagataacacgatag

SEQ ID NO: 396904 - DNA, 393 bp, Salmonella enterica
atggcgacaaaacttgatactgaaattttcaatgtttttttccgttacatggttaatgcagccaagcataaacgattcattccttatcatgagttagagaacatatttggttttagccataatacggtagcattttatgctggctctcttggtaagttctgtcatgaaaagcaatttccgttgctcaactcattaatagtaaatgctgctacaccaaaacccgcacatggctactctgagtgggtgaaaaatgaggggcttgacgtagactggacggaggaagcatttaattgttttaagcgttttcatgtaacgtctgatagagagcaacaatcgcgtcatttctctggaatgaacaatattgtaagagagtggtgccagtcccttagctaa

SEQ ID NO: 396905 - DNA, 378 bp, Salmonella enterica
atgaaaggtgccagtttaatagccccattgggcgtaagaattcctgacgatcttaaagagaaaattcaggatcaggccaaggctaatggcaggtcgatgaacgccgagattgtccagattcttgaggaatcaataggaggtagcggaccacagatttcagctatttatgaaaagcaaatcgaagcactaagcactgaggtgcaggtacttaaaagatatatagaagttcaaaaaagatattccgatctagcggaagaacagatcgcattacttaaacagcacttcaagaccgctactggattcgacattcaggagtattttaataaagttgttgattacaaaggaattgaagataaacacaacaaaaagcccacctga

SEQ ID NO: 396906 - DNA, 162 bp, Salmonella enterica
atgaaacaagtacgtaacattccgccaactggcatccgttttcctgaaggtctgaaagagatcattaagaaagcagctaaagaagaaggtcgctcactgaatagtgaggtcatcaaacgtatcgagcggagcctgaaagaagatggatttatcaaggcgtaa

SEQ ID NO: 396907 - DNA, 921 bp, Salmonella enterica
atggatttatcaaggcgtaaaaacagcgaagcccggtggtgtagcaacaccgaccgggcctctatcgaagataaccgcaaaggaaatatcgacatgtctaatttagcaataaaacctactgaatgcactatcaacgtcccgttttacggttctgagctttatgtggttaaccacaacgacgagccatacactccgatgaaaccgatcgttgagggtatgggcatggattggaaaagccaattcatcaaattaaaacagagatttaaaacctgcgtggtggatatcaccattcagcttcccggggataaccaacgacgtagtgttatctgcctcgccttgcgtaagttgtccgcatggctaaacactattagccctaacaaggttcgcccagaaatccgcgagcgcgttattcgttatcaggaagagtgtgacgatgtgctctatgaatactggactaaggggcaggtaactaacccgcgcaaatcggaaacgaacgttgacgatcgtactccattgcgtggactggtaaaccgcatcatgggtaaaaccggtattcactatcaacccctttacaaaatgatccaccgagagtttggcgtgaatcatattgatgaattgacagggaaacagattgctgaggcgatggaataccttgcggggaaagttctggaaggtgagttattaccaaaagaccagggcagatccacgcttccctccgcaattcccagacatgggccaggtagggtactgctttacctgaatgaaaacggccaggttaaggacacttatccgttaactgaggatcaggtagtcatgtcatttgatgcatttgtcagctatttcaggaaaaagagatggatagtggccccaagggatgaggttgcaaaaggaataatgggggcaatacaggttttatcgtag

SEQ ID NO: 396908 - DNA, 543 bp, Salmonella enterica
atgagagcattgctttttttattcatattgattttattgccaattgaggcattttctgcgtctaccctcgattggaaggggccccctttctttgttatgactcacggtatgctcgtgagcgaactgttgaaaaattttggtgcaaattatgatataccggtaattaccagtccgtctattcgagatgtttttatcggtcgcttcgaaaagggtacgccggaacagcagttggataggcttgctcgtacttataatttggtttggtattatgatggtaaggcgctctatgtttacaaaaacaatgaagtgaaatcttctgttattacgccagaatttgatactcgtgaacagcttaaggaatatgttcttcaggcaggcgttcttgctgaagggacatgccagcttcgtcaaattggtgtttcgcaatcttttgagatctatggagtccctgaatgtgttaagcatatcacagatatagccagccagctaagcgttgcctcgcgtaaccaggctcaggtagatcaacaaaaagaaaatgtctag

SEQ ID NO: 396909 - DNA, 1218 bp, Salmonella enterica
atggcatggaaaatccccgcgccggatgcggttcactggcctgccgcgccgtcgtggtcaggctggtggcggtcgctgatgttaagttgttcagccgtggtgatgaccggatgcggtatttatttctggctgcatgactcgcgggcgctggtttacgcctttgccggtgtggtggtgctgatactgctgtttgccgggattgtgggctggtggatgtaccgttacggcgtactcctggagcacgctgatggcaccacgcagtacaacgccatgctggaagcgcagtggcagaggtgggctcaagaaggcatggtggtgtcaggcgtcagtactcttttccctgaacaggtgcggacaccgcaggacagtggtgagccggtaagtacgttggctccgctacgtctgcctgaatgtccggggtccacgtatttgtttaccgaattgctggctccgctgcgcgtggcgttacagattttcatccgcaatcagtcgctgacggtctgcctgccggaaagcgcgtctgaggacgactggcagtgtttccggtcggtgtgggcggcgctgtcactgccactgtcggcgatccagctttcggaaatgaagcctgagcctttcagccgccagatgacactctggcaacagaaagatgcggtgcgtacgggctggctcattatccgtcataactggacgcctggcagtgaaggcactcagggggcggtggcctggttgttatctcatccggatatccgtaccgggctgcggccctgtgccacgctgcaccgtgtgttccccaccgataataccttacctgacggtgatctccggcagtttctgcaatatcagtgtgtcagcaatacgatgaaaggcgtgtggtctgatgcggtcactcagccacatatcagtcgtctgatggtcgccctgagccagcagcataaggctgtagccgagcagggggaagcgacggtcattccacccgcatcaccggttcagcagtatctgcctcactggctgggcgagatgaaagacggtgaaacatggtttgcggtcacgcaggcaatacagatggcagagcatacccgtgaaacgcaggtgctggcactggctaagggaaatgacaaactgaagagcacctggcaactgggccccaaaaagcctcgtgacaaggagtatgacaaccagcaggaagaatatcaaaaagcactgggggctgtgttatga

SEQ ID NO: 396910 - DNA, 270 bp, Salmonella enterica
atgagcaagggcattgttcgcctgcatgacaaactcagcagcggcggggaagtgatttccgcctcttccaccatgattatcgacggtatcaaagctgcattacttaacgacctggtgtcctgcccgatagaagggcatggcgttaatcgcattgtggggacatcaccggaatggcagtcagacagtgaacaggccgcctttgatggtgcgctgtgccagtgtggctgcacggtgatcgccagcgccaccggcggtattctggggagctga

SEQ ID NO: 396911 - DNA, 1161 bp, Salmonella enterica
atggcatggaaaatccccgcgccggatgcggttcactggcctgccgcgccgtcgtggtcaggctggtggcgggcgttgatgttaagttgttcagccgtggtgatggccggatgcggtatttatttctggctgcatgactcgcgggcgctggtttacgcctttgccggtgtggtggtgctgatactgctgtttgccgggattgcgggctggtggatgtaccgttacggcgtactcctggagcacgctgatggcaccacgcagtacaacgccatgctggaagcgcagtggcagaggtgggcacaggaaggcatggtggtgtcaggcgtcagtactcttttccctgaacaggtgcggacaccgcaggacagtggtgagccggtaagtacgttggctccgctacgtctgcctgaatgtccggggtccacgtatttgtttaccgaattgctggctccgctgcgcgtggcgttacagattttcatccgcaatcagtcgctgacggtctgcctgccggaaagcgcgtctgaggacgactggcagtgtttccggtcggtgtgggcggcgctgtcactgccactgtcggcgatccagctttcggaaatgaagcctgagcctttcagccgccagatgacactctggcaacagaaagatgcggtgcgtacgggctggctcattatccgtcataactggacgcctggcagtgaaggcactcagggggcggtggcctggttgttatctcatccggatatccgtaccgggctgcggccctgtgccacgctgcaccgtgtgttccccaccgataacaccttacctgacggtgatctccggcagtttctgcaatatcagtgtgtcagcaatacgatgaaaggcgtgtggtctgatgcggtcactcagccacatatcagtcgtctgatggtcgccctgagccagcagcataaggctgtagccgagcagggggaagcgacggtcattccacccgtatcaccggttcagcagtatctgcctcactggctgggcgagatgaaagacggcgaaacatggtttgcggtcacgcaggcaatacagatggcagagcatacccgtgaaacgcaggtgctggcactggctaagggaagcgaggcgtttttgatgagtgtcagcagtggaggtgataatgtcgcttaa

SEQ ID NO: 396912 - DNA, 522 bp, Salmonella enterica
ttgtccggcacgcccctgggtgttgagcgtgttcatcagcgccaccagcggcgactggcgaacatccgccatcagggtgagctggtcaatggcatcggagagcgtggcggctttctgccagcggatgctgttgaggaaatccagccaggcgctggcataatcagtgaagtagcgttccgtcagccgggctttcagcgcttccggagaaatatcctgcatcaccgggtgccggttatcgctcagcacccagtcaatctcgtcccggcgttcgctgaccactttatcaatcgccggttgaaccgcatcatcccacgcctggcgggtgaacatccccggcaccacgtcatcggtggtgaacaatcgcgaggcatccgtgtcgccggtcatatcggtgagacgcatatcggcgtagttacgggagacctgcaccagcattttctggtagagcgccgattcagcattacgctgaccaatcaggcgcaacagggcgctgcgggtggtggcgaccagttgcgggtctga

SEQ ID NO: 396913 - DNA, 792 bp, Salmonella enterica
gtggtagtccagtttctgctggtcgagatagaggtcggtctgcatcacgtcacgggccggtttgcccatcagcgcaaaatgcacgccggcatcaccgccggtaaacgccacatccgccagttcactgagctggttcagggcattcagaaagtccgggttaaagtgcagcccctgtgcggcaatcgcatccggcacccagtgacgaccttccctgcgcagcacgccgcccaggctggttttcacaaactgcgtgatgcgcccggtgtcgttacgcaggtattgcgacaacagcggcagcgatgcttcgctctgtttatccggcgaaaacggccagcggtcattgaagtcctgctgccagtcgttgacgatggcctgctgccactgattattaatgctctctgcagtgggcgacagcacctgctgccaggcctgctccatcggttgcacgaacaccgcctgaccaaagccactccattcctgaccgagactggcagccaccagactgccgtagtcacgggtatcggtgatatccaccgatttcccctggaacaccgtctgcgccagcgcctgcatcatcgcctgcgggtcggcggcaccggtgacctgctggagcttaagacgcacgcggataacgcgggtgaggaaggtctgcagactcaggctgttatcaccactgcccttcgtgtccatcagctccagcacaggaccaaaggctgcatcgagaggaccgtgcgctccggctttctggtcgatggctttcgcgtcatcggtactgagcagatttttcgctga

SEQ ID NO: 396914 - DNA, 4026 bp, Salmonella enterica
gtgactgaaaatgcattaaacaaatcagagtcaactttcactgtccaaaagtataaagtgagtggctttgacataatcataacaactccagatggagaaacggaaaccattaaagatggtttatcccttttgattatgggtaaagtcgaactcaaagacacctctggaaatatcattacgcaaaacgatgtcatatctacaatcaaaggtgaaacgttaggtcttgatacggtgtatttgggggataaattagagggaaacgagttcaatgcgaattccggtgaaaaaaaaactgatgataaaaccaaaacaccaacccttgggggagatgagagttttcaggttcatcagcaacaattgctccaagaaaaaatcaatgaatatgagttattattaaaaaaaaatacggaaactctgaagagtaaagaaatacaggaagcaaaaacacaagacgctgaaaataaagaaattgttgacaaaaaacttgaacaacaattatcgaaaactctcaagccagctcaaattgatgtccagaacagtgtttcagtcaataccactgaaggattgtcgtcttcatcgtcgtcttcatcgtcgtcttcatcttctgtaatgaataaggttacaccaccaacaataacagatactgaaaaattgttatttatctcggggaggttggacgccaaatcagattcgggcaaacatggtgatgcgatcactaactgtgctactccttctttttcaggctttgctacacctaatgctaatgcatttttgatccttaacggaaagaaacacccaatcatttctgacagtgaagggaaatggtcactaaaattagagaatccccttacggatggcatttacgatgtgacatttaaaatcactgatgcaaatgggaaaactgttgaatcaaaaacaacactgacgatagatactgcccttgatggcctgagcgtagggttagacaaggattccgattcaggtgtagtgggtgataacatcacaaataatactctaccgatcattaacggaaaaacagaaccgggcacaatagttaccgttgaaattaatgatacaacactaaaaactatcgctaatgctgatggtttttggagtgttgttccactgcaatctctcattgatggtgtttataaatattcagtcactgccacggatgctgccggtaacactgccaccatcaccaaagaggtaacaattgataccacggcccctgatgcgacaatactgcttagttccgcaagtgattctggtacaaaagacgacttcatcacaaatgtaagtttaccaatcttgtcaggaaccactgataacggtgcaacaatacagctgacctttgatggacaaacctacacaatcattgccgacagtaacggcaattggagttttacacccgcagcctcccttcacgatggtgtatatgcattcactgcacaggtcacagaccttgcaggtaacactgccagtcacgcaggcaacttaaccattgattcgcagattccgacagttacagctaatttagcaccggctacggactctggtcttagcgatcacgataacataacgaataataagcacccaacattgacaggcgttacaaaagctaacgctactttaaccatcacgcttgatggccagcattatagcgttatagcagacaaggaaggcaggtggtcatggtctgtacctgattcgataacacttaatcagggattgaactcttatgctatttcagtttctgatgcagccggtaatactacaaaagtacctttcgctggaagttttattttcgacacaaccctacctcccacatcaacaatcggattcgatcctgaatataactccggggataaagacgatgccattacgaatgtcaatactcctgtttttattggtcaatcagaacctttttctcaggtcacagtgattgttgataatcatacttatagtgttcgcgctgacataacaggggcatggcgtttagaacttcttgaggaattgcatgacggaacttatgacgttgagatatacgcaacagatcttgcagggaacgtcagcattgacaaaactatctgggcattcgagatcgatacttccataccgacagccacggccataatagaagcggcagatgatactggtgtaagcgacagtgatggtgtaacgcaaaataagcaaccaacatttactggcgtcacaacagctaatgcagacattactctcaatatcggcggtaatgaatatcatactgttgcagatgataatggtttatggcgaatcagtttgcccactgagcttacagataatgtttactcctatgatgtgactgtagtaaacaaggccggtacaagtgcaacaacaactggtacattagttattgatacgatctctccttcatccgatgcttcactcagtaaatcaagtgatagtggtcaaaaccattctgacaatattactaatgttgtcaagccgactctgacaggaaaaactgaaccatattctataatcgaagttcagtttgagggaaatagctattcaccaacggttgcagcagatggtgaatggatcctgactcttcctgccaaacttaacgatggcagctatatatatacggttgtagcaaccgatttggcagggaatacctcctcatctgagcaccattttgtcattgatactgtatccgaactcacagctggcttagacctttccagtataatggaaggagctggtatggataccataaccaacctggcccgacctatgctgagtggtgtagctgaacctggaagcatagtcactgtttgtatgtcaggtaataaatatgtagcctctgtcgacgatacggggcgctggacattcacactgcctaaagatgctgttgcgggaataaacaattatagcgttacatccgaagaccttgctggtaataaaacaatcttatcaggcaactttacatatatttcatcaggcattcttcctcccagagttaccgtacagcttgctcccgacagcgatagtggcgtaattggtgatgcgataacaaatcactcaacaccaacatttatcggaaatgcaacaccgggatgtcttatagttctggtcattaatggctatagttataccactacagcctcagctactgatggctgttggtctattgatgtgttaaatactctaagagaaggctatagtgattatatagttacggcaacagatccatcaacgtcattatccaccacattaaattccggtatttacatcgataccctgaatcctaatgttacgataaatctgaccgacgatacggataccggtatcaagggcgatatgatcacaaaaaatagaaaaccaatatttacggggaaaacagaagcaggcgcgaaagtattactacatattgatgacgaagatatcagcaccatagcggatggcaacggtaactggacattaacgtcccctagggaattccccgcaaactaccaagctagctatactgttactgtcaccgaccttgctggaaatgaaacatctcaagcaggagcgttggttattgataacactgcaccatacttatccggctcgcaactagatagtagcagtgatacagggatcaaagatgattactggaccaatcagctaaccccaactctgaccgggagaactgaacctggatgcaaactcacaattagaattcaagggactatctatgacattacagacatagcaagtgacggtacctggaagttcactgtaccagcgggagttattcccattaatacgtcttattatactatacatttttgggtaacagctactgatactgcaggaaatagcacaacgactaatgataaagtttatagtgcacgttaccacctcggtctgactggtacattatcggaggatacagatacagatgttaaaggtgataacttaacttctaataaaaccccaacccttgagggaaagatcacaagcgaagataatgcccaaccaaatgagaaattgtaa

SEQ ID NO: 396915 - DNA, 795 bp, Salmonella enterica
  misc_feature (86)..(95): n is a, c, g, or t
atgtataaaaaacagtttgggctttttatgaataaagcccctggaaaaacaccttgtgatcttgtaagtacaggcgggataactcnnnnnnnnnncgaaattgcaaaagcaaatttacggcatgaattaaataatctggagtgggctgatgcgttagccggccaaatagatcgacattctgagaattatcttatcgatattgataagcttaccggcaacataaaagtaacagggattgataatgatgcctcctttagcgtagcattaacaggtataggtattatatcagtaaataatctaaatatatctgtacaagacaggaataagttaaccccttattttcttagaacatcgcagggaaaactataccttgatgattatcatagcccggtaatagatattcgcatgttagatcatatcggtcaagaaaccataagaaatattactgggataaatcaaaaaatagtgcctgatcttatttctcaggagacttacgacgcattaatatctatcgatgctgttgattatgcagaaaccctaagcgaattattaccaccagagaatgttcaagctgcccttaagcgtcttgaatcagctaaacaacatgcttcagaattatatcgtaataatcgggtcataagtaattggcaagatcctaacattgaaatttgttataacaacgaactgctagattatgaaaataaattaaacagaggcatcagttatccacaaaatgccaatctcgatctatctttatatcttagggacttccactatagtgtattattggtttga

SEQ ID NO: 396916 - DNA, 336 bp, Salmonella enterica
atgattggaaattataacaatgattacgactatgatgataatgagtatttaaatgatgacactatagaaatccctttgagctgtgaagatgacgaatatagagaggattatttaagagaacaagagcaagaacaaaaatctgttttacagaaaatgattgagtataaaaatgaaaatgcattttttggtcatttatacgaaatgtccggagtttttggttttactgttgttttattgttaggatttatttttacgctgccgattttgtttatggctggattgattgcgttttttattacgataaaagaaaagagaggttctaaaaatggcatttaa

SEQ ID NO: 396917 - DNA, 177 bp, Salmonella enterica
atgcccgtgaactggtggacatgcccgtattctgacggggtgatgctggaaaatcctgatgagattgggccgaattttgtccttttgcttatcctcgccgagaagctccagcgcctgcgtgatattttcgaagcggctgaagtccggcgcatgcaggaagacaagctccctctataa

SEQ ID NO: 396918 - DNA, 783 bp, Salmonella enterica; identical to SEQ ID NO: 377850

SEQ ID NO: 396919 - DNA, 492 bp, Salmonella enterica; identical to SEQ ID NO: 377634

SEQ ID NO: 396920 - DNA, 759 bp, Salmonella enterica; identical to SEQ ID NO: 381652

SEQ ID NO: 396921 - DNA, 258 bp, Salmonella enterica
atggcgccgccactgtcgcttggctcgcgggtcctgatagcccttattcgggtctatcaacgcctgatcagtccgctgcttgggccgcattgtcgtttcacgccaacgtgctcaagctacggaattgaggcattgcgcaggtttggagtgataaaaggcagttggttgacggtgaaacgcgtattaaaatgccaccctttacaccctggtggtgacgatcccgtcccgcccggaccatttgataccagagaacactaa

SEQ ID NO: 396922 - DNA, 354 bp, Salmonella enterica; identical to SEQ ID NO: 377722

SEQ ID NO: 396923 - DNA, 225 bp, Salmonella enterica; identical to SEQ ID NO: 377879

SEQ ID NO: 396924 - DNA, 681 bp, Salmonella enterica
atgctctctgaacgaacggcaactccctgcccaaaagtcgctttgcaaacttgcatcgataatgtgttagccaatcgcccagatttgttatcgttcattaagcaactggaacaagtgggtgtaacctgccagcccaacattgcttcgacgggcaaaatgaatggtttttcatttgaatttcgggggattgccttcaaggcttcacagcttgggaaaaggtatgcttggtcaaatattcagacacttattgattactcgactggacatgtaaaactacttaatacaggatctaagtttgctcctgctccttgtaaacagccagaagcacaacatcccagcagagaaactattctcgataaactactgcaactcgacgagcaagtcagaaatgaaagggagaatgaacttgcccataccatccaattgaaccaaaaactacgctttacggcccatcagatatccagacaacaccaatcccacttccaggtgtggcttccatttcttagcaggctcatacaactgctcagacagttgggtagttctgtgttgtatgcgacctctcgtccctttagacaaatctatcatcttcacttacttacctcctctcctgaacctggcgatgaaatacattcagaacaattggttagcaaaggatccaactacaaaccacatttcaaatag

SEQ ID NO: 396925 - DNA, 252 bp, Salmonella enterica
atgaaaaaaagaaatttcagcgcggaattcaaccgtgaatccgctcagctggttgttgaccagaactacaccgtggcagatgcagccaaagctatggatgccggcctttccacaatgacgcgatgggtgaagcagttgcgtgatgcgcggcagggaaaaacgcctgaagcctctcccattactccggaacaaattgaaatacgtgagctgagaaaaaactacaacgtattgaaatggataacgaaatactaa

SEQ ID NO: 396926 - DNA, 942 bp, Salmonella enterica
atgttttatatttatataggtcattttggggctgatgctggtaagatatacccttttgttttttcttttcatgtgcctttatttttctttatttctggtttggtttgtccttcagtaaaatcaaacgaagatgtttttcgtaatattaagaaagcattcaattcaattatcatcccttattttatattttcaattattggaattgcatttctaactattaaatattcatatgattatgctactatacaaaaaatgatcattgattcgttttttggaataagaaataaaattcctattggatctctttggtttttgacatgtttgtttattgttataatttactataatatattagaaagactgtttgttaatagaatttttatattcttaatttcattctttatttatgcaaatgctaaaatttggtggagtggtgaaccatctgtcatgtttaacgctgacagtgcattgtattatttggctttttattcattcgggacaatgatttcgaataagttgatcaatgaatgggttagtccatcttgtatatattcgaagataagaaattatgcagttttattattgtctatttttgtaatggcatatgtttattttaaaagtgcatatgaaccatttaacggtattaacgtagttcagtttcaatatatttgttattttataataacaattattttgtttataccgagtatagcattatccaaaattattggagggaaacacattttgctattgggtagaaattcaatacttttgtgcggaaccgaacaaatattaaaactttcaattgcatcagtattatcaatatttggtcttgcggtatcaatgaaagatcctatggatgctgttatttatacgtgtatttgtttttttgtatcatattttacttttgttaaggcatatatttatttaaagaatagatag

SEQ ID NO: 396927 - DNA, 903 bp, Salmonella enterica
atgacaagtatagcaattcttgaagcagttaacacctcttacgttcctttcaatgggcagcaaattatcactgctgtagcagctggcgttacatatgtagccatgcgtcagatcgtggaaaacatcggcatagactggacaggtcagtctgttaagttgcgtaaaatgaaagataaattcaactgtagagatatctctatggttgccgctgacggaaagctgcgcaagcttctctgcatccccctgaaaaaactcaacggttggctgttcagcattaaccctgagaaagttcgtgcagacatccgtgacaaactgattaagtaccaggaagaatgctttaccgttctgcatgactattggacgaaaggtaaggctgaaaacccgcgtaagaaaacatccgttgacgagcgcaccccgctacgtgatgccgtaaatatgcttgtaagcaaaaagcatctgatgtacccagaagcttatgcaatgattcatcagcgtttcaatgtggaaagtattgaagaactggaagcgtctcagataccgctggccgtagagtacatccacagggtagtgcttgaaggtgagttcatcggcaaacaagagaagaaaaccaacgagctttctgcaaaagaagcaaacagccttgtatggttatgggattatgccaaccgctcacaggcattattccgcgaactgtatccggcattaaaacaaattcaatcgaactattccggcagatgctacgactacggccatgagttctcgtatgttatcggaatggcgagagatgttttaattaatcacatacgagatgttgatattaatgaacctgacgggccaacgaatctttccgcatggatgagacttaaggataaagagcttccaccttcattacatcgctactga

SEQ ID NO: 396928 - DNA, 162 bp, Salmonella enterica
atgcaaggcgcaagaaaactgccccagttcaacctgcgttggccgcaagagtcattgaatttggctaagcagattgcagcagaaaatggtagatcagtaaacgaagaacttcatcggatgtttttgcaaaagatgaaagaggaaggtcggtgcgtatcataa

SEQ ID NO: 396929 - DNA, 243 bp, Salmonella enterica
gtggctagaaacgacccgcaattcaacgtaagaatgccggatgagataaaacagcaaattacgcatattgctgctactaatcgacgctctatcaacgctgagattattgctgctatccagttgtggataaaaatgcataaagagcaggtgattccttcaagtagccaacatctcaccaagtccgagcaagaggctcttgatgtaactatcgatgtacttaaacgcttaagggatgggaaatga

SEQ ID NO: 396930 - DNA, 411 bp, Salmonella enterica
atgaacactgaaaaaatagcattcctttttccttaccataaatctgaaaatgatgaaaagtaccccatgttgatcatggagacagatgagtttcctgtgactaccgatcttgattttcaggttcactttctcggtttaatccatgagaaagcatactgggtttccgcttgtgtctatagagtagagaatgaactagaaataagtgttagcggtgataaaggtgtatggattagggcaaaaggacacaaggatggtagaaacaccttagcgacctcgatgtctatgcattttgataagtgcaaatttgatgctgatggggactacttaattcgagtgtccatcagcaaagacaacactcaggtgcattctgcgcaagcctacttttccgtgagtgatgtgaaagatgcgtga

SEQ ID NO: 396931 - DNA, 249 bp, Salmonella enterica
atggagtcaaggatcgcaaagttagagtctgatgtcagctatatcaagcgcgacattgaaatcattcaaaaagacgttaagtcaattgacactaggcttagtagtattgaaaccgggatcaccacaatgaaaacaaccattaaggctaccggagcagtcgtcacggttgtttttgctttttgcacctacgttttcggtagttacgtatctaaaatacttgatgcacttaacggattggtcctcaagtaa

SEQ ID NO: 396932 - DNA, 189 bp, Salmonella enterica
gtgaagaaaaaatttgtaagcattacaaaatgtgcagtttttatattttttatgacattttacggatttagtactggcgaagggttcaatcgtgatgccaatggattcagtttcttttgtctgtctatattggtcataattgcatgggtagaattaaagcaaacgttgtttcatgcgctaggtaaatag

SEQ ID NO: 396933 - DNA, 2154 bp, Salmonella enterica
atggcaaccgatgtaggtttacccgaaggctttgttctcgataatcagcctgataactcacagcttcctgatggttttgtacttgacgctcaacctaatcagcaacaatcgcctttggttccgccagaggagaatgccagacaggaaaatgtagttaataacgccaacggttttgaccgttttatgtttggcgtactcaatgggttaatggatgttggtaagggagttggtttatttaacgatatgactcctgaagaacaggctgcgatcaagtctatacaacaaaagttagctgccaagccatctacatcacaggatgtaggggagtttattggtcaggcagcgcctttcgttagcggtggcggattgatatctcaagtgccaaagggggctgcaaggttggctgcggcagcagggctaggagcggttgagggtggtgttgttgctaacggaaccggtggcgatgtaactacaggggcggctataggtgctgccgctggtccaattgctgaattggcatctccagtgattagcaaagcagccagtgcggttactaagaggtttaggcctccatcggcagaaatgtctcaggcatctgaacttagtgggatggcgagggttgcaactaaagctacagatgtgaatccaataacaggtaacagatctggtttaaatgctctcgcggaagctgtttcaccagatgattctgtgctacaggccgctcgcaatcttgggatggaggatgctttaactcccggcatgtactccagcaacccttcttaccgcgcgtttgaaaatgctttagctgcaaccccagggaataaactgttccacgcacagcgagaggccattagtaggcttggagagcaggcagataaatttattaatgattttggtgggagcgttgataaggactttatcaatcaaaaggtaaaaggctcttatgaggggttaagatcaaacctgaagcgccaagaagacactctatacaatcaaattagagcaaaaattccaacaagagctaccgtagatacctcccataccactaacgccattgaggacattgcagatgatgtcggtgggctagaaaaactaaaatcgctatatcctcaactgtcaaagaccttggaacaaatagacccaaacactgccccgacttatggtcttcttgatgcagttcgacgacaggttggaagggctcttggcaaagagatggataaagggccatatagcggcatcgactctcggcaccttggaattcttgaaagcgcactgatacaagatcagggagccgctgctgccaaatatggtgcagaggatacatggaatttagctagagagatcgggagaaagagattcgcagtacaggcagccgctgttcaaaatcttggcagggacttggataaaggaatagtaccgcaattacagcaagctatcgtcgatatgtctcaaggaaagggcggtgacttccgtcgcctagtttcaaatcttcctgatgacatggtgcaaccagctgttgccaccgcaatgaataaggctttcactacgttcgctaaatcgcccgggcagtcactcggtgttcctggatttgttaagtggtatggagggctatcaagaaacaaatcaaatatgcaggcgttgagtcgggcaattggctatcctgctacgcggaggttgagaaacatctatgaggtggcttctggcatgcaaagggcaggcagcgagaaggtgtattcctcctctcaaattgaccggatgatgaatcagttcgcgggagagaagggaatgcttgggcgtatatatggaataggcaaagacgtggctaaagcagaagggataactactgccatcggagcgccgggagccggtacggcaggggtactctttagcctcctccgttctggtaaaaactcaagaatggctgctgctgatgaattaatagcatctccggcttttaaaaatctctcaaaaaggattgccgcaggtcatgccagcactccagcctccaggaaatctgtggatgcttcaatgcagaaagtgaaaccatatagggattgggtaaatacgctatcagcggacgagaagaaaaatctcgcccgcgttggtattgtcgcttttctcagtagtaacgattctttgcccacagagcaataa

SEQ ID NO: 396934 - DNA, 144 bp, Salmonella enterica
atgccgctaaagaagggtaaatccaaaaaggttatcggtgaaaacatcgcaaccgaaatcaaagccggaaagccaaaagaccaagctattgctattgccatgagtatggctggcaagaagaagccaaagaaaggaactaagtaa

SEQ ID NO: 396935 - DNA, 189 bp, Salmonella enterica
gtgagctgcgtaattaatttgggtaaggagaagaaattccccatcacccaagagcttttcgacaggattagcgatgtcgttcatgaatatgacggttacatcagtttatgtgatgcgctcggtacgttagagctactgaaatcagtcttgattagtgagggcacagaacatgccgctaaagaagggtaa

SEQ ID NO: 396936 - DNA, 471 bp, Salmonella enterica
atgagtcgtattaaggcaattattgcgtctgtcattatctgcatcatcgtctgtctttcgtgggctgttaatcaataccgcaataacgccatcacctacaaagaccagcgtgataaagccactgaacaactcggcctggcgaacgccaccatcaaagacatgcagacccgccagagggatgtcgctgcactggatgccaaatacacaaaggaactagccgatgcgaaagctgagaatgatgctttgcgcgatgatgtcgccgctggccgtcgtcgcctgctcgtcaacgccacctgtcccgcagtgccgacaggtaaatccacctccgccgcccgcgtggataatgcagcccgccccagactggcagactccgctcaacgggattatttcaccctcaaagagcgagtgacaacaatgcaaaagcaactggaaggggcgcaggactatatcagaacacagagcctgaaataa

SEQ ID NO: 396937 - DNA, 372 bp, Salmonella enterica
atgctctttacaaagtggcgatttttgtttaatatcgtttctaacagtagaaatccgtcctttgttaaggtggatttgaaagaaggccctgcagcgatgcggggctttttacgttttaagcacgacatttctgaaagcacatcaaaccaaataccagacagaccaaaacaatcactttatccgctgtggctacggtgcggtgtgctttgcataaaagaaaaccagcgcaatggctggcttcgtgaaagcgggtggcaagaggctgcgctaacaacctcctgccgttttgcccgtgcatatcggtcacgaacaaatctgattactaaacactgtatcctggatttgttctttccaatatcaaccaattcataa

SEQ ID NO: 396938 - DNA, 765 bp, Salmonella enterica
atgaatctggaaaatgtagtgaagtttcacttcgcaaaatctacacagataaacgatatccctcgtgcaacagcttcagaaacgttaactggtactgatgtaatggccgctatgggtatgactcaaagtcgcgcctcgttgggttacagcgcgtttcttgggaagatggaaatcagcagcaatgaccgtgagaaagctattgaactgctgactgcctatgctcttaagcactgcgataaggttactgccttacgtaagctcgaaaatgatattaagccaaaggtaatgcaagttctcgcaacattcgcatttgctgactattcacgaagcgctgccagtaccagaacctgtgattgctgcggcgggaagaagtttatcgatgccgaggtaatgacgatgaaaagcatcgggcaaccgtacctctcagagcgcaaggagacggtgaaagttttgtgcaataagtgcaaagggaagggggttctgaccaacgcatgccagtgcaacggcaaaggtgttgttatcgataaagagaaaactattctacaaggaggcgtccctgcatacaaaacatgcagacgttgtaatgggcgaggatatgctcggttactgcctgatagcgttcgaaagtacatctgcacaacggtgattgatattcctgaaaccacatggcgcaggtcatataaggatttcttcgaaagtctggtaggtgagtgtattaagcaggaggaatatgcaaatcagatgttgagcaaagtcacgcagtga

SEQ ID NO: 396939 - DNA, 231 bp, Salmonella enterica
ttgaaacttaaaatgcacacgccagacggatcggtgattgtcgaaagtaacctggtaacgcagttctaccctgacttcgaaagcggcggtgagttgaccaccatcgaaacagtatcagctaccggggaaactttctcggtgaaagttaagcactcgtttacgcaggtgactggcgcactggctacagcatggcgagttgacgagaagaaagcagaaggagccgcccaatga

SEQ ID NO: 396940 - DNA, 360 bp, Salmonella enterica
atgagcaacatcgacaaactaaatgaccatgaactggttgatctgaaaaacgctatcgaaagagagcttaaacgacgcgctgatgggccaaaaatcaccacgtattatgtcgtttcctgtatcactgatgctcagcattttactgatttggactgcgctttacgttgcttaaaaagtgtcaccgaagaccttatggagtgggtaacggaatccccagaaaaccgggattacgtcaatcgatgcacaggcattgttggggcaaaactccaggtgaaggagatgaatatcgatcatttcaacatgcgcgtagcagaaaaatatttcgacgatatttgttatccacaggagacagcccaatga

SEQ ID NO: 396941 - DNA, 402 bp, Salmonella enterica
atgagcaacatcaaaggtccgcttatcagcagtcagcgctacctcgacaaggcaaaggtaaacgacagagcggcaagatttaagcgctttattgtatctgtttacccgatagttctgcgtgggcagcaatacaccatcctgatggatgggcaccacaactacgcagcggcaaaactggctggcatagaacctgattaccggccaatcaccaaaaaggtgcagcgtattctcggtgagatgtcagggcgcgagcgcgaggcattcttcatcaacaacattacagacagcaactactacttcgttgaaacaggcgaagtggttcatgagttggttatgcctgacacgtcctgcaaattccaggcgcacgcaggtaaccaatggatttttggaggtgcagcatga

SEQ ID NO: 396942 - DNA, 189 bp, Salmonella enterica
atgagacaactttacaccattgttatcgcacttgtttttggttttggtggcatttgtatcggtgagagtgctggctataaccgtggattaagtgaaggagttgatatcagggagggggataagtgggattgtgcttactcatacgtgaccggattccttatgtgtgatcgaaccccaaaatataagtag

SEQ ID NO: 396943 - DNA, 249 bp, Salmonella enterica
atgagcgaaattatccaattaacaccaaataagtgggttacagaagaagtcctgatagcgattaccggcctgacaaaaaacgctatcaaatcagcacgtgacaagtcatggttagaaggacgcgaatatcgacattactcaggagactgccagcctaaggacaattcacctatcctctacaaccgatatgaagtcgataactgggttgagagacaacgaccagcgatcccacgtcaaaaatctgcttaa

SEQ ID NO: 396944 - DNA, 1284 bp, Salmonella enterica
atgtctggttatccaactggagtggagaaccatggaggcactttgcgcatatggttcatatacaaaggtaagagggtaagggaaagccttggagtagctgatacggtaaaaaataggcgcgttgcaggagagcttcgcgcctctgtttgttttgcaataaaaacaggtatattcgattattcaaggcaatttccgcaatcaaccaaccttaaaaagttcaatatcgcaccacctggaatcacagtagctgaactagcctcaaaatggcttgagcttaagaagatggatttaactctgaatgcttataggcgctatgtttcatacatcaatatcaccaccgaaattctaggcggtaataggatgcttgaatctataacacacgaagatgtgcttaacgtaagaaaggagttgctgacaggataccagatatgtggagcacatcagaaaaacaggtcagtaaagaaagggagaaccgtcaggacggtaaatgtttatgtgacctgcatgaaaggaatgttcgattttgcaatgcttaatggctacataagcaaaactccattcgcagccgtgctccctcttaaaaagtcaaagtcagacccatcccccatgtcacgggaggaatatcagcgtttccttgaaaaatgtccatgtgaacaaatacgcaacctgtggaaactggcattcaatacggggatgcggcatggtgaaatttgcgctttggcatgggaggatatcgacaccaaaaactggacgatcaagatcagaagaaatcttgcgatttcagatcactttacgccaccaaaaactgaaagtggaaacaggataatcaatcttacccatccagccattgaagcactgaaaagccagatggcatacaccagaatgggtaagcaacatcagatagacgttcacctcagagagtttggcagaactcgccgggatgaatgcacattcgtttttgttcccagactaacagcaaggaatggtagaggaggtgaatggtactcacccgggtcattctcaggaacgtggaacaacatattaagaaggagcggcattccacaccgcaagtcatatgagtctcgacacacatatgcttgctgggcattgagcgccggagcaaaccccaacttcattgcagctcaaatgggacatacgtcagcacagatggtttacagcgtttacgggaaatggatgtccgacaacaatgacaaccaactggcaatattgaacgctaattttggaggtaatgccccacagatgccccatgccaaaaacgagtag

SEQ ID NO: 396945 - DNA, 180 bp, Salmonella enterica
atgacttatctacctgtgtacatcaagttgcaggtgcgttcgcttcagttaccgacggaagtcaagcttctgcggattcgctgcgtttgtaccttcctgcaactcgacttattcagggtaaagatatgtttattcgatgttggattcgataaaccacaagaatttatcgaggtcgcgtga

SEQ ID NO: 396946 - DNA, 363 bp, Salmonella enterica
atgcagcatattgaatggttagtgctaccgattacgtttttctgtattggacttgccgtggacagggcgataaacaagcttaaggacaacacgcaatccaaggtagaggccatatataggcacatgaatgacttagaagagagaatgatgaggcactctgattggaatagggcaatatgccaaaaagagtcatatgacaagattaggtctgagtgggaagctgaaaagatagcgacagtggagagcgctgagtcactggagggggaggatggggtggaggcgatgcttagaatgtgggatgtgataaagaaaaggtcgtatgagatatacccagaaaaaaagatagaagattttttggagtga

SEQ ID NO: 396947 - DNA, 216 bp, Salmonella enterica
atgaaagttgtcgccgggtttacgttacaggccatgaagtcacaagttatagcggtagcgattaaaagcaatgagcaccccgttgtggttgatggttgggaaaaatggttcaaaggccagtcatgcgatcaccacgccgaaagcggggagcgcaagcaaaagctatgcggtgagtgcaaaaaaggccctcagtgcgaaggaaagcagtgtgtttaa

SEQ ID NO: 396948 - DNA, 288 bp, Salmonella enterica
atgaacaaagcacagcaggcggtaacggacgtgtttagtacgcgagcagaggcaacgatgaagcagataagggaagaagtatcggattttactgctgagcaggtaaggtgtgcagttaatgaaatgcgccgaaccgggcgaattgtccgagtagataagggcggaaatacagcggtttacgaactccgcgcagatccaaaactcccgatcacagagcaatgccgccagaactggcagggctatcaaattcacaagattttcggcagtgccgggagagtaacagcatga

SEQ ID NO: 396949 - DNA, 579 bp, Salmonella enterica
atgaaaaaatacgaattagtaactgaattatcagaagaatttttgtgcaaaaaactgttccgcattcgcgcactggtatcgttcgaaggggttgaagcgggtgatttaggtggttgggttgaaaaagaagagaacctagaccaggcaggcgatgcgtgggtgtccggcgatgcgcgggtgtacggcgatgcgcaggtgtccggcaatgcgcgggtgtacggcgatgcgctggtgtccggcgatgcgtgggtgtacggcgatgcgcgggtgtacggcaatgcgcgggtgtacggcgatgcgtgggtgtacggcgatgcgtgggtgtccggcaatgcgcgggtgtacggcgatgcgtgggtgtccggcgatgcgcgggtgtacggcgatgcgtgggtgtacggcgatgcgtgggtgtacggcgatgcgcgggtgtccggcgatgcgtgggtgtacggcgatgcgtgggtgtccggcgatgcgtgggtgtccggcaatgcgcggctgtccggcgatgtgcgggtgtacggcaatgcgatgcacgaaatgcgcgccgctggcatcaaggttaaggagtcgtga

SEQ ID NO: 396950 - DNA, 330 bp, Salmonella enterica; identical to SEQ ID NO: 395158

SEQ ID NO: 396951 - DNA, 633 bp, Salmonella enterica
atgacaatcgacaaacaggcgctgctgggtcccgataaacactcaaatcagcacaaactttctcgtcttatcgctgaggcaaatagcgctgagattcgtgatatagcggaagccgtcgagcagtacaccgaccagcttattgcggcgttggaagccgcagagaagcggattgctgaacagcgtgagtattacgaaggtgttatctcggatggaagtaagcgcatagcagaacttgaggcgaaacttgaaactgctgacaagttgcaggatagcgcattccgtgacggcctgaaagccgggttcagctatgggcagacagatgaccaatccgggttcgcgcagtgcatgtccgcatatagcacacgcgctggcattggcgtgaagcagcaggaagatagcgtcgattctgatgtaggcaggaatcagcctggaatggttgtcgcggttcatatcggcgccggtgactttgtgaaagtcaaaggacaagtgtttgaggtcgaggaaaccgactttgacgaccacgacgttacattatggtttgtgggtggcaacgcattgaaatgtgccgctggttgtccggttgaggtggtatctgcgccggttgccgctggcatcaaggttaagggggagtga

SEQ ID NO: 396952 - DNA, 663 bp, Salmonella enterica
atgaccactattaccagagaacgcctgcttaaaatccagcagtggcgcgaaacatatggcgctggtagcaacgttatgctgccggcagaagaagcggaagagctggcgcgtatcgcgctggcagcgctggaggcggatccggagccggttgtgccagagtccatcagtgttcggcaggccatttctactcttgagagcgcagattgtgtaacgactattggccaagcgtacaaaatgggatggaacgcctgtcgtgctgccatgcttcagggtggccaacctgtaagtaatcatgatgagttgccatacgcgcaggttaaggcagtcgctgacctgtacgccccgtgctggcagtcgggagaagtagttacttatacgcctgacccagaaaaggcgaccatctggctaaataactactcgggaacttgcgttcaggaatacgtgaagcttgaacgactgcaagaagcgctggctggcaacgcttcgataattccggatggttacgcacttgtacccgtcgaacctacggacgaaatgatagcggctgctatgaactgcgaagatgtgctgttcaatagcgatgagtcattctgtgttcagtatcgggaaatatattgcgcgatggtggataccgcaccagctttaaacaaaggtgagtattaa

SEQ ID NO: 396953 - DNA, 549 bp, Salmonella enterica
atgaaaacgacaaaaaacaaaacaagcgaacagtttttaaatattaaaaatttcaccccctatacaccggaaccagcggaggcattattatccggtgcggcacatcttaaatcagaggatggtcaggactggtacgcgtgccagcaattattttcagcagacacgctgaaaataacctacgacgataacgatgttattacgtgtatcacgcgggatatttccggtctgtggcccgcgggccagagcgtggcggagctacctgatacggatgaaaaccgccgcgctgatatttcaggcggctggcagtttacagacggtaaaatcgttcaacgggtttattcgccggaagaactgcgcaaaaaggcggaggctgaaaaagttcgccgccttgctgaggctgaggcggctattgcaccactggcgcgggcagtaaaactaaaaattgccacagatgaagagattaaacggcttgaagcatgggaactctacagcgtaatggttaaccgggtggataccgctaacccagactggcccgaaaagccagaataa

SEQ ID NO: 396954 - DNA, 2028 bp, Salmonella enterica
atgacagaccagtcagcagatctcgtaacgaaaattgatgtaatccccgaactggagggattaaacagctttgatgcagccatagagcgagcaattgccaaagtgaaccagcttgacgccgctattaagcgcgttaacaaccttaaacctgccagcccatacgcgccaaccaataccgtcagtatgccatcggctgcaacaacggcagcagtggctacaatagccgctacaggcgcaaatctggttaacaggacgccgttagcagatacagtaagaaaagaggctcagaaggtcgctcgcgcagccgtagagggaacggcaagcggcattacagaaaaaataagtattcctgccagcaatctctaccgactgccgcataataacgagtttggcggttttcttccgccgcccggaaccggtcgctctggaggtggcttcaacgtcccaccttcgggcgcttctggatggtctgctggtcgtgctggtgggctgcttgacccgcaatcactaaggcgtggcccatttgcggatatggacttttctccatctcgcttttctggtgaaccactggaggcaaaaaagaaacctgttgcagaaggcgttgagaaagcaactcgtagcccgtttggcgtagataacatgctggcgggagcggggctaacggctggcattattgcggcaggtaatgcgctggcagacagccttgactctgtccagcgccaacaggctcaaattgcgcgtctggctcagactaccggagacgcaaaagatgcattttttgctcttaacgcagcggcaagtgatgttaaaagcgatagcggggcgtttatatccacctataccaacatggcgacggctacccaaaagctaggtttatcacaggaagagacgataaaggctactcaggggcttgtgggtgctctccagcttggcggggcagaaactcacacaatcaatgacgcgttgtatcagatggggcaggcgttttcttctgaccgcttcggaggtgatgagtttcgctcgtttatggaagcaatagggacaatggccccgaaagtagctgaggcattcggcactgatgttaaaggcttgcgggcaatgtcgcaggcagggaaattaacgtcagagataatgattaaagcgtttcaaaaaatggctgcaactaaccttgatttgctgaaaaaacagggctggacgtgggggcagacaatgacagtcatgaaaaatgactggcaagccttcttggcacaggcgaccatcggcggcgagtggcaaaaatttacggattgggcggctaatacgcttatcccgttggcacgtagcgctgaaaaagaagttgctgagttttggtctaccctggctgatgagagtaaaacagccatactcattggtattcttggcgctgtaggcgcggcattcactgctcttgcaattccagtgatggcggcgctttggcctttcctggctattggtgcggctgtatggttggtatatgaggcttttgtagagtggaaagcctggctgaatggtgaagggggaacaatttttgatagcctatttggtagtttcgatgccttcgagaaacgttaccctgcaataatgaagatgcttagggcattaagtggcgcatcagatgaagcggctaataatgtaaataatgatggtagtgttagtgatactgcacctactcaaaaaagcacttttagtgaactatttaacttctataatttatttggtaatgctggtgattacttaaaagaaagagggaatgactttaacccacttaatggtatagagagttttctaaacatgttcttaggtgaagataacgtaaattcatcagcggaactaatagggacatcaaaagcaggaacaatagtcaacaataataatagcggaaatagagaaactcacattcacgtagacagcgcaaaagaagctgctgagactgtaaacaatttagataatcccggcgcgatctacaatggtttatctggtaacatagcggaatcaactggagcattgtag

SEQ ID NO: 396955 - DNA, 246 bp, Salmonella enterica
atggatttttttaagtttgaccaattaataacgccaaaaatattatcaattatctatctgttgctggtcatattttgtatcgttatggcggttaagacaggcggtacaaatggtatacaaatgatttgctggataattgctgctatcgttatgcgagtcccctttgaatttgtcatggtaacgttcaaaaacaacgagtatctgcgtcgaatctgtgaagagatggaggagaaaaaagcagagtaa

SEQ ID NO: 396956 - DNA, 222 bp, Salmonella enterica
atgccggaatcattccggtgttttgtcgggttggacaagccggaggcgcgtcagagggcatgtggccaaaaaccattaaaacccttctatctccatattaatgcgtataatgtatattatgttaaatggtgggcggaaacacgtaagccgcttgtaatctacgttaaaacggagaaaaccttctctcccatgccttttatcgtatatgtagttcacttctaa

SEQ ID NO: 396957 - DNA, 252 bp, Salmonella enterica
atgttcaataatattatccggacttgtcaaaatattgtgttgtccgtttaccaggaaaactggcatgatctaaacacaaagtgtgctaacaacgtaaccggtcgcaaagagcaccgattagacgaaaatcaggaaatgtatacgtcaacgcagatagcgtcgctgcccgcaccagaaacgttaagaataatttatgataatatttctcagatgttacaagcaaataacaggcagacaaccgattttcgttaa

SEQ ID NO: 396958 - DNA, 261 bp, Salmonella enterica
gtggacgccggtaatcaccagcggggcatacagaaagccgaacagcgccgcgcctatcggggcgaaactgccggtcatcatataacgtaccgcaaaggccacaccgtcgccgatcatacgaccaaacgggccgataacggtgtgggcgagaaagacggccagtatcaacgaacagaccgggacgacaaccagttagagataatccggcacgatgcgcttcaggcgcgtttcaataaactcaagcgtcagtcccgccagtag

SEQ ID NO: 396959 - DNA, 1266 bp, Salmonella enterica
gtgtcattaaaaaaaattgctattatccctgctcgctctggttctaagggattgcccaataagaatatattaatgctactggatcgtcccttgattgcttatactattgaggcggcaattaattctggtgtgttcgacagagttgttgtttcaactgattcattagaatataaaagtatctcagaaaaatatggcgcagaagtaataatgcgcacagaagaattatcatccgattcagcaacatcctttatggtaattgaggatgtattaaagaaatataaggagtatgattactttgcccttctacaaccaacatctccgttccgcaattgtatccatgtcaggagtgcagtcgaacaatttgaacatgctgataaagctagatttttagtttctgttgttgaaagcagtaaaagttcagctttaattaaaccaattgatgattccttatcattgagaaattttaattgcgattttagtaactatcgtaggcaaaatagaaaagaatatttcccaaatggagcaatttttattggctatattgaagattatttaaggcgtaaacatttctttggcgaaggaagtgttgcttatatcatgaataaagaggattctattgatatagatgatcaattagattttgaaatggcaattctggttcaaagcaaaaaaaatagaaaaataatgttgaacaacgctattattaaacgaatttctgagaagaaacatattcttaacaatgctgagccaataacattgattggacattcaatttttgactattgggatattgatactttgtgcggattgaaagttaataatttaggcattgcaggtattgatagcgagaggtattatagatatatcttagaaaaaaaattaattaccagtgttggtgattatgtattattgacttcaggtacaaatgatattgtccatgatgattggaaagttgaatatacaataacatggacaaaaaaaatgattgatagtattaagtctataaatcctaatgtaactatttttctattagcggtaccgccagttcttggaagggttgagagaaataattgtattataaacgaattgaatttagttctgcgggagtattttagcaatctagagaatattatttgggttcccttatcgccatctttttatgatgggtttggtaatctgaataaagaatacacttatgatggtctgcattttacagcgcaagcatataagcagttagaaaatgatatctcgagtatattaaaatga

SEQ ID NO: 396960 - DNA, 1503 bp, Salmonella enterica
atgaaaaaattttatcactttcgtgattatcagagagcaaagcttgaaagccatgcgttctataagcttattgattccgatattatcccgttaaaaaacaaactaatgtttgcccctgtgatggctcattttgtgatgaacttcagggatatgaataaatgggtcataagatttgcaacaacagattctaaattcaaatctgttattaatgcaggaactactgaagacgaaacacattcaagattatttcttgaggactggagaaaactctatcttgatgataagttaaactggaaggccagcgacattatatactggttatttattagtcctgaaatggaatgtttcagaaaatatggcgtcgagtttatgcgtctttgcgttgatgataacaatgacccaatattgcgatattctcactctgaatccggagaaacctgcggtaacgtatttttttctaaaataagtcctatagcagatgaagtcgcccatgaactgggggttcaattacgctattttggttcattccatcttggccttgagaatgggcatgtctggaagtcagaaggcgtctttgaaaatgaagttctgctcccggaatattatgataaagtcagaaatttatctcagagaatgtttgatatttttacaggaatacatgatgcattctatcactatacattaaagtatattgttaaacatgaagttcataatttcagcaatcctgtcaaaacggaagggaaaattctgaccaccccctctgaaataaacattactcagacacaaaaaaataacgaagaaattatacattatgtggacagttatctcagggaaattgatgagcatcctttctttgactgggtaaaatcctctacaataaatgctgaattaaagataaaatgctttatacctctgtggattgtagatatcatgatgtacagagatatcaataattacatttttacctatatgtgccctggctcaatgggagagcttcttattaacgattatgcccggcatctggcctgccatagtgcattattttataatgactggaaggctctgaaacttgatgatatgttacgctggagtgcaagtgatacgcttgagtttatatttctgaatactgatatggactctcaccggaaaaatcttgttaatttttcactgcacggaatgaaaaataaagatccacttatcagattctggtttatgatgatacttgaattaagtggaaaatcatttttttctgttattggccaggtagcaatgcaggcagaaagtgaatgcaatatttcacttccttacctgacaggaaagcattcatcagcagaagagcagaaatcatattgtgcgctatatgaatacttcattaatcaggatatatctaaagaacaagtaaaaaccataaaatatctttcagatattgttatgcggtcattattagaaaatcttgatatctcttataaatacgctttaaataatatttttgcggcgcgttaa

SEQ ID NO: 396961 - DNA, 213 bp, Salmonella enterica
atgagctgtcttttaaccttattgtatctgcattcgtccctgtcggacccggttcccaccgatcctgtcccgattcccgatccgcgtcctcatcctcaaccgatgcccgatccgcgtcctcatcctcaaccgatgcccgatccgccgccggacgaagaaccgattaaaatgtcgcatcaaacgcgcggatctgcgaggatacgcgcctgctga

SEQ ID NO: 396962 - DNA, 1104 bp, Salmonella enterica
atgtacattcaagatattcctaaaaattcaaaattttgggtcgttcgatctggtgatggtggcatgttttatgaccactttgttcataactctatagcagctattgggcacattgatgctatggaatttagcaatcagaccctcagcaataaagaggaggtgattaaactcgttcataattacaaaaacactttgcttgagaaaaaggaaacacttgcatctgcatctaataaagctggtcaagttctacgtttcattaatgaaatgtcggtcggagatataattatcaccctcgatgcgaagagaataattgtcggtaaaatcacatcaaacccttataaagacatagaaagtgtaacattactcaatgttgatggtacaacagatgaaaaactgcttaaatttagtcttagacgaaatgttgaatggggaaaaacacagttccgtgacaaactcccattagccataaataatagtttcagagctaaccaaactgttttctcagcaaacgaatactggaaagaacttaaccactggttatctgttgcatttatttccgataatgaagcttatatctcctcacgcattgaacaaacagaaggaattaacaatcttgacattgcgcaatattccataatcataaataaaattgaagccattgctcaaacaatcgccgacaatgacaacttagatttcgataacaaagaactattagccctctttgaaaatacatataaagagctacgcaaaaataggacatttacagtaacgacacagcaggtgtttctttcccctggagacctctgggcaaaaacatccggaagtcgtaaaaaaagtctattagttgtctgcacatttcttatcatgttcaacattgagccatctttcgcagatgacaaggacaaaatattttttgacaacaattacgaatcaatatctttgttaattaacaaagtaaaaaatgatgaaaactttgaggaagtgaaaagcggattagcactaaaagtccctgcacagaaactaaataagaaatataaacccgcaaatcctcagaaaaaatgctatgatgatgatgttgaacctgatgactttgaaggcatttaa

SEQ ID NO: 396963 - DNA, 651 bp, Salmonella enterica
atggggttcataaaaaaatggtgggataaccatgataaatctaataattttttatcaggtatccattacatagtcatttcgctagccatcataattggtggcgcgtgggctttgtatacctttaatgcattgcaaatggctagcaatgcggaactccaactaaaaaaggctaacgaagaattaaaacaaataaaagagcaaattaagggcactgactctagtagcattgctattaatgttaccccattaaaaactcaattaggaatgattataaatgtaaccataaaaaacaacggtaaacgcccattatcttttgaaacatctaaaggtgctttaactgtatataaagtgagcgcgaatggcgataaggttgaacaatctcaatcttttacacctaacctttataccgttttgagagataaagaaaatgctccagaatccaaaagcaagtcattatccaagactcatgttttgatcggagcagaaaaaacccttagctatatcgttggattaaataagccaggtgtttactatattacattcagatcaactccagatgacaattttgatggagatgaattaaaaaacaaaaaacctgtagaatggtttgcttcttcatatgttgagattacgtcgcacaaaattaaataa

SEQ ID NO: 396964 - DNA, 558 bp, Salmonella enterica
atggatgttctgcaaactggtggatttgttataaatgcacttaccatgctagtagctattggctcatctgcaatcagttaccttgtttataaagatagtacttcgccggatgttattgtatatctcgaacagaacgaaaactcaaaaacaattttaaacatagtcataaaaaatattgggaagagtgctgcggcggatgtaaagtttagttttgacagggcgttgccacgctacgcatttgacggtaatgcatctagtaatatgactgatggcgcgtttattaaagggataccatttttcgcaccaggaaccagtcgcgtattcatgtttggcaattatgctggaataaaagattttattggcaatgaaaaaataaaggttacaactacttttcgtaaagcaaacagtagaaatccattctcaagaaaaatgtctaatgagagttatatagagatacaatcaatggcttatgttgacgcttcagataatagtaactctcgtaaaatagctgaaagtttatccaaaatcgaaaaggcattggttaaacttaagcagtag

SEQ ID NO: 396965 - DNA, 1059 bp, Salmonella enterica
atgactaaacctcagtctccggggcgggaagccctttatctcagcggccagaacgagagcgccacgctgcgccagcatgttatcgcgtggcttgcccatcttgacgcgcagggctacagcccgcgcagccttgagggctaccgcgagcggctgctgccgttcgtgacgtggtgcgaggagcgcgggctgctgtacgcgccgcaggtgagtctggaggcgctggagagctaccagcggcacctgcgcggctaccggaaagcggacggccagccgctgaccgtgggcggccagttaagccgtctcagcgcgatccgcaacttctggcgctggctgctgaaacggcacgtcatcctgtacaaccccgccgatctgctggaactgccgaagggggaaagccggcttccggcgcaggtgttcagcgagggggagacgcggcaggtgttgcagagcatcgacgtgcagacgccgctgggcctgcgtaaccgggcgatactggagatgttctggagcaccgggataagacggatagagctggcgaacctgcggctgtgcgatgtggacgtcacgcggggcgtggtgaacgtgcggcagggcaaggggaagaaggatcgggtggcgccggtgggccatgaggcgctggcgtggctggaacggtatctgtgcgacgtgcggccccggctggcgcagcgggcggacagcgggcacctgttcctgacgcagaaaggggacgggctgaaacgggcgacgctgacgatgctgggtggaaaggctatccgggaacaggcgcgtctcaaaaaggcgggcgcgtgccatatcttccggcacagcatggcgacgcagatgctggagaacggggcggacacgcggcacatacaggccatcttagggcatgagaagctggagacgacgcaggtgtacacgcgggtggcaatcggggcgttgcagcgggtgcatgacaggacgcatccggcggagaagcggcgaaggaaagcggcgcagcaggcggagacgccggagcaggacggagccacggcgtcgccggacagtcccaaaagttag

SEQ ID NO: 396966 - DNA, 2907 bp, Salmonella enterica
atggcccgcatcccggaagcagagttacagcacctgaaagccgccgttccgttagttgccgttgtgcgctcgcaggggcggcagatgttcaaacaggggaaggactttaaagtgctctgcccgttccacgacgagaaaaccccctcctgcgttatctcgccggaaaagaacctgtaccactgcttcggctgcaacgcgggcggctcggtgctggactgggtgatgcacaccgaaaagctcagcctgcgtaaagcggtggagcgtctcagagccgagctgggcgataatccttctgttcagccgctggttgcgaaggacgaaccggacgtcttcgccgacgacgaagcgggccgtcagattttacttagccgcgtggttgagttctatcaccacacgctgctgaacgcgccggaagcggtggcctatctggagaagcgccgccttaaccatcctgaactggttgcgcagttccgcttaggcttcgccaaccgcacgctggcctaccgcctgccggagaaaaagttacaggccggggcgaagatccgcgcccggttgcagggcgcgggtatcctgcgtgagtccgggcatgagcacttcaccgggtcgctggtcgtgccggttaccgacctgaacgggcagatccgcgagctgtacgggcgcaaaatcaccgacaggctgcgcagcggcacgccgctgcacctctacctgcccggcgcgcacggcggggtgtggaatgaacaggcaatgatcggatcgaaaacggtgatcctgtgcgaatcgctgatcgatgcgatgtcgttctgggtggcgggataccgtaacgtcacggcggcttacggcgtgaacggcttcacgccggagatgcgcgaggcgttccgcgcccacggcgtgcggcaggtgctgatcgccttcgacaacgacagcgccggaaacgaggcggcggtgaaactggcttcgtccttagccgcttccggcatcgcgccgttccgtctggtgttcccggcggggatggacgccaatgaatacctgtgtaaagtctcagagccgcagcgggcgttccgggcggtggtggaaggggcaatggcgatgagtgacgtggccacggtggaagcggccgatccggttataccggaggctgcgcctgcaacggttttacccttagccgctgatgttgccgcgcttccggcggcagcgtcacccgcgccgggcgtggtggtggaggcgctgccgggcggggatctgcaactggcggttgacggccagcgctggacagtccggggcttaagccggaagacgaacgcggcggccatgaaggtgaacgtgcaggcgatcgacacggacagcggcgtgatgttcgccgacagcgtggacatgatgagcgcccgcagccgttcgggctacgcgcgttcggcagcggcggagctggggctggccgaaggggatctgcgtcgttcgctgggtaaggtgctgctggcactcgaaagctggcaggcgcagccggagacagcgaacgccgcgccggaaatgtcgccggaggatcgggaggcggcgctggaactgttacgttctcccgatctggcgggccggatcgcgtcggatatggtggcgtgcggcgtggtgggtgaaagcaccaatcttaccgccgcgtaccttgccgccgtgtcgcgcaagctggagaagccgctggccgttcttgtccagtcgtcgagcgcggcgggcaagtcgtcgctgatggacgccgttcttaacctcatcccgccggaagcgcgaatgcagtacagcgccatgaccgggcagagcctgttctacctcggtgagaccaacctgcaacacaaaatccttgccatcgcggaggaggaaggcgtgcggcaggcggcgtatgcgctcaagctgttgcagtcggacggcgagctgaccatcgcctcaacgggcaaggacgacgccagcggcaatctggtgacgaagcagtacacggtcaaaggcccggtgatgctgatgctcacgacaaccgcgatcgacgtggacgaggagctgcttaaccgctgtctggtgctgacggtgaacgagagccgcgagcagacggaggcgatccacgcggcgcagcggtatgcgcagacgctggaagggctgctggcgtcgaacgagaaaagttacatcaccgcgctgcaccagaacgcgcagcgcttactcaggccgctgaacgtggtgaacccgttcgcctcgcagcttacgttcatgtcggacaagacgcgcacccggcgcgatcacatgaagtacctgacgcttatccagtcagtcgcgctgctgcaccagtaccagcgggaggtgaagcgggtggcgcatcggggacaaatcgtggagtatatcgaggtcacgcgggaggatatcgcccttgccaaccgtctggcgcatgaaatactgggccgcacgctggacgagatgccgccgcagaccagaaagctgttacagcttatccagcaatgggtgagggagagcggccagccgcgccatgaatggttgttcacccgcaagcaactgcgcgatgcggtgcagtggggcgacacgcagctcaagatccacctcgcacggctggtcgaaatggagtacctgctggttcaccgtcgcgggctgacgttctgttatgaactgctgttcgacggtgacggcaacgcagacggggcgcatctgtgcgggcttatcgacgtgccggaagcggactacgatgcggcccggtcggggacaaaggctgctcagtcgggtaaggacaacgccgcgtcaggccagagccggcgcgggtcagagacaaaagcggtcggggcagaggaaaaagcgctgttcccggcaggcgtggaaaacaccacgcgtaatcataatcgccacccggacagggaaagcgccacctcataa

SEQ ID NO: 396967 - DNA, 408 bp, Salmonella enterica
atggctgacacaacagaagagattatgcagaccgaagaacagcgccgggcgtttggtaaacgacttaaagaactgcgtaacacctcccgcaaaacgcagaaggaggccgccgcgcagattggtttacagctatcgcagtacaacaagtatgagtccgggatgcacatccccccggctgacaagttgatccagcttgccgaactgtttaccacgaccattgattacctgctgcttggctcgtctgacgaacagacgccagtcaggaatacgcgattaatggagcgatttaaggcactggaacagtgtggcccggaagaacaggagacggtgattaaactgattgatgcggtgatcatgaagaaccggatcgagtcagcgatccgcccggttgatatgaagggcaactaa

SEQ ID NO: 396968 - DNA, 312 bp, Salmonella enterica
atggctgaacacgatattacgccagaagtgaccatttccaaaacccaacgccgttataaagtcggctacgtcagcgcccgccacgtaaacagcaaaacctgcatgaccacgtattactcacaacaccccagcctgcaccttaaaggcgactggctgaaagaggcgggatttgacaccggatgcggcgtgacggtgaaaatatcgcaggggtgcattgtgctgatggcggataataacgaggtgcaggagctgcgcgagcagctttatcaggtgcggcaggtggtgaaggggattaaggagacggtggtttag

SEQ ID NO: 396969 - DNA, 432 bp, Salmonella enterica
atgataactggcgtcgattatgttttttactcaaataataatccatttgatattgaagaggattttgtttcttcattaaaaatgaaatggagagaatgcattattgatgagtttgagagaactgattctagactggatctgttttttgcaaaagacaaagaaatgtactctctttttgatgaaataggatattctctaaatgatcatggcgaaggttgttttatgcttgtttcgagcatgcttaaccacttggaaagtaaaataaaagtattggatgtcatttatccagaaaataaacgtaatacagaacaatatgattcaattattatgttacgtgatatatgggaatacactttagtattaccttcagaaattactgaaagtgatttctctagggagatttatacttatctcgaaaatgttttaagataa

SEQ ID NO: 396970 - DNA, 1059 bp, Salmonella enterica; identical to SEQ ID NO: 396965

SEQ ID NO: 396971 - DNA, 2907 bp, Salmonella enterica; identical to SEQ ID NO: 396966

SEQ ID NO: 396972 - DNA, 408 bp, Salmonella enterica; identical to SEQ ID NO: 396967

SEQ ID NO: 396973 - DNA, 312 bp, Salmonella enterica; identical to SEQ ID NO: 396968

SEQ ID NO: 396974 - DNA, 303 bp, Salmonella enterica
atggcgacggacgtcaggcagaaatcgagcgagcaggcgaacgctaccgggcaactgctgaagcaagagttcgacaggctcgggaagtgtgtcagcgaggcactgaacttaagcgggcagaaaatcagcgacgacatagccgcccggaaccgggagctgagcgatgccctgaggcaccacagcaacggcatgacagaggccatgcagtcacaccgggagagcgtgatgcgcctggcaacgcgccggtggctgtcagtgctcatgacctcgctgctgctggcgggggcgtgctgtggcttctga

SEQ ID NO: 396975 - DNA, 768 bp, Salmonella enterica
ttgaactttctcagtaaaaccgtcgttgtcgtgttggctgcaacactgctttccgggtgtgataaccggcctgacaagacgctgtcccctccggtgggtgcaaagtgggtggacgtcactttccgggtgccggagggcattacactgcagccagccgagctgctgtaccgttcggcgcagtgcaaatccgtgcgctataactcaagcaatgaaccgcatgatataccgggctacaacgacgttgagcggccattcggtgcgcctgatggtgacaatatccgccgtctgcgggttgccgtggacggtggcggttcgtgccagtggcaactgaactcgctgaaggtgagcttcagaattgcggactatgttcccctggtgaagggaaaagaggttatcgataccagttatattttcgatttcggggactacggacttagtgacggctacgggaccgggcgggcgaaggtgttcagcgagaaaatattggatctgaatacagatttcttccctatggttgctaatcacatcgataatacggttagcttgaagttatttgggggggagactggaacagaaaagtggcgcaggcgttttagtctaagtaatacacaacatatagctattgaacctgttgttcatcttatgaaagttgttgtattaaacccaccagatcatccaggaaatctgacagcaacttatccggatggcagtcgtgaagatataccgaatatttccccggattatgacaagttgctgtcaatgaaatag

SEQ ID NO: 396976 - DNA, 876 bp, Salmonella enterica
atgcatgtaatttcagtaatttctaccaaaggtggtgaaggaaaatccactcactccgctaacctggctggcttttgtgccgatgctggtttaaaaactctcctgattgacggcgactacgctcaaccgactgcctccagttactactcattacgttatgaagcgccatgtggtcttttcgaaatgctgatgcagaccgtggatctcaactgtcctgagcaactgatttcccagacctgcatcgataatcttgacctgattatctcgaacgatccccatgaacagctcaagacggccatgatgcacgctccagatggccgcattcgcttgcgtaacttgctccagcatccgctgtttgctcattacgatgtgatcatcatcgattcacagggcgcgcgttccatcatgctggaactggtgctgctggcaacgtcgcacacggcagtggcgatggtaaagccggtggtgccggatgtccgggagttcctgcgcgggacggtaacgctgatggaggaacttctgccttatcaagggtttggactcacactgccgccgatgaaagtcctggtcaattgcatggattacaccctgctggccgaagaggcactgggtgcgttaaccacgataattgctgatggaacgtatagcaaagcggatattccccccgtcactctgctcgaaacgcaaatctatgaccttgaggtctataaattaggtcatacgcgagggcaacccgcgcatcgcctcgaatatcagactgaccgtaaaagtctgcctgccgcacagaccatgcacgatctggcctgcgaattattccccgaatggtgtgaccgttttgatgcggtactgcaaagccagccgaaggggaataaatga

SEQ ID NO: 396977 - DNA, 393 bp, Salmonella enterica
atgatgaaactctatcgcgcaacgtacagtctcctaacccgtgatggtcgggtaatggtcgatgagcagtgggtcttctttgaggcaggtacctattctgacgcgctggaaaaaataccaggattactgatggcaatgtgggattgctgtgaatctcagctcgaagtatggaacctgatgccggataaccagcttgttgatctcagcatggatatggaggttgattccccccgcgactggcgtttctttgaggttggttattccgctggttctgccgtgtatctcgatgtcgaacgtgatggctggccgctgtttcttgtctctccgtcctggctggctcgtttgaataaagctctgatcgaatgtcgcagtaccggaggccagcatgaataa

SEQ ID NO: 396978 - DNA, 1620 bp, Salmonella enterica
atgacttctaagaaagccagtcaactgggtgaaaagttgcttcagcgtggtcgaagcccgaacgctgaaggcactgcggtggtgttgccggtcaatgaaatgccgatggtattgacgctggagcaattgcgtcccaacccggataacccccgaacttcccgcaatccgaagtatgacgatatcaaagcatctatccgcgctcgcggtctggattcggtgccaaaagtcactaaagatccgcaaagtccggaggatgtttatatcttcagcgacggcggcaacacgcgttattccatcctgacggaactgtatgctgaaactggcgatgagcgttttcgccgtgttcagtgcatcgtgaaaccgtggccggggcggttgcagtgtgtcatcggtcatctggctgagaatgatgtgcgaggtgagctgtcatttattgagaaagcctttggcatcgagaaggcgcgggctatctacaaggaacaactggggcgcgaagtgagccagcgtgagctggccgatttgctgaaagaggcgggttatccggtccaccattcgaatatcagccgtatggtagcaacaatagaatatctctggccgtggatgcctaatctgcttaattcaggtatgggacggcctcagataatccagcttatcgcgctgcggactgcggcagaaaaagcctggcagacctttagccagaacgtcgcgttacctccggagcaggaatttaatgatgtatttggcggtctctgccgggccttagacgatccggaacactactccgccgatgtttttaaggatgagctgattgcggccctactgaaggccatgcccgatccacaactgacctacgatagctggctgattgaactcgatccacaggagcagaatcggcgcaaactgtttggtgcgccggagccgcttccccagcacgttctggatgcagataaagctcataatgagccttcaccactacctgttgctgagccgacctccattaccactgataccgggtcaacgggggaaaagcctgtcgcaactgtagccgatccatctaatcatgtagaccacctgccagatgaagaacagctggatctttatgacgagaacgagccaggagaatcaatacctgaattacccgactttccttcgggcgttgaacaagagcctggagattgcgttgacggccagcttcagaaaccacctgcaaacaccatttcttttgccgcgaacgggctggagccggtaaccgatatctggcatatcccggcgttacaggacgatgttgaacatctacaggatattgcgtttcgcctggcgttcgaactggcggaggtgatggggattgaagatgctattcaggaagataaatctctcctgggagtgggttattccctctcatcaaacccagatggcgaacctctgactacgttgtgcggtgaggcgacggatatgcctatatcgatattaaccgggtttcttatcggtgcatccagttccggcccgttagatgctccattatttgatgatgtgtatgcggtgaaattcctgcgtttaatcagggtagtgcgccgtttgcgcgagttgcaacgtcagacattcagggagggcgcagcatga

SEQ ID NO: 396979 - DNA, 900 bp, Salmonella enterica
atgttgtgtattttttgtgcaggtaattctaccaactctcgtagtgttgaacatatcatgccagagtcaatcggaagcaagaagcgcgtgcttccgcgtggtgttgtttgcgataaatgcaataactattttgcacgtaaagtcgaacagcctattttaaaccacccatggatgagaaatattcgggcttggcagcaaatcccaaataaaaggggatcatatcaatctttagttggtcacattgcaggaacagaaatagcagttaacatgcgccgttcaaaaagcggcagtctgcaattagacacagaaaataagaatgaccaaaaaatacttaagagggttatagctgagaattttgagcaaccactgatattcactattgaagacaatccaccaaaaaaagaaatgtctagatttctttgtaagatggcatacgaaacatttgcagagttgttttgcaaaactccacaaggtacagctactttaatccacgaaccgttcctgaataatatacgcagatatgcccgatatggcgataacttcaaagaatggccattctcacagcgtcgtatttttccgcatgacacgttaatgctgcatccaacaaaaaatgaatgggttcatgccggatttggatgtggattatttatgaataagcgacgagaaacactttttggatttattttctatggaatagagttcgtcattaatattggaggcccatctatagcaggctatcgcgaatggctaagtgatcacgcaggaatcagcccaatggttgaacgcctcgggtgttaccttgaacacgcagaggatggtaaatattatcttcacggcgagtttaacgcatccaatgggttagaatttgataaaaaacatggatatgcgccttacaagtga

SEQ ID NO: 396980 - DNA, 738 bp, Salmonella enterica
atggctgtactaaaaaaagcaattgaagcccttgaccctgcgccagataaaaagaaagaaataacgctagcattgaatctcttatttgaattggctgaacaaaagaaactattacaagaagaatggctcaaaaattatctgcgaactgctggcactcctgaaaacccaacaattccaattacaaacacaatagcatggcataatgaaacgagagcctatgttaagaatgatgcgtcaaaactagtttccgaaattgccaatgctgtgaaaaaattcgtggcaggtggttcagataatatcatcaatggaatatctgaattaatgtcaggagccattacagccatacttggtgcgggcacaggttctgtttcagaaatgcactcttattatataatagtcgagggattttcgattattagaattgacctcactgcatggcaaaggcatattgaagcggaaggaatcacaaaacaaatagagaatgcaatgacattttccgcagtaaaatccagtgttgatgttaataaaatcactttcaatactttcttacaggcttacaacgcccaactaatgaaaatgaaaattccagaaagtgaaataaaaaaatacataatagaagcaaaagaagtatttgagctactgagagagaaaaataagcatttatcctttgactcaaataatgctgcctcattaaatgatataaatattgccatgccgggaagtatagacttcatataa

SEQ ID NO: 396981 - DNA, 468 bp, Salmonella enterica
atgcgtaacctgtacagccaccctgatcgcatccgcatcaatgccgttaatagtaaaaccaggcgttttttcgttggtgatattgtcgccaggtacaccactgtcattcgcggtatccagcgtgatggtcgggaccaacagggtggcgtcaacaataaattcaagtgtctgcgtcgccttattgccagcagcgtcgatcgcttccaccatcagggtatatttaccgtcccccacatccgtgggccagttgtaattccagatcccttttactgcactctgagtagcgttaccccatgtcgtgccgccatcaatgctcaggcgtacaacgttgacatcttccggcaccgtcacccggaaatgcggatgcacctcgttggttatattatcaccggtgataccactgtcattaaccaacaggatgccgtcaatcgtgatctgcgtatccactttcaccgacaatggtactga

SEQ ID NO: 396982 - DNA, 1020 bp, Salmonella enterica
atgaaagccaagctattaatagtgatattcattacctcagcagcacttattattgctgggtattacgatattttcaaataccaaattggaagatctgttaccgctgaatggtgggttgttaacgttcaagacaagaaagaacagatatcaaaagataaaaaatcaaataggattatttttttggctggatctaatggtctatttggcttaaacagtaatataatatcaaatattacagaaaaaaatgctattaaccttgctatgcatgcttctctagatattagttactataggatgttgcttgagaaaaatataacagatggagatatagtaattcttcctttggaatatgaatattatttcagaaaaaatgcctattcagagtggtttattaataatatgcttgcatggggtggtgagtacttatcatggctacctatagataaaaaaattgaatttgcatcacatgtgtcagcacttagagttattgagggcgttatggctagtgataaagaaatgtttataccaaaaagcgttgtacacaaatatgaaggaaatgttttaaataaaaattatggatataattatactacacttacacagtatggtgatatgaatattcatacatcagggaaaacatattctgataagctactagagaatatagaccataatccttcttcattctcatactctaaaaatgatagagttatttctgaatatgctctatcagaattaaatgaaatcaaaaaaatagttaaagatcatagtggacgcctatatataacatggcctgtaaccatgaatacaaaatacttcaatgaatttgattctgaatcggtagagttcacagatagcattcgtaatcagttaaacaaaaatggatttaatactatctgtgacaatttttatgcaaatataccaagcgacctgttttttgactctgtgtatcatcccaatagcgaaggttctaatttgagatcaacaagattggcaaactgtataaagacaatcctttaa

SEQ ID NO: 396983 - DNA, 654 bp, Salmonella enterica
atgggacgctggcttgctggcaggctcatgaaagagccggggctggtcagctgtcagcagccgactcaccggtataaacgtggtggtcatgaacatgtcgctatccctgactaccctgaacggcagttcgccgtgaccgggccaaatcaggtgtggtgcggtgatgtgacctgtacttggacgggtaagcgctgggcgtacctcgccgttgttctcgacctgttcgcaagaaaaccagtgggccgggccatgtcgttctcgccggacagcaggctcaccatgaaagcgctggaaatggcatgggaaccccgtggtaagcccggcggggtgatgttccacagtgtccagggcagtcattatacgagcaggcagttccggcagttactgtggcgataccggatcaggcagagtatgagccggcgcggaaactgccgggataatagcccaatggaacgcttcttcaggagtctgaagaacgaatggatgccggtggtgggttacgtaagcttcagcgaggcagctcacgccataacggactatatcgttggatattacagcgcactaagaccgcacgaatataacggtgggttacccccaaacgaatcggaaaatcgatactggaaaaactctaacgcggtggccagttttagttga

SEQ ID NO: 396984 - DNA, 1419 bp, Salmonella enterica
atggttgttggtaatccaccatggattgactggaaaaacttacctgcaggatatcgagaacgaattaaaggcctatgcttaagtaggagcctattttctggtgataggcttactggtggaataaatcttaacatttgtgcattaatttctaatgtatctgctgaaaactggttagagaaagatggtatattggcattccttatgcctcaaaatatccttttccagcaaacatatgaaggatttcgagagtttaactttggggataaccaaaaactataccttcaagaggtatacgactggagtgaatccggacatccattcaagcctgttacaatcaagtttgcgacttatttattctcgtcaaaaaatgtcgattatttaaaagggatacctttaacgtttttaacgaaaaataaaaccggaagaagccttgagagctactcacagcatacgcattttaatgctatttcgcatgagttctctatccgtaaagagattgctggcactgttagtgtaagcaatacagcctttacatatgcttcagattccgaaaagctcaatgattacagaaatatcagtggatattgcgaatatcatggcagggaagggattgaatttttccctcaagaattattcttatggaaatttaagacaaaaaaagctaacaacactgcaatttttgaaaattatcagggtggcaagtccaagtataaagtggcaaaacaaatgatttttgctgaaaccaagcatatataccccctgattaaaggaaccaatattgaaccttttggagtaaaagatattgagtacttcgtaccttttccatatagagaattgagtcgtaaaccgatacctgtagatgagcttgttaaagaaagccctatgttggctgattatttcattaataataaacagttattagagtcacagactcgatacaatgacaaaatcataggtaaaagcaatattactgcattttacgcattggctcgtgtaggtgaatatacttatggtgatcattttgtttgttttcgtgataacactaaatgggctgcagcagttgtgagtcaaatggatactccttggggtgaaaaaaagagacctttatttcagaaccatgctgtgagtatatctcaaaggcaagatggtaaattcattaccttggatgaggcacattacatttgtgctatttttaactcatcagtcactggggagtatattctgaagtccagtgatagcagaacttttaaaattagaccaccaattaatgttcctctttatgatgaagataatggaaagcatcgtgagctgtctgaactttcaaaaaaggctcatgaatctaaggctaataggtcctctttcgagagtttcctaagggatatagatggaatagtaaaggttttgtttaaaagtaactaa

SEQ ID NO: 396985 - DNA, 417 bp, Salmonella enterica
atgcgtcaggaccgggcgctgctgacggcgtgctgcactgacatgtctgcgggggcgttttctgcgcaggttcaggccttcaagacaataaatccggtgggttttcttgtggttaacaggccatccctcccggcgcaactgaatatgaatacgcgggcaaccgtagcgtatccgggtttccgctatttcccggatacgcagggttatcgcccgatcgtcacgccggctctgccagtggtaaacggttctgctctgcatcagcaacccgcatccccgccggacgctgatacggtaagcctcccgcaaaaatgtaaccgcctggcgcttctgagccggcctcagaacttttgcttcagtacctcctgcagcatctccttgtccagactcagctcagcgaccagcttcttcagccgctga

SEQ ID NO: 396986 - DNA, 129 bp, Salmonella enterica
atgatggattttgtaatcttcaataatatattcagctgcattcaaattattaaatgtaatcttgtcagttacatcgaatggttgcgggaagtcagtagtttcaacattagaaaaatcctccttagctaa

SEQ ID NO: 396987 - DNA, 312 bp, Salmonella enterica
gtggtactaaaaaccggagggactacaacacggcttgccgttgaattaacgctactcacatttattcgttcaagtgagatgcgttttgctcgctggagtgaggttaactttgaacgaagcgagtggacgatacccggaattcgtaagcctattcccggcgtaaaacattctgagcgtgggatgaagatgaaaactgaacatattgttccgcttagcaaacaagcatttgatatttttaaacgtttacatgccttgagtggtaaaggcgaggtgaatcgccacgggtttaacagacacctcagagtcatttaa

SEQ ID NO: 396988 - DNA, 312 bp, Salmonella enterica
ttgtgtgaacgagagcaactaaaaattggcgaactgctcgcaacattatcagatgaaattgttgtctactataaagaacaccctaaagcaagagcttccgaaaaagtaaaaatggcatcttggaattttatcactgatgataattattttcctgatgtggatcttgttatttcatatccttcaactttggcattgcaatatcaagacttaaataaaatagttcttcttcatgaattagataacattaatcaagatgaaatcaatgaaataattaaaaccgttattaaatctaggagtatacatgggaaataa

SEQ ID NO: 396989 - DNA, 330 bp, Salmonella enterica; identical to SEQ ID NO: 395158

SEQ ID NO: 396990 - DNA, 336 bp, Salmonella enterica; identical to SEQ ID NO: 377671

SEQ ID NO: 396991 - DNA, 282 bp, Salmonella enterica
  misc_feature (250)..(259): n is a, c, g, or t
atgctagaatatattagcttatgcgcagaagattgtgaacgccgcatcagcgaaatgctcaacgttgccagccaggcaaataattccaatcgaaaaaacaatatcgacatcatgaaaaatatcggtgaaaatttagataatgttgtcactaatatgcatggcactcctcaagcaatgcaagaattttataaagaagtcaacgagttattgattgatctggatatattagagaaaaataataatgggatannnnnnnnnnacgcaacctccagttcaaattaa

SEQ ID NO: 396992 - DNA, 1506 bp, Salmonella enterica
atgagagcattgctttttttattcatattgattttattgccaattgaggcattttctgcgtctaccctcgattggaaggggccccctttctttgttatgactcacggtatgctcgtgagcgaactgttgaaaaattttggtgcaaattatgatataccggtcattaccagtccgtctattcgagatgtttttatcggtcgcttcgaaaagggtacgccggaacagcagttggataggcttgctcgtacttataatttggtttggtattatgatggtaaggcgctctatgtttacaaaaacaatgaagtgaaatcttctgttattacgccagaatttgatactcgtgaacagcttaaggaatatgttcttcaggcaggcgttcttgctgaagggacatgccagcttcgtcaaattggtgtttcgcaatcttttgagatctatggagtccctgaatgtgttaagcatatcacagatatagccagccagctaagcgttgcctcgcgtaaccaggctcaggtagatcaacaaaaagaaaatgtccaggtatttccattaaagtatgcatctgcaacagatgtaacttatcaatatcggaatcagagtgtaataattcctggtgttgtgacggtgttacagcgaatgaataattcgcaggcagttaatagtgccagcacaccaacacagcttaatgcagcgcaacaggaaaccgaaagtagtgggccaacattttctgctgacccgcgtcaaaatgcagtggttgttcgtgaccatgatgccaatatgccaatgtaccaacgtcttatttcacagttagaccatcggcaggatgcgattgaaattacggtgtccattattgatgttaatgctgaagatcttggcgcattaggtattgactgggctgcaaacgctgatatagggggaatgaacttacagcttaataccaatttatccagcggcagtggctatgcgacttcagtgatcactaatgcgagcgattttatggtcagagtcaatgcactggagcaaaaatcccaggcaaaggtgttatcccaaccttcggtggtgacgttgaacaacgtacaggctgtattggataaaaatacaacgttttataccaaattagtgggggataaagttgctaagttggcctccattacaagtggaacattaatgcaggttacgccacgcgtcgtaaaaaatgaggctggaattgctgaagtgttgttacttttaagtattcaggatgggagccagcagtcgtcagctcttggtgcggatggtatgccgcaggttcagaattcagaaattgatactcaggcaacgttaaaaagtgggcaaagtttgttactggggggctttgttcaggatcaagatatcgtaacggaacgcaaaattccgttattaggtgatatctatttgattggtaatttttttaaaagcaaggaaacaacaaaagtacaaaccgtgcgcctatttttgatcaaagcggtaccacttaaaatttaa

SEQ ID NO: 396993 - DNA, 759 bp, Salmonella enterica; identical to SEQ ID NO: 381652

SEQ ID NO: 396994 - DNA, 258 bp, Salmonella enterica
gtgaatagattactaaaaatgtacaattacagtaacaatttctcacgccagttaccccctacaatcctggagcgtgtatatgactggttcgaaccaaaactgattagttcattcaggtcgtctgatttagatgataattatattgattttcaactgtctaaaatgaaaattttagttgatgatgaatatatttccatgccagaaaatctgatggaaccgaaggatattcttaactggctgaagggagtcagacagtga

SEQ ID NO: 396995 - DNA, 372 bp, Salmonella enterica
gtgatacacgttagctttagtaagtattttattagtgttttcaatgggttgacagaaagcgagcaaaataaaatcgttaattttatttctcacttaaaaaaatacgcctggtcaaatcttgaagggagaaataaaaaatctgacgacatcaaccctaacctacccgattatcaggataaaattgattttgttaataaatttaatctgtggcattaccatataggcatcaaaaaatacgatttacgaaaaaagtacggggatcgcacttccagatttgtgcttcattacatgaacaagcctgaaaaagttagaatcgttgatatgtcggaacaccctccctttgttcttcctgcacaatatcggttgcattag

SEQ ID NO: 396996 - DNA, 927 bp, Salmonella enterica
gtgacagtcattaaaggaaccattaccgacgccaccggacagccactggccggagccaccatcacctttacggccctacagaacactaccggaatgctgagaagtgtcgccacgtatattacaacagtgcgcggagagtatgagttcactgtgacacctggcgtatacagtgtcagtctggcgcagaacggaactaacggttacgctctgggggctgtccacatatacgacgattctcccgacgggacgctgaacagcttcctgaacgcgaagaatacagacacacgtcccgaagcgttaaggcagtttgaagcgctggcacaacagacgcaggacaatgccagtaaagccgctcaggtgctggaagatgccattaacgcctctatcaagggtgaaaaaggagatacgggcgaacagggtccgcagggtattcccggccccaaaggcgataagggtgatactggtccacaaggtattccgggtcccaaaggagatacaggtccacggggtctgaaaggtgacacgggaccaaagggcgacgcaggcccgcagggcgacactggactcaccggcccgaaaggtgacaagggggatatcggccttcagggagagaaaggcgacacagggttacagggtattccgggaccaccaggcaaggacggagcgccggggttgccaggcaaagacagcacaacgacagcgcctggtgaagtcggatcgtatgtctttgctatgaatagtaatacttatcttgcatatggattaggaggcactgttagtggcagcagcctttcaacctcgggtgtttataggcttactacgaatggctgcgatattgtgaagggaagcactttaacaggcacatgggaatgccagggttattcttattcatatatgagtgcaacattatggaagaggatcgcgtaa

SEQ ID NO: 396997 - DNA, 1143 bp, Salmonella enterica
atgacgacgaataccttaaaaccgacaggcgctcagcgcccaatagaaagcgcgatgctttcggcgagactggtgtcatccggtgacggatggcaccagttgctgccggcaggtcgtgtaaaggcacgcgacggtcgtccgcctaaacctgcggcgggctggctggttaataaagctgcctgcgaccgtattaaggcagacctcactgcgctgaaacaacccctgctgattgattacgaccaccactcctggctcgccaaagagagaggttttaaggccgtggcggctggctgggtaaaaccagaaaacattgagtggcgtgaaggtcaggggatatttgtcaagcctgagtggacaccgcaggcgcagaagcatattgacgaccgtgaatacgcttacctgtctgcttttatgcactattacgccgacacaggcgaaccctccgatctccgcatcgcttctctgactaacgatccgggtatcacaggtatgaatcccgtcgccgccctcagcgctgacgatctctatgtagttaccccctcaacggagttaacccccatgaatgagcaattacgccagttactggcggcgctcggcctgactgtgcccgatgacggcgaactgacgccggaacttggtacggcggccctgtcagcgctgacggatattcaggcgaaagccggcaaacacgacgagctgaatacacaggtcgcggcactctccgccgaactggagacagcaaaacagaccggtactaccactgcaggtgatgttgacctgacgaagttcgtcccggttgagacctacgacaccctgcgtactgagtatgtcgccctgtctgcgcagcttggcagtgccacgcttgagcaggtgctggataaagccgaatccgagggacgcgtatttaagtctgagcgcggttattacgaaggccttgggaaacagattggtgttgcggcgttgtccgcgcaactggacgcacgtcagccgattgctgccctgacagcgaaacagacggacacggtgaacgtgccgaagaaagaaactgcgtctgccgccctgtcagcggaagaccttcaggtaatgaaaatgctcggcaagaccgaggaagagtttcttaaagccaaaggggttaaccaatga

SEQ ID NO: 396998 - DNA, 381 bp, Salmonella enterica
atggctggcctgaaagatgaatttccggttctggtaacagtggttgtagtggtgtgtcttgcggtcggggtatgggctgaacgtcagcaggttgaacggctacaggccgataacgccacccttacgcaacagcgcgacgaggcccggcgcattctgaacaaccagcagaacaccctgcagttttttaacacgctcagtaaggcggctacagatgaaaagcaacgcaatacacagcacagcgaaacggtcagagcggagattcgtccggcgcttgccgcagagcctgcggcccgtgttgctgtgcctgccgctgctgctgaccgcgtgcgcgccgccgtcagtgaaatacgtacaggtgccgccggttccgcttcccgctga

SEQ ID NO: 396999 - DNA, 192 bp, Salmonella enterica
atgaatattatcctctacaaaaaaccgttcagagagcggctggttatggtcagagcgttggcctttatgacgttcagcatgctgttttctggtcaggcatggctaatcgtcgatgacaaacatctggcaaaaaacgggaaggagttgctttcaggtaaaaaagcgattggcgtgtttcccggaaaaaaataa

SEQ ID NO: 397000 - DNA, 336 bp, Salmonella enterica
atgcgcggacctgtttttgaattcatgctggacgatggagatgaaattcgccagggacttgaagataataaaatagaatatatggggattgcagccctgtcattcagtgtaaccgacatggtggagcttatccatgccgtcaatacgccggaaacatggagcggcgtagctgtaatagctcgctcgtggatcaaacgccatcaaaattcaagcgttgaaattgcgtacaacgagaatggcacgcctaaatacataaaactgacggggtataaccacaaagaacttgaaaaaatgggggctactgaattaatcagggcaagctttaaaaaagaataa

SEQ ID NO: 397001 - DNA, 168 bp, Salmonella enterica
atggcaactattaaagtcacgatagaaatcgacgttccagataacgcaaccaaagaagatatttcagaatgggttgatgttcagtatggcgaatgcaacagcatgaagcaggacaacccgtgtatagctggttatgaggtttattccgccgaatgggagaatgtatga

SEQ ID NO: 397002 - DNA, 579 bp, Salmonella enterica
atggcaatgcaacggcgttattttaaattaaatgaagcggactcggttaaatatcataaggaatatcaggaaaaaatcggtaaaccccgcagagaggccattcgtgattttctgagtgcgtgtaatgcggtcgggcatttgtcacataaacattttggtactgagtacatcagtgcgctcctggtacgcgaggatgtggactgcggcggaaacaaacgtacccgcagtggcttttttgatgatgatggtcaggatctgtttaaggttgaaccaaatcgccgctacagcgaaggaaagcagcttgcgacccgtctgaaagagataaacaagaaattacaggcgttaccgacgtttgacgcctgggttgtgaaaacactgggctgctatgcggacgcaaactacgttaatcacgggcagcatcttgtcgcctggtctgctgctggttttttccctgagaagaaagcgctggtagtcagtattccggtcggtgaggacggaaaagagcccctgcctgctgatatgagtccggcacttattgaaattaaacactccgaatttatcgccattacggaggaataa

SEQ ID NO: 397003 - DNA, 555 bp, Salmonella enterica
atgaaatttgcttattttaaacttgattcagtcattactgataaatatgtctccatgtataaggctgatattaaacctgaacgttcccgtattctttgtcagttacagacagctactggtgcagtgggttttaagattacagacaaaggttataacgaagtgattaatacggtttactttaaccacgttccttatggtgctgcctgggaggtaatggaatcaggcctgttttttgatggttatctcctggttagtgctgtacctgatactgagtatgcttcggggcgggatgttgctgaagagctggatcgcacctgtcaaaaactgaaaaattacccatgctttgaacactggctgtgtgagaagcttggcgtcatcagtaaaggcatgtttatgtttggtggttattctgcgtggaagctcgtcttttcccgcgatggaagtcatatcctgttccgtgtcccgcttgatcatgaggggaaagtacgcgaatccattcctgttgactgtacccgtattaagcactccgaatacgtggcgctaacggaggaataa

SEQ ID NO: 397004 - DNA, 519 bp, Salmonella enterica
atggcgaagaaagtcaccagaatgaaagcgccggcagaaactgccccgcagtctcgcgaggaggtaagccttgatatccgcaagtacggcgatgcgcagcgtgaaaaaatccggctggaaacggcaatgaatgatgaaatcgcggcgattactgaaaaatatatgccgcagattgaagagcagaaaaaaaccgttaacgcgctttttaaaggtattcatgactggtgtaaaacgcaccgtaaagagcttaccaatgatggcaagaccaagacggccaacctgacgacgggaagtgtgtcctggcggctgggaaacccttcctgcagcgtcagcagggatgtggagcccgttcttgacatgctgcatcgcatggggcttgagcgttttattcgtaccaaagaggaggtgaacaaagaagctatcctggcagacccggcagcggttaaagggattgcgggtatcacggttaaaaaggcaacggaaagtttcagcgttgatccatttgaacaggatgcctga

SEQ ID NO: 397005 - DNA, 291 bp, Salmonella enterica
atgggtaataaggtgcaggttatttttaccgtcgaatatgaggaaggagaaaagcactccggaataggggggattactcctgctgctgttatggttcaggttgactcttccgggcttgaaaaaggcaatcattcacctgagcagttatttggtaagattttaatgaaggaagcccctacgatttccggggtgatacaggagatggtttacgatgctatgcgcaaaagaggttcaattattattgatcgtggagtaactgtgtcagacgtaaataaaaaacaaacgcactga

SEQ ID NO: 397006 - DNA, 225 bp, Salmonella enterica
atgacgaacctgtttgattctctcaatgcggcctgtcgtcttaccgagctttcgggtgccgttttgcagaagagtaagcgctatccgcagcgttacgcgctgcgtaccactccgccgcagtgtcaaatgccgggcgaggttgaaattactgtctgcaataaaggcgtgcgtcgctgtgttcgtgcggctcgcgtgggtggctgtacggtgtactgggaagattaa

SEQ ID NO: 397007 - DNA, 408 bp, Salmonella enterica
atgaataaaacaatacagcgtgaaattaacgcgctacatcgtattggtgtgcgttgccgtgatgcagcaacatcgttctgtattatcccgtttgtctatgtcggtcctcgtaccgatgatggtaagcgagtggtttatatcgatgggctggaatggtatgccgccagaagtgaccagccagacctgatgtatgaaaactgcctgtttcctgatgtctgggaaaatctgatgctcagggcgacctttcatccgggtcactaccgtacaacctggaagatgacataccgggaaatacgctgcgtgttgggtgacaggacgcaggagggatacagcggaatcaggaagctgatttttgaaaaggcccgcgacctggtggaatctgaattacttgcggaggctgcagtatga

SEQ ID NO: 397008 - DNA, 258 bp, Salmonella enterica
atgacagcaattaatattcccgatatttacggcggatggtatctgattaatttcgaactcgtgaaattaataaaagtatccaataatgatggaaatggcgatttaggcattacatttgctgaccagtccacgcagtggattaccgttggccgtaatcggcagggtgccgttgatgccctcgctcatctttgtagcattctggacgcgcaagggtggactccgcgacttcctgaatctggaggcagcgatcatgaataa

SEQ ID NO: 397009 - DNA, 597 bp, Salmonella enterica
atgagaaaaacacctgaaggtacttttctagaggaaggaaaagaacctgtgattgcacgtatttttaagttggtcgatagatatccatcgcgatctgaagctgcgagggcttggggaatcaacgttggaacgttaaataactactacaaacgtaaacatctaaacccaacccccagacgttcccaactcattaaaatagcggaaaaagagaatgtatcaatagaatggctaacctctggagaggggagttctccagacatgacgccaacagcaaaagaccaaaaaagaccaattgaccaaaatgacggttttgaacatagtcatgatgacatagatagcaaattatctatgctactatccttattgcgccctcaagagaaaaaggctttatttgatgtgctgggtcgaaaaggtgctgagtttagcctcatccttttagatgatgatatcgctgaattacacgcgcttgaaggtgttcgtcgctcgttggcattgagtttaaaaaatttccccgaagaaaaggttagagagatttacgaagaatgcgaggctaagggtaatcacttcaatgtaaacgaaaaacaggctagcgcgtaa

SEQ ID NO: 397010 - DNA, 252 bp, Salmonella enterica
atggacaccagaacaataacccttaccacgcaatggcaaaaagtcagtgaggacgcaaaatccgttgtgctgcaactgatgagcggtgacgcggcgttttgttttagcctcacgaaacccgccgacgatgccgactaccacatcatgccccacctggagttgatgacggtcacgccgccgacgtgcgtatgggtacgcagtacccatatctacaaaaaagatactttccttacggtcagtaccgtggaataa

SEQ ID NO: 397011 - DNA, 369 bp, Salmonella enterica
atggcgataacagttaaccctgaaacgctgggtaacgcacttccggtatttaatctggcaatgctgagcggtatttttggcagtatgccggccggagaaatggacgtctgccctgacgctaacacagccctgataggctgggaaaaagtcacgtcagacacgaagcaccaccccaaccctgatgcgcagtctggcgttatctggactattgacacgatgggctgcggtattgatggtaagcgtcgtgtgccagtgaacacggtaatgcaggaatgggtgtatcaactggcgctgatgaacaataataccgttatgatgcgccagcgcataaaccagtccgcatgggcagcctgggtcaggtggctgtaa

SEQ ID NO: 397012 - DNA, 405 bp, Salmonella enterica
atggctgtttacaccaaatctccaccacctgccccacagacgccggatattgatccgtcaatgatagccggacgcgcaggcgcatttcctgctggtgaaatggagactgtagacgatctggatctggctcccgtagggccgtatgtggttcgaaaagggggcgagccggcctatccgaaaggcactaaaaacatcccacccaacgcacaaccctacggtacggtgctgaccgtttcctccgcaggagccggggcggacggtaaacgcagtatcacaaagccactccgtgataacgagtttgtgtatcagctctattttgacacgctgctgcagttgtttacccgctcgggatttggcaaagcaggcttttccgcctgggaaaagaaaacaccagtgaagaggtag

SEQ ID NO: 397013 - DNA, 699 bp, Salmonella enterica
atgtggaagcaggtaaatatcgccattccccataatgcgaccgccatcacctgctcgcaggtggcggttcatccgtgggatgcgcagtacggtcacgccacgccggacggctgttatctgaaccccgtcaacgccattaaaagccttaccgacagactgaacggcgccggggccactgatgatgtaatagtgctgatggtatgcgccacaagtgcggcggagttcgcacagcaccttgacaaactggcggcggtgttgccgcttccggcactgaaacagacggccagacgcgcacgcacacaaatcagccaggcaaccgaaagaatgataattccggcgacgccagtaaacggcatgtctgcacctgaaccgctgaacataagcacgttaacggacgttctgagccgtaccgccagcgctgtagccatgagtaacgccggggtggcaggaatgggcgctataaaaaatgcgcttgccgcatttcgccagcaacgcgaacaacatatgcaacaggtagccaaatccataacgacaccgcccgcatcggtgcaagcatgggcctttgtcgcgcgtggcgatgccgctcttgccgcatcggacatgttgaagaacatccccatgccgtcgtcgtcactcacttacgcgcacctgttcgcaggcgacctttcaacaatgatgaactggataacagaggtctga

SEQ ID NO: 397014 - DNA, 513 bp, Salmonella enterica
atgaaatattttaagacgaataaaaatgaaatttatgtatacgacgatgatgcagataaaaagttttataaagaagggttaattccgataactgaagaagaagcaaacgaaatattaaaccccctgccggatattgaagacgcccgtaaacagaaacacactgaaattaaccactggcgcgatattcaggaaaacggcgatatcacgtttacctggaacaatcattcatgggatgccagtaaagcgtcacaagaccggttagcgcccgttgtcgctgttgccaaatcaggctcactcccgcccggcttcttctggacggatgccgataacatcgatgtgccagtgaccgccgacgaactggccgcgctggagaccgccatacagcagaatatggtaattcagggcttcaaaatccacgaacgccagcggcaaatgaaaaaagaagtggacaaattaacggactacagggcaattcagggttacgtcattggctggccggacagcggggagtaa

SEQ ID NO: 397015 - DNA, 2112 bp, Salmonella enterica
atggccgctgaacttgatttcacattaagcctggttgataagctgacgaagcccttaaaacaggcgcagtcggccttaaccggctttgctgacaaggcaacggctgattttaagcgcatcggcggcggtgcgctcgccttgtggggtgttaacaaagcgctgatgggcatgatgcgccccgcctatgatttacaggacgcactggatgattctgtaggctcaggctatgccgccgcaggactggataaactcaccaaagccgcaaacagtttcgccattgaatacggtcgctcgtcgctggatttcgtcaaaaactccacgctaatccgccgcagtatcggcggcattaccgataacgatctgcccgcttacacccacgcggcaagcgtgctcggcgttgccatgcgcaccggcaccgaagacgccgttaattacctttcccatatgacaaacctgatgccgcagatggtcagtaaaatgggtagcgtcgactttgcaggcgcaatggccgggctggccagccagatgaaaaacagcttcaacagttccctcaacgatatcagcgccatgattgagcagtcgaaaggcaccggcagcgcctacggcgtctcactggcggagcagctcggcacaatgggaacggcaagccaggtattaggcagcggtgcaagtggcggttatgaccagttattgcgccatcttggcagcggcgacgccaccaaagcgaccgggatcaacttccgcgacgcgcaggggcagatactgcccatcatgtcgattctggacaagctgaaagccaaatacggcgaaaacatcgaaggcaacgcccgcgcacaggcggcgatggaaaaagccttcggcaaaggcgcttccgttattcgtgcgctgtggaataacgcggacggactgagcaagagtattaacgcgctgggtaaaaatcccggcctgaaagccgtcgaagagatggccaaaaaaaccgttgtaccgtgggagcagttcgccgccattctgaaagccatacgcgctgaaatcagtcttcgcctgcttcccacgttcgggccattctttgataccctggtcgattgtggcaaagagtttgttaactggcttcacgccttccccaatcttgcccgctggattgggtatatcattgtaagcatgataagccttgccgctataggtgcagcagtcgccgtaatcatggggacgatttctctaataaaactgggcgcggaagctactggcagtataaaactcctgaaatacactcttgagctgttacgcccttcactgctttcaacccgtatcggcctgaggtggctgtggattcaggaaaaagccgtctgggtatggtcaaaactggtcgccctttgggcggggatctgtaaggttgctatcgccgcctggaacgtggtgttacgtgcgggcgcgattgcgatgcgcttatggggcgtggcaacggcattcgcaggcggtgcgctgcaactcctgatgagtccgataaccctgattattctcgccattgccgcgctggccgtggggatctatttcgctatcaaatactgggatgacattaaagccgctatcatggacacccaggcatttcacatattacagaaagtcgttaacgctgtggtgggatggtttgatgacgcctggagaagtattaaggatggctgggataacctgacaaactggtttaaaaacttctcgctggccgacacgttcggcaacatcacagccgggatcggcaagctgtttgatggtgtatgggaatcaataaaaaacacctttaaagggacgtggaactggattgttgaaaagctgaacaagttgccgggcgtcaatattgaccttgcaaaagtaacgccggttcccacccctgacccgaacattaccccgcagaaggtggcccccaccatcgcgcccacactcaccaccggcaaccgcgcggcagcaataccgggcgggccagttagcagccagatcagcaacagcaagagcgagaaggtcgtaagcgaccaccggagcgttaacattcagaacctgaacgttgacaccatgccaacgccggggcaactggcggaatacagcgaactggcggcggggtga

SEQ ID NO: 397016 - DNA, 1062 bp, Salmonella enterica
atgggcgtacatatgttatccaacaaggcagcgaagtatttgcgtcaatacgcgttagatatagcgaaggctaacaacacgtttgatgctgcgaacttcttcgccatcgcgccaccgcgcgaaaccatgctgcgcgatgcactcatgcaggcagccaacccgttcctgtcgttaattaacgtgatgctggttgatcagctagtgggtcaggtcatcagcactggcattccagggttgtataccgggcgtaagacagacgggcgtttcaacaaggcgctgggcgtaagcggtaacgaataccggctttacgaggtggattccggttcgttcctggactacgccaccctgaccgcgtgggcaaacgcaggcaccgaaaacgagttttacaaccgcattcaggcgttcttttacaagtgcattgcggtagacctgttacgcgtggcctttaacggcacccacgccgccgaaggcaacacagaccctaaaacctgcccgaacggcgaagacgtacaccccggctggcaccagatcgtcaaagagcgcagcccgaaacaaattatcaccgacaaggtaactctcaaccgtgaaaccaaaggcgcggactttaaatcagttgatagcatcgtggcggacattatctatacctgcctgccgcctgaatttcgccgggatcctgatctggttgtactggcctcacagaacattatcgccgccgacgcggtaagcatgatgaaccgcgttgaccgtcccagcgaaaaggtcgccgctgcactcatgaatcgcgagatcgccggtatcaaggcatacaccccgccatacatgccggataaccgtgtcattgttaccaccctgcacaatctgcatatgtatttccagagcgggacgcaacagcgccgttcaggctggatcgacgaccgcaagcgcttcgaaaacaactggctgcgtatgcagtgctgcgccgtcgaatacgaccaactctacggcgcattcgacaacatcgaactggcgggcctgccggagccggagcatgccccggaagcccagacagacgcagcggtataa

SEQ ID NO: 397017 - DNA, 1209 bp, Salmonella enterica
atgattttcgtacatggcctcatgtacgaaaagccccgaactaagccggatgaaacccgcgaaaacagccgtaataatgccgccagacacaacgaacgcggtgatgaaatggcaaagcagaaatacacaactgactggatatgtatagcgaccgaaggctacgccatcgacgggcgcgccattacccgcgaaaccatccagcaggccgctgacaactacgacacctccgtatacacagcgatgatctggccgtatcacccaatcgaaagttttgacgagcggcaatactggacacctaaccttggttttgtttctgaactgaccaccaaagaagaggccggaaggttgcgccttatggcgaagctggagcctaaccagatactgctcaacctcaatgaaaacggtcagaaactctttacctcatgcgaatttatgggcgattacgccaacaccgggcaaacctacctgttggggctggctgcaaccgatattccggcgagcctgggcaccggccgcatgaatttaagcgaatcgatccagaacgcttccgcgccacaaaagcagtacaccgcgttaagcaatatcgaaatgttcagccttgggcgtctgacgccagccgctggcaattcatcccccgacgacgagagcaaccccatgaacaaagaaatcgccaataagcttctggcaagcattctgaacctgacggcaaaggttgacgcccagcagaacccgcaggcacaggtacaacaacccgcaccgacagccacagcggcaacccaacaacccgccactcaggatttcagcgcacacgctaaccgtgtggctgaactgaacgaaaagttaaccatcgcgactgacacgctggcagctaacccgaaagacgccacggcacgccagaactacaccgccgctgttacggagttgcagactgccctcagcacgtttgccgtacagccgcaggatgcagaagccgcaaaactccaggcacgtattgccgcccgtaatggcggacagcagccagcgccagcagcacagaatctcagcgcacagccgaccccgaaaaatgacgaggccgacggcgccaccatgaccacgctaaccagtgcgatcaacaacctgactgagcgtttttcagtcattgaaggccagcgcacgccaacacccggcgtagcacccagcggacaacctgcgaagtttgagccgctataa

SEQ ID NO: 397018 - DNA, 399 bp, Salmonella enterica
atgaaagtgttaagttacagtcgtatgagggcggaactggccgatgttcttgattgtctgcgcaatggtgagacgataacaatcacacaaaagggaaaagacgatctggttttgtatagtgataaagggcagattgacattaatacacaccttaacggttcgtcgggtgtcgccagtacgatagaaatggtcgacagggcagataaagttttaggaggagggattagaatgtcaaaaatagagcaattgtgtaattcccctggcttaaagactgcgcgagatgcggaaagaatttgcattcttccacgtgaaaaaagacgcgcaaaaagccttcaggagtcgcttgacaaaggtgacaaactatacgctgcggcaatgaaagcactggaagataattaa

SEQ ID NO: 397019 - DNA, 411 bp, Salmonella enterica
atgattatatttcttggtgctgatgatatcgaaactattcaccatcgcgttctaacccgtagcggcccggtcaatcgccaacttctggaaggcgcggttaatcgggttaataacctgcattattataaaggtgtggactgtgtttttacccttgccggcatgttgatgattgctattgtcaaggcgcacgccttcaacgatggtaataaacgaacagcattaagggctacggcatcgtttcttgacttaaacggctatgagattaccagatcccctttactactgactcgccttgttgtgctcgttgcgaaatctgccgatatcacgcctgaaatgctggctttcactctaaaggtattaactgactacgaagatgaggatctaatcctgtattccgatacctatatgtag

SEQ ID NO: 397020 - DNA, 327 bp, Salmonella enterica
atgccctcaaagaggctaaaatataggcggtttaaatcaggcaactcaggggaagagcgagtgatgagagtttactgtccggtgtgtgaaggaagggctgtgattaaaaaaacggtacgtaaacacaaggaattatccgatttatactgctcctgcaatgatgttgagtgcggtcacacatttgtgctgaatgtgaccttctcacacaccatcagccatagcgcaaaagttacgggcaatatgatgttacacgctatcattaattcatttacccccgaacaaaaacaaatgacgctggatattctgaaatccagcgccgccagctga

SEQ ID NO: 397021 - DNA, 297 bp, Salmonella enterica
atgtctaaatattcatatttacatgagctgtacatggcatataccgatgagcaggatgcacggcttcagcgctacatgcagaatgtccgtgcagcctgtgttcgctccggaggttatgcccggtataaaagggacagtgaaaagttttttgaccgtcgtagcagggaatggcgcaggaaggttggtcgggtctttcgccatctcaatgatgacctctggctgacgggcaaagtttactcagtcgttaatggaaaaattgtggggataaaagaccagatagcagagaaccaggcataa

SEQ ID NO: 397022 - DNA, 561 bp, Salmonella enterica
atgaaacatttaatgattgatattgaagcaatggatgataagcctaccgcagcaattacggctattgctgcaattttctttaaccctgaaactggtgaagttggtgagtcattttttcgtcgaatcagtctggaagactcgatgagcaaaggaggaacggtgagcgctgaagtaattctgcattgtttacgccagccagtaggtgttcgacgtctgatgttcgatgattttttatatgatatagaggatgccatctgcgacttctacgattttgttaattcaaacatgccaccactgggagtcagggtttggtatggctgtccctctttacgtagtgctgtgttacgtactgcaatgcgaaaatttgttggcgatagttttgattatggcaatgaacaatcggtagtaacagtaaatgaacttgcaaaatctctcgggctgaatatggaatcaatcatcccaaactccggaataaacaatgcatacgaccaggttgtttataatattaagcttgtatcttacgtctggatgtatctcgtcaaaatagccagtgtgaaatag

SEQ ID NO: 397023 - DNA, 222 bp, Salmonella enterica
atgaccaccaacatttcaattaatctgcctgtcccttcaatctctaaagaaaagtacatcgaattaacgggattatctgaagatacagttgatgccatgctgaaagatggccgcttgcctcgccatcgtttacgtaaagataaaggccgtgaaaaagtgatgatcaatatcgcggctatgacaatcgacgcccttgcgggttgcaacatcgtacttaactga

SEQ ID NO: 397024 - DNA, 621 bp, Salmonella enterica
atggattttagtagaggcggaaaagcggtgatagaacgcctggtacatgcttatggatttagtacccgccaggctttatgcgagcagttaggcgtatcaaagagcacaatggcatcacgttatatgcgtgatattttcccttcagactgggttattcagtgctcaatagaaaccggtgcatcactggagtggctttcatttggagaaggcgagatgttccccaatggagatgataaccattcaaatgaaaccaatcattgcgcaaatgagaacttactaagtgatgttgctgcaataccgagaaagaaaatagttgatggtaatttgtacgactcaaacttctacatgctagacaaagccattcttcctgagaatatcgttaagccagtaatcattattgatgatgacctcacttatgtagctgaacataacattagcgaaattacggatggaacctggctagtcgaaattgaggggaaagttagcatcaaagagttgatccgcatccctgtaggcaaagttcgagtttcttcgccaaccggtggttactcatttgaatgtggtattaacgacctttccccactggccaagtgtcattattacctgatgactaatgtttaa

SEQ ID NO: 397025 - DNA, 777 bp, Salmonella enterica
gtgagttacagcctgcagaaggataaccagggcagtatgctgcagaccgtgaattacagcgatttccataacccggatacctcatggaatatcagcgccggccataaccggtatgacagcaacagcagtgacagcttcagcgggagtatccagagccgtctgccgtggggccaggccagcgcggatgccaccctgcagcccggtcagtaccgcagtctggggctgaactggtatggctcactgaccgccacggcacatggcgctgcgttcagccagtcaatggccgggaatgagccgcggatgatgattgataccggagacgtgtccggtgtgccggttaacggcaacagcggcgtgaccaaccacttcggggtggccgtggtgagcgcgggcagcagctatcgcccgggcgacgtctccgtggatgtgtccgcgctgccggacggcgtggatgtggctgacccggtgatcagccaggtactgacggaaggggccatcggttacaggaagatagacgtcagccagggagaacagatattcgggcatatccggctggctgacggcacaagtccgccattcggcgcgcaggtcgtgtcggagaaaaccggtaaaacggcggggatggcgggtgataacgggctggtctacctgacgggcattgaggcttcagagcggaatgctctggtcgtgacatggggcggcaggccgcagtgccggctgtccctgccggagaacgcgaatctcagccggggagccctgctgcttccctgccggtga

SEQ ID NO: 397026 - DNA, 282 bp, Salmonella enterica
atggaagttgaaggtactttcaccgatctctgtcgggaatacgagttattactttatacaaaagaccagaatattgattttacaacgctggatgaaaggttagctgaggtaaaagcgaataaaaactcagctggggcaatccctgatctggaagactttactcttacagcacgctgtatggctgacgcagaaacggcgcgtcttgcagaagccacccaacggtttaatgcagcgtatggtgatagcgcgccaccttcaagacccccactacgttttaagtaa

SEQ ID NO: 397027 - DNA, 639 bp, Salmonella enterica
atgaatacagaaatcaccctgaaaggcattcctattctccgttctggatacagcgaacgcggattcacaagcgccggaataattcttgccgtttaccataacagcagcaacaagacaattaacgttaaatatatggggtgccatataggatacatcagccatattcattacggcgatctgcctgatggtggcgtagaactacggggcgatatttcgttccccctttctaacctcatcgcacaccgggaaatactgaataacaaagacgtatacccgacttgcatcatcgaaacagcatcaggtgccaacgaagcccaactgtctaaggtgattctgtttaccgaagaagagcgcgaatttgacgaacaggaaccgcttaacctgtcagaactacgtgaactgtttgaagataatgttaaaccagccgctacagcagagcagcagggcgacacaccatacatctacgcgccaggtatgaacagggacgatatcaccaactggctaaactctatcgtctcagacctgaacactgtcgatgccagaaaagtaagaattaaatcactggaagaaagctgcaaagaattaaagaccgaattagtcgagatcgaatcgtttttgcgtaaaaccattcgcgtttaa

SEQ ID NO: 397028 - DNA, 723 bp, Salmonella enterica
atgaatatatcaatcgaaaaagtgttacttgctcgtactatcgccaaaaaaagacaatttgaaaataccgtggaaaatttcaaatgcacaaatttcccgcgaatcataaaaccaaacactcgccgtaacggtaaagttggcgaagttatgggcgttgtcagtcacattgagttatcagacattggcggcataacagagttacgtggaacgttgaactttaatgaaagctacgaatgggaagatattatcgcgatacttagggagtccccttacccattcgctactatcagaaacgcgcaaggccgcgcatcatgcgagatattgcacgaagtaacatttgttagttcacacgaaagcgatattccggttgattttgtaaactggagaaattgcgtttgtcacggaagagaagaatacgcagaacatttactaagagcgaaagtattaaaaaatacatctgtcacacaaactataagtatttcctgcgaagaaaaaaaagaatcagttataactttcagtaatgaaggacaagacattggtaacggtattatgcgttacgggtattaccgcaacggggcgcttatgggttatgtagtttgcggggtgactgagtttggcggagatcacctacccagacaccccttagatattttagatattttagaaaagtttgtagaacatcagcgaggcagcttgctacgtaaatcttcaaccaacacatga

SEQ ID NO: 397029 - DNA, 420 bp, Salmonella enterica
atgaaaaaccttatcgataaagagcagattgacgagcttatcagcaggcttaaagaatgtgccagcgtatataaacatatgctgattgagtgcgctgacttaatagaggaactcaaccaggaaaacgacgaactgcacaaccagatcgccaaatatcagacgactgattaccagtctcttgacgatctgcctgttaaatcggtcatcgccttccatgacaaccatttcaccaacggcgaccgcgtcagactgaaacaccgcccggacattaccggaaccatcgaaggctacaaggtcttctggcttatgcacgtaccgaccatcgcccatcaggttcttctcgatcgtctggctgaatccattcccattgtcaccactgcccttgaaccactaccagaggccgacgatgcgaagcaatga

SEQ ID NO: 397030 - DNA, 249 bp, Salmonella enterica
atgagcctgtttattccttccgcttatcgcaaacagcccatagcacgcagatcgcggcgcttatatgaccagatgcgggagggtgacaaatcgcacgttcggcgactggcccatatacccatcgcccgcgtgattaacgtaggccgtcagtaccggattttgagcctggacagaggcactaactggaaacttttaacgcacgacgaatacgagggagtaataaaaaaatggcacaagaaaaaaagatga

SEQ ID NO: 397031 - DNA, 546 bp, Salmonella enterica
atggcacaagaaaaaaagatgaagtttaacccccgctttattgaagcattccgcagcggtcagaagataacctcactgcgcatgatggattttaaatgccgcatccaccagacggaggaagagaaagagcctgcttacttccacgaagacacgctgagacattacacgactataaagagtatcagcggcatgcacctggcactttcatcaggaacaacgattgagtatttaagcgatttagccggactcctgaaaagacagccctaccagcaaggcgacgagatcgaactggtcgcagtatatgaaagcggcgaaacagtgccgtttgctaccgctactattggtgctatttccgttatcaagggcgacaagatagaagatgttgacgccattcatgacggatttaaccctgaccgtgatccgctcgccgaactccatgcattcctgcgggacgttcaccccaacaaagacccgctaagcgaaatgtactggctgtacgtcttcaccaacgttcagatgttgccgatgtggggaggccagcaatga

SEQ ID NO: 397032 - DNA, 981 bp, Salmonella enterica
atgaaaggcatcctgaatcaacgtcccccgctcaagtgggcgggcggcaaatttaatgttgtgccgaagctacgcgagcacttacccaaagcaggctacctgatcgagccgttcatgggtggcggttccgtcttcatgaatacggactacgaacgttacctattgtgtgacagcaaccccgcgctgattaatttctacaggctcatgacttataacactacggagcttatcgatcgcgcagggttgctcttcgaagatggtaatacacctgaagcctataaaaataaccgggaagcgtttaacacaataacgctttctcatgacaaaacgcgcggtcaatatctgaaatgggctgcgctgttcctgtacctgaaccaccacggctataacggtatgcagcgaaccaacctgaagggtgggtttaacgtcccattcggcaaatataaaaaggttcattttcctgaagagaaaatgcgccagtttgccagtaaagcccgtgaaactatgacccgctttatttgtgctgacttccgcacaacgatgaaggggcttcctgatatctgtcaccgtgtctcattccatgcaggtacacccagcgatgcggttatttactgcgatccgccttatctgccactgaaagacaaagacagcttcacccactacaacggcaaggcgttcacccgtgaagaccatcgggcgctcgctgcgtatctggtgaaggcccatcagctttacggcgttaagtctgttatttccaaccacgacaccgaagagacccgcaagatctattcacagttcgaacttcacaccctgagcgttcgccgttctgtcagtggtaaagccagttcacgcaagccagtaaaagaagtgatcggcgtttatccgcctgcccttgaaagcaaaggcgtagacgtacacgccggatggtacgacatgccccacaccaagcctgaacaaccagttaacccggaggtgatctga

SEQ ID NO: 397033 - DNA, 306 bp, Salmonella enterica
atgtctgttatttacatcgccggccctatgacggggaagcctaatttcaaccgaaaaaaattcatcgaaacagcaacccttctttggacggaaggccataccgtacttaacccggcaatactccctgacggcctcacctatgaacattacatggatataggcttcgccatgctgcgcggtgctgacgaaatttacctgcttgatggctgggaggattcagaaggtgcaaaaagagagttcaacctggcgagacggttacgcctgaaaatctccaccccggaaagccgtaaagggggtgcgtcatga

SEQ ID NO: 397034 - DNA, 537 bp, Salmonella enterica
atgatcctgaaaccattgggaacgccggggaaatgcccggcacatgtacgccgctggacgccagaaaacgacgagttgctgataaatctttatccgtccatgacaaatcaacaaatagctacggtgatggggcgtggtgtttcagcaatagagtgtcgtgtgagacttttacggaatgcgggacgcctgtcttataagcaaaccaaacttacaccagaacagcgccgttttattcgcgataaccgacacaaaatgacagtcgatgaagtcgccgtcgctatgggtatatcgcgttacgcagttgactataacatcagagcgatgaacatcagttaccgtaaatatggtgacgaacaccctctaaaaaaatacccggatggtgatgtagagcttattcgccagttacgcgacgaatacaacctgacattcacggagataggcgaaaaatttgatctgtcacgtcaggtatgccgatatctttatgtacgccgcctgaccgccattgacgccatcgcaagggagtacctcccgcgatga

SEQ ID NO: 397035 - DNA, 234 bp, Salmonella enterica
atggcaaaccgtaaacaacgccagagccgcgatcaggtcgcgcgtatccacacccaaaccgaaatcacccgcaaactgtgccgcgcccacgatctggcgttcttcctgcatctcgaaatgctcgccagaccctgcggcgcaccgaatctttggttgtcgtcagtcctggactacatcgccgacgatatcggcgacattcagcggttgcttaaccagccagaccacaccgcgtaa

SEQ ID NO: 397036 - DNA, 543 bp, Salmonella enterica
atggataaagatttacgcctgcaggtgattctgggtgcggtaaacaaaatgaccgcacccatgaaagccgcacagaacagcaacaggaagctggcacaggctattcagtcaaccaaaaaaaatatccgcgcgctcgatgagcagtccggcaaaattgccgggttccgtaaaaacaaacaggcattaactcaactttccggggaaatgcgggcagcgcaggcccgcattaaagcgcttgctctcgccatcaaaaagggcgggaaagacacggcaacgctaacaaaagagcaaaaaaaagccattgaagccgcacgcaagctgaaaattaatcacgccgaactcagcgccacgctacaacgcgaacgtactgcattacagcaggacgggatcaatactcacaaactggcatcagcacagggagaactaagcagaaagacccgacaggcaacacaggcgctggaagcccagcaaaaacgcctgaaaatcagcggtgaagcacaggccgctaccagcaggttatgtcacggcgcaacagtatgctga

SEQ ID NO: 397037 - DNA, 135 bp, Salmonella enterica; identical to SEQ ID NO: 377603

SEQ ID NO: 397038 - DNA, 690 bp, Salmonella enterica
atgaccgccccggaagggatggcgctgaccagcggtgaagatatgcaactggccgccacgaaaaatgtcgccgtcaacgccgggggggatatcagcgccggagtgacgggcaatctgaccgcactggccggggagaaactggggctctttgcccggagcggccaactgagcctgaaatccggagaaggggcaatagatgtccaggcgcaaaacgccagcctgcggttgtttgcagagaagaagctgacgctgagctcagcgagtgatatctcctttgccgggaaaaaacgtatcacgctgattggcggcggaagctatctgcggcttgaggccgggaaggtcgagtatggtacgacggcgtcgtatatgcgcaaagtgaagcggactatggctgcatcagccagtgctaaacctgcggaggccgtatccttgccgcctccggcgaccatgcgtgaattcaatcccgaaacgctcaccccctgggtgacgccggtgtatgcaaaatcctgtctgaaagagaaaggctgtactgatgccgttacggtcatcagcatgagcatgcagatgatgaagtcgttcagcacgcccagtcagctaaaaaacgtaagcctgacgccgggggcgcaaatgcacctgcgcctgctcaggcaacggctgcaccgcttgctctgggagctgctactggcgtga

SEQ ID NO: 397039 - DNA, 291 bp, Salmonella enterica
atgcgcacaattggcgtgttacccaaaagcatactgatactggaatgcctcggtatgattttgctggcgctcgctttgctatcgcttaatcattaccttacgctgccagcgccgtgcaatacgcctctggctggcgtattgatggttttcctgggcgtcgtgttgatcctccccgccgcggtggcgatgatgtggcgtattgcgcagttactggcgccgcaattgatgaaacgtccacccgacatttcttcccgttcagatagagaaaagcataatgagtccgaccattga

SEQ ID NO: 397040 - DNA, 336 bp, Salmonella enterica; identical to SEQ ID NO: 377671

SEQ ID NO: 397041 - DNA, 390 bp, Salmonella enterica
atgttagaaaactatgctaggcagcgagcctctagggttctggccatcccctctctaggacaggttcggtatttaagtgccattaagcatgccgcagctgttattggtaattcatccagcggcattattgaggccccggcttttgacgttccgacggtcaatattggagaacggcagaaaggaagattggctgcaaaaagtgtgcttaattgtccagcacagagtaaggcaatagtgactactattcagaaggcctttgctcgtgagtacaaatctgtgggggaagttgtttacaacccatacggtcagggcgacgcgagtgcacgaatcattaagatgattaagtcccttgagtttgttcctgtaaaaacattttacgatattgagtga

SEQ ID NO: 397042 - DNA, 228 bp, Salmonella enterica; identical to SEQ ID NO: 372956

SEQ ID NO: 397043 - DNA, 195 bp, Salmonella enterica
atggataacgaagacggggataagtataaccgaatttcagtggaggtaaatgtgaaggacggaataaaaattgatgcaccggtcacgaaagatacaggaaaggcagtgaatctggtactgaaagcgctggcgcttaccattgtgctgtatggcattgctcaaataataattgctgtagctacgctggtgaagtaa

SEQ ID NO: 397044 - DNA, 378 bp, Salmonella enterica
atgagccgcttcacaactccggcaattcttgaaatgctggaccattatttatggcgcgtatatgagccttttgaattttacctcagcgacgtaatagaagttccggccggattcgtcaccgaccttgccaccgttccgcgcatcttctggacactgttaccaccagatggcaaatacgccaaagccgcaattatccacgactggatgtatgacaacacgctgcgcacgaagaaagaggccgatcgcatttttctcgacggaatgatggtgctcggcgtgccgaagtggaagcggattgtgatgtatctggccgtgcggatttttggccgagggatgtatgggcgaattgaaaggccgcctgaaacggggttgcagtaa

SEQ ID NO: 397045 - DNA, 168 bp, Salmonella enterica
atgttatcaaatgtgctggagcactaccaccttgaccaggtaaagtataagattatgcagcgttccagtctcctgttaagaggcgcgttaataaaacaggataataaaccggataataaatcaatgtatctttttctatgctctttaaaaacagtgggttatttttga

SEQ ID NO: 397046 - DNA, 348 bp, Salmonella enterica
atggcgaaaaaaatatcaaagcttaaaaagatggttgtttttgagaaatgtgctgctcgctgcgcttactgcggaaaatcactatctcctcagactgctcatattgatcatattcatcccaaatcattggggggtggaaatgatatagccaatcttaatttggcgtgcgtccaatgcaataccgccaaatctgataaggacattgaagattttcgattattcaaaatgatccagttatctgagttcaaggaagtgataaccggaaggcagtggcgggaactgcaggatagaggtgttttcattaaccttcctgtctacacattccattttgaggaatcgatgatatga

SEQ ID NO: 397047 - DNA, 726 bp, Salmonella enterica
atgagcagagctgcaactgactgggcgtggaaccttgagcttaggactgccccgaaacttcttatgctttccctggctgatcgtgctgatgaaatgcactgctgctacccaagtattcagcgtcttgtcaaagacacaggaatggacaggaagactatcggaaagtggattaaccagatgatggaagacggtctgatttcagatactggagagagaaaaggtcggacaaaacagatacgagttttacaactaaaaattggtacagaacaagcccaaaaacggaacagtcccaaaaacggtacatgtaccaaaaatggacatgaaacgatcccaaatttggacgataaacgatcccaaaaacgggatacagaatcagtcattgaaccagtcaatgaaccattaaacacacaagccgctaaagccgcttgtggcattgggatgaacgatcatcatatttctggtcgatatgcgtttgagggtaatgtgattcgactgaaccacaacgactaccgatcctggctgaacctgtacccgcttatcgacctcaactacgaactacagcggcttgatatcgagtttacccatgagaagccaaaaaactggtttatcactgccagccagaagctgagttaccagaacaaacaggcggctgcccgtaccataccggctaccaggccaaaacttgacctgaataacactgactggatttacggagtggagctatga

SEQ ID NO: 397048 - DNA, 858 bp, Salmonella enterica
atgagcaacatcgacaaacaggcgctgcgggaagcggcagagaaggcgacaaaaggtccatatgttgttgggcatcataacatcaatcagcatgggaatttaagcggcgtctatgtatgccagcagtggaaagatagcgctggaggtgtcgtcgcagaatgccatgttaactgtctgacaaaaacaagcgagcaagtttatgcaaatgccgaattcatagcggtcgctaacccacgcaccatgctggcgctgctggatgagttggacagcgccaacggttacgccagcgcatacgaggctgaaaaatggcattaccacggactggctgagtctgagggggagcgggcagacagagccgagaagcacgtggccgaactggaatccatcgcgactgattacggtgtgaaatttcagaaagcacaggacgcgctgaaacatcaggcgctgttgcataaatcgcagatggaagccgcagaaaagcgcatagcagaactcgaacgcagcgagacacagcttatcaatgagcgtgatagtgctgaatctgccctggccgatatgtaccaggccgcaacaggagagcgtccagaatggagcaatatgtttggtttcgctgacgccgttgatgtggtggaagaacgactggcgacgctggagtccaaccaaagccaaaccacgccaacgggaattcagttcatcacagaagccataggtgcgcacggctatatcgttggctgcctgttgcaaggtcgccctgatttggcgctggaagaatcgagaaagtgggtatccgctttcggtcagtcgggggaaatagttagtgcgcaagacgccgctggcatcaaggttaagggggagtga

SEQ ID NO: 397049 - DNA, 333 bp, Salmonella enterica
atgcgctttgtagaccagctgcgccgcaccgacagtggcgctgtcgaacgcagtaagccgatcccagatacgctctacaaccgacattccccattcgttctcggtcatcttctgctggaatggcagcgtcaccccatcgaagcgaatcaggcggctatggtgaatacgccaggcggggatgcccgttgcggtggtcaccacatcataaagctcaggcttgccgagattcggccccatttctttaatgcggcgggtcagtaccgggttaatcatccagcggtcaagcggaagaatccccttaaacttgccttcaccaatggtttcgagccgtag

SEQ ID NO: 397050 - DNA, 216 bp, Salmonella enterica
atggaatacctgctcaggagagcgcgttacgactatctcaccgaacttgtcaggcttgaggtttggcagatcagcagcgccgtaaagctgcttacccgttcgacctatcggcacgtctttacacagcagggagccgtcagccagctgatagcgggtttcccccagccgggtattgaaaaaatatttcatgttttacctgcgattcaggcgagataa

SEQ ID NO: 397051 - DNA, 336 bp, Salmonella enterica
gtgaaaaaaagtattttgtgtttattcttggcattgccgtttacagtttcagcggcgacgcagtgcggaccgttccgctttgatgctggtagcgatggtctcatgcacatcaatggtcaaaagccagaaacacaaaaaatgacctttttgaagcaaaaagacgatttcgataatgtcatgatgcaatggatgctacctgatcctaatactggacgctggttaggtatggactacatcaagcgaaacaaaaaagcgatcctcaacgttgaagttatccgcaaaaatatggacgagccgcgagagttctggacgtatgactgccggaaggtgaagtga

SEQ ID NO: 397052 - DNA, 747 bp, Salmonella enterica
atgactctgcgaccttacttgtgttttgagcaggatattaccgttttcgtaaaagagcgaaccgcgaagcagatcgaagagattcaggatccggggctgaaatgctctgcattatccgttttctactttactttgggggatatcgaacgcggtaaatctcatgcggaagaaacgttgaaatatttacctacagacactgtcgcatggcggcactacactttaggcctgttctggcgttgcggtgcagtcgaggctttaaatgtggctaagcgtggattcgatgctaccaatagtccaattcttgccagtgacgcatattactattcatcttcagttgcggatttttcatactttctggaaatgcgcgagttccttttgcgcacagaaacgtatgagaagttcaaggaacaagatcaggagcctgatatgttgcggagcctggagtatgccaatatagcccgtaggtacaacaaagaagatgtgattaaaaacgtctcagctttgatgtatgaaaaactgggtttggtgcaaaaactgaactctgccgttcgtcttcttgatgttactgaggacagcgaagagccagaacttatttttgaaatgtatgtaagcaaggctgatgcagaaacatgcgcaaccatgaatgttgagcttatttctgctcgcgtgcgttctgggttaaccgactggagtgtcggtggagtttatgtcgctcataataaagaggacatgctgcaatgccagtaa

SEQ ID NO: 397053 - DNA, 381 bp, Salmonella enterica
atgccagtaacaccaagggattttcttgctgtagcttccgatgtacctgtttctgatgaaatgcgtaatcgaactgctgttagtagggcctactattccggttatttgcatgttaatgaaaaagtagttgctttgaatttgccatttcctaaagtaaatggcggtgtacacgcccgtttgatcagcggtctgaataacggggcgtacagtgacttaaataacggaataagtcatgaagtacagcttgaaattgcagggttactcagcctgtcaaagcaactcagaacaaaggctgattataagctaaacatgaccatcaacaatacagataaagccaccgcgatagcgaatgctaaagcggtgtttgcattgcttccatag

SEQ ID NO: 397054 - DNA, 390 bp, Salmonella enterica
atgccgattcttgatgtaaccgatgttcttttcgacccggatttttgtgacttcaacctttgggtaacgcgtcgggtacagacagtggacgaagacgggattggtagcgacagcgaagttaaaacgcagtttgccggagttgttaccgttgaccgttcactggaaaaccgccgcatgcagtctgggcaggttatcagtggagcaatccttatcgtgacgactgagcgactcacgcaggggcagactggccgtgatgccgatatcgtgacgtatcagaaccgtgattatcgtgtgacgttcgtcgacccgtacaccgcatatggcgccggctttgtacaggcgcattgcgagctgctgccgtttgatgggggtactcccgttgagcaataa

SEQ ID NO: 397055 - DNA, 795 bp, Salmonella enterica
atggataatgcgaatgcacgtcttgcgaaagagcgaaatggcggggatattcctgctcctgcattattcaggcaaaacataggcgtttatgatgcctccacctcacaaaaaggactggtacgtcttaatggcggggtaacagacgaaagtaacgaaactgccgcaacgtcaggtgctgtaaaagttgcttatgatgcggcaatagctgcggcggatatagctaaaacgaaatggagtgcagttgatgccacaatatctcagaaaggtattgtcatgctcagtgataataccggcgtccctgactcaacgactgctgcaacaactaccgctgtaaattacgtgcttaaacaggctctggccgcatatagtctggcagaattaaaatacaccgcagaaggagcaactaccggaaaagctggtcttgttcagcttgtgaattcaatgggatggtctggttcactggtgatgccacaggcggctgtaactaccgcaatacagacgtacccgtctcttggaaagggccaaaatctacaggatctaagaacttcgcgtagtacaggagtcacttataccaattcaaccggtttcccgattgcggtgtatgtccgaatttctggtggttattcagccgttttatatacgtatgttaatggaatagagttcggcggtggtgggtcaacagcgtctaatacatccatagcaactgcatttttcattgttcccaatggtgccacatatcgtgtggaagctgtcggtgcgtccactgcattacagtcctggacagagttgagataa

SEQ ID NO: 397056 - DNA, 345 bp, Salmonella enterica
atgaaatattttaagacgaataaaaatgaaatttatgcttatgaagatgatgccgaaaaaaaatactaccggcgcgggttaattgcgataaccgaagatgaagcgaaggcaatactaaatcagcctcttacagcagaacagatgaaagtgcaggctgagagtgataaggctcgtattctggcggagtcaaattctgtcatcgccctgcttgaaaggtcagtaaggcgtggcatggcgaccgaaagagaaattcaacttctggaagagtgggagcgatacagcgtgatggtgagccgggtggacacttcgaatcctgtgtggccggaggtgccggatgtggcgtga

SEQ ID NO: 397057 - DNA, 1098 bp, Salmonella enterica
atggaaaatgctattttatataaaaaacgcaattcaaaaaaaatttacgtcggcgatgtcgctgtaggtggtgatgctccgataactgtacaatcaatgacaaatactaatacctgtgatatacattccacattagagcagatccacaaactagaatcggcaggggccgatatgattcggatttccgttcccacgatggaggcagcagagtcttttaagaaattgaaacaatacagtcaggtaccattgattgcagatattcattttgactatcgtattgcattaaaagtcgcagcttacggtgctgattgtttgcgaattaaccccggaaatataggtaatgaacaacggatatcttcagtcattgattgtgctcgggactgtaatatacctatccgtattggtgtcaatgcaggttcgcttgaagtggatattcaggaaaaatatggtgaaccaacaccggaagcactgctggaatcggctatgcggcatattaatattctggaaaagaataatttcgataactttaaagttagtgtgaaggcatctgatgtgaatcttgcggtaaacgcctatcgtttgctggcaaaaaaaattgaacagccattgcatcttggaattactgaagcagggggatttcgggctggagcggtaaaatctgctatcggtatcggattattgcttgccgaaggtattggtgatactttacgtgtatctttggctgcagatcctgtagaggaaataaaagtaggatttgatattctaaaatccttacgtttacgttcacgagggattaattttatcgcttgcccgacatgttcacgtcaagaatttgatgttatcagcacggtgaatgagctcgagcaacgactcgaagatattgtcactcctcttgatgtgtcaattattggttgtgttgtgaatggtccgggagaagcactggtatcaacgataggagtagccggaagtaagagtaaaagcgcactatatttacatggaataagacagaaaaaacgtctgaataatgaaaatatgatcgatgaacttgagaaggaaatccgaatgctacttactcaagacagtcatgagaaatcctga

SEQ ID NO: 397058 - DNA, 711 bp, Salmonella enterica; identical to SEQ ID NO: 377950

SEQ ID NO: 397059 - DNA, 438 bp, Salmonella enterica
ttgaatgctgagctaaaaattatcggtttacaacgttctgagaatattgttcactcccctgttgaaggcgttatatataatgtaaataaaaatgcgatgactattggtggggttatttcaccgacagaaatgttattcgagattaaacctgttgataagcatatcagggctgaggtgaaaattaatccgaagtaccgcgatgaaagtattagccctgatattattgaatctaaggataataccgggttgaaagaatattataaagttatggttgagttttatgtttccgacagtgctttatcaaatattaaaccgggaatgatcgttgatgcaaatattataactggtaagcatacgattcttgattatcttatgtcacctattgctaaaacatttaaaggggcgctctcagagccgttaccttctgaccatcgataa

SEQ ID NO: 397060 - DNA, 492 bp, Salmonella enterica
gtggctgagtctgaaagctcagaatcagccacaatatgggtaaagttacacgctgaacttggcgtgaacggtgtgagtgagatatcaggtagtcagtacaaggctgcgttaaaattcctcaacgatttactggcagaaagtaaggagaagaaaaccaaaaaaattcttgtcgctaagatcttgaacaaaacagaagggcaggagttacgccataaattaaatgaacattgtagtatttattacaaaaatacacggctggatgaattaagccacaatcaactcgttgaaatttatgagtgggtagaaaaaacagtacccattgtttcacttgattataaagaggacatgtctgctccctttaatgacaacatcagaaccagtaatcctgttaataaaacaccatttattgaattgctgacaacgcattctttagttttcgttatcgtatttattgctggttttgttgcgggcgagattgtttcaaaaatataa

SEQ ID NO: 397061 - DNA, 300 bp, Salmonella enterica
atgatgattgacgaggctactgccgagcgcttgcttaaaactggtttagtcggttatgaaaatgatgtgtccagactggttaaggtcaagttgacgcaaggccagtttgatgcgctggtgtcgttcgcgtacaacctcggtgctcggacactatccacatcaactctgctgcggaagctaaacgctggtgattacgctggcgccgctgatgagttcctgcgctggaataaggctggtggcaaggtactgaacgggcttacccgtcggcgtgaggcggagcgtgctctgttcctgtcatga

SEQ ID NO: 397062 - DNA, 831 bp, Salmonella enterica
ttgttaaaaaaaatattctcagaaaattcaatcgataatgtaatgcatttcgcaggtttgaaatctgtcgctgattcggttttgcttccattggattattatgagaataatatatcaggtactctttgtcttttagaagaaatgaaaattgcacaggtaaaaaatttaatatttagctcctctgcaacagtatatggtgaaccccaaaaaatcccgttaactgaaaattgtaaaactggaggaacaacaaatccttatggtacttcaaagttgttccttgaaaaaatattaaatgatattgctatcgcgtatcctgattttaggataacgattcttagatattttaatcccgttggtgcacatccatctggtattatcggtgaggacccaaatgggacaccctgtaatcttatgccttatatttgtcaggttgcaatcggaaaatatactcacgtatcaatttttggtagtgattatcctactgatgatggaactggagttcgtgattttatccatgtaatggatttagctgaaggacatgtagccgctttaaaatacattaatgatgggcctaatcttaagatatataacttgggaactggaagaggttattcagttcttgaactcttaaaaacgtttgagcgaatgacatctatttccgttccgtatgtgttcacagaacggcgagccggtgatattgcagagtgttggtctgatcctactaaagctcgtgttgaacttggttgggtggctaagcgaaaaattgatgatatgattaaagacgcgtggaattggcaaattaaacaccttgatagttatgaaactaactaa

SEQ ID NO: 397063 - DNA, 198 bp, Salmonella enterica
atgtccatacttattacaggtggtactggttatattggatcacatactgctctaacattgcttgaaaaagggaacaaagtagtaatcattgataacttgtcaaactcctcacgtaattcccttaatggtataaagaaaattactggtttggagcctacttttgttaaaaaaaatattctcagaaaattcaatcgataa

SEQ ID NO: 397064 - DNA, 228 bp, Salmonella enterica; identical to SEQ ID NO: 390992

SEQ ID NO: 397065 - DNA, 1014 bp, Salmonella enterica
atgagcagaaaatattttgaagaagaagtcattcaacagactttagattataactatacacaacatagtgatgctaataaactcaatatagcttatgggattgataaaaactttctttttggctgtggtgtctctattgcatctatactccttgctaatccagcgaaggcgttagctttccatgtttttaccgattcctttggccctgaagatcggcagcgatttgaagcattagcaaaacagtacgctacgcagatcattatctatttaatagattgtgagcgattaaaatcgctacccagtacaaaaaactggacctatgcaacatactttagattcattattgccgactatttttcagataaaacagataaagtgctttatctggatgcagatatcgcatgtaaaggaagtattcagaaacttattgatcttaatttcgctgaaaatgagattgcagcagtcgtggctgaaggcgagttggaatggtggactaagcgctcggttagtctggcaacgccaggcttggtttctggctattttaatgccggctttatattaattaatatacctctttggacggcagaaaatatttctaagaaagcgattgaaatgctaaaagatccggaggtagtacaacgcataacgcaccttgatcaggatgtattaaatatattactagttaataaagctcgttttgtcgataaaaattttaatacgcaatttagtcttaactatgaattaaaagattcagttattaatccagttaatgctgatactgtatttgttcattatatagggccaacgaaaccctggcatagctggggagcctatcctgtgtcacaatattttttacaggctaagcttaattctccatggtctgattatgcacttttaaatccagtcactagccatcaattacgctatgcggcgaagcatatgtttaatcagaagcgttatacttctggtatagcttattatatagcttactttaaacgtaaacttcttgaataa

SEQ ID NO: 397066 - DNA, 231 bp, Salmonella enterica
atgagccgtcgcggtaactgccatgataatgcggttgcagaaagctttttccagttgctgaagcgtgagcggataaagaaaaagatctacggaacgcgggaagaagcccgcagcgatatttttgattacatcgaaatgttttataacagtaagcgtcggcatggttctagcgatcaaatgtcaccggcagaatatgaaaaccagtattatcaacggctcggaagtgtctag

SEQ ID NO: 397067 - DNA, 267 bp, Salmonella enterica
atggggctgattactggaactggcgacgcaacggcatttgcatttaatgaagcagtaacacctcatgccaccagttttggttatggtgtgaataatcttggtgcttccgtgatgctggcttctgctctgggtcgtaatatgtctcctctggccggagctgctattgtgtgtgccggattagcaggtgtcaatccggtcgaaattgccaaacgtactgctccgggtgcaattgtagctgtactttttattgccatctttttcttataa

SEQ ID NO: 397068 - DNA, 618 bp, Salmonella enterica
atggtgattgtaaaaatgaaaatatttgatgaggaattcattaaaattgcaaatgagcttatacttgaaagcttaaaagaaacaaccgctgtcattccatttgataaattagaaaataaactaaaatatataggtaactattcagatgaaggaaaggcgaaagtaatagaaaatattaaacgcaatgagcttatgatatattcatataaatataaatatgagactgctcttataaatgcttttatgctctttaaattatttgaatgcaaagaacaggcgcggatgcttatcgaaataatgacggagctttattcaatgggcgatattgctcataaattagttgacgcgtcaatcaggtatgaaaaaagcaaagccaaaaaaggaaaaactaaccgtcaccatgatagcgcgttaagaatcgctatggatacttggggggaatatccaaacgctagccttgcaggaatgacggaagaaatacacgcatacttacgcagtaaatggaatgacacgccgacagcagaaacaattaaatcatggcttaaaaaatcaaatttataccctgatgcaaaaccaaaaaacagggattttaaacttatcattaacgaagaggggtaa

SEQ ID NO: 397069 - DNA, 843 bp, Salmonella enterica
atgtcacataaaacaaaggcgaccccgaaggatcgccagtgcggtaacactaaacccgtacaggataaccgcaagagcgctatttctgcaatgtgtgcaggtgaagaaaaagcgttgatcttaacgatctgcaatcagtacgttgggtgtacggcgtggtgtccactcgttgcggttttcgtccatatttccgcaatatccaggatgcgccacgccgcccgcaatggcgcggtgttctttgatggtgtcggtctggctcctacccacacaagcaccgatgaaacatcgcgccgcccctcaatggtgttgctggtgggggagcgttcgcgctcgctggctaacctgcttgccggtcttcccatccctgctagtgacgccaccatcacgacagtaaaaaaatgcttgcgcacttataacggcttgggttacgtttaccccgcaccttataaaacgggtgccgggcgttgcaacccgaatatgtacaaggcgacaccagacgccgcaagcgtcttttttgttgtccgttatacgcgccattcgatggcgtggtgtacgttattcaatgtagatagtgcagcagctatcacgcataacggcgtacaccatgccgcccacaatggcacgatatgtggttgttgtgtcaggttaaggcctgctatcgacgcacaaaaccgtatatcgcgccgccccataatggtgacgttggcggggcagccgcaaggctggccggtttccttgtacgccggtattgcaacccccgtcaacgtcaccgcccccattgagcgttgcaactctagcggtgactccttaaatctgtacaaggaggccgtttatcatggctaa

SEQ ID NO: 397070 - DNA, 255 bp, Salmonella enterica
atgtctaagaacacttaccccgaccgcaaggatgcggtgatagtagcgcttatagatatcctggtagatgtctcttgtatagcagaagcagcacacaagcacgcctgtagcgaatcagagtatgccggatcatttgtcccgcattcactggcaattattcagcgcagtacggaacaggctttacaggatgtaagcaacattatggcaaaggatacaggggaaaccgaaatcaataagggggttgatcatgcgtag

SEQ ID NO: 397071 - DNA, 273 bp, Salmonella enterica
atgacgacagcgaacaccagccggaagccagcacacccacagggcagcgcatggcaggaaacactacaggactataaagaccagatgacgaaacagcagcagacgcaacaggacgcaccagaaagcgataaaaccatatcggcgcaaggtgaagtccaccagcaggaaagcgccacagaagcccaccagcgagccgcagcaggcgaaacagcagccagcacaggaacgggtaaggccggaagggatgaatcgccgccagtggaagaactttaa

SEQ ID NO: 397072 - DNA, 468 bp, Salmonella enterica
atgacaaaggacgctataaacaatgcgccgccagtacagggcgtatggctgaaaagaatcaggccggagggaatgacccgcgaccagtggaagaagagaaaacgggttaagaagattatggagttctggccgaagctgtttgatatcagcaacccaaaacccctgaagctaaacatcatgcaggacatggcggaagatattcaaacgcgcggtcttggtgtagggcttggttcagttcgtgcagccctgaacacatacaccagtcatgccaggtatgttcgttgtgtggcggctggtggaatgcgttacgacctgaacggggagccatgcggggaagtgacagaaacagccataaaacacgctacagaaaggtttaaggctttagagcgaaaattcagggcaggccgtaaccggtcaaacaatagcgacagtaagccggaaacggagagcgcgacagatggcagatga

SEQ ID NO: 397073 - DNA, 423 bp, Salmonella enterica
atgaaagtgttaattgttgaggtaaggagcgaagaagaaattacggcgatcatgtcgcgggttgcccgtcaataccgctttgcggcaatacctcgcaccttcccccgtggaaaggtcagatggccgggggtttatgccttccctgatatcaatgcactccttcgtataatgcttgcgccgaacagactggcgattattaacgccctgacaggacagggatcaatgtcgatacgtgcgcttacaagaaaggttgagcggcattatctggctgtatatcgcgatgtgcaaaccctgttagcggcgggtgttattggccttgatgacaaaggaaaacttacttttccatacgatgaagtacgtttcaatttttctgttaccgggcaggctttagttaacacatcaccgcgcggagtaatgccttaa

SEQ ID NO: 397074 - DNA, 366 bp, Salmonella enterica
atgcagccgatggaaggcggtgattttatggcggcaggcgctattaatgcgttacgtcttcgcggcctgcgcgtgccgcaggatatttcaattatgagtattgacgcgtttaatctggcggcgatcgaagatgttccacttacggcggtgcacgtgccacgcgatgagctgggcgtggaggcggtacagatgctgcaacagcgcctgatccgcccgcatgcgcccatcggctcgttattgttgcatgggcgtctggtggtacgggagtcggtacgacgggtgcgcccaggcaaaggacacaccattgtcacaggcgaggggctgtacgacagtcaaacgtccatacctaatgcccgtttgccgtga

SEQ ID NO: 397075 - DNA, 330 bp, Salmonella enterica
atgaaggataggatcgtcgaaatactacaatacaccctgaaaaaagattctggatctgactttcatcagatcatgcatgaggtcagtgttccacttcatacccggaacggtatcgatgtggttgcgtacggaaactctctccatgatgctgacagctattacctcatacgtgcttttgacagcgaagaacaaatggaaagcgttcttgaggatttctacgcaagtgcgggatggcgcagtggcccacgagaagcaatcattagtcgaattgaactcagtttaaaatcagttctatcactaccacaaatcggtattgatggattgagataa

SEQ ID NO: 397076 - DNA, 315 bp, Salmonella enterica
atgaataataaagaaatgaaaactattaaatactcatccacaaaagctttttatgctatggcaaaacatctttatgtgacggggattcgtatatataaagaacaaggggatcatgagttagtagcatccattatattagataatgataaaacggaatcatatatttcacatgtcaaagattatttggctaaatgttttgatgaacatatggaagaagctggtaaaagagaaaggcttatctatgttgatatggataaagtaatggtggaaatgaaaagagttcatataaaagcattactgtttagtatgagctaa

SEQ ID NO: 397077 - DNA, 621 bp, Salmonella enterica
atggcaggccttattcaaaaattgattaacattcaatcatctttaaatgctccaaaaaatcaatataacagtttcggtaaatatcattacagaagctgcgaagatatcatggcagcgcttaagcccctcttaaagcaagagggtgtacttcaatacataacagatgaagttgttctaataggtaatcgattttatgtaaagtcaaccgttactctaactgatggagaatcatctatttctaatgcagcgtttgccagagaggaagaaacaaaaaaaggagcagatggctcacagataacgggatcggcatcatcttatgcaagaaaatatgcattaaacggtatgtataacatcgacgacgccaaagacgctgatactgacgagcacaaacagcagcagaatgcagtacctgctaagcaagcgaaaccagcgccctcctcccattctcctgaacaggttcttaaagaattcagtgaatatgcagcaacagaaacggacaagaaaaagctaattgagagataccagcacgactggcaattattgactggtcacgatgatgagcagacaaaatgcgttcaggtaatgaatatcagaataaatgagcttaaacaggtggcttaa

SEQ ID NO: 397078 - DNA, 459 bp, Salmonella enterica
atgagctatgcgcatcatggtatgacaaatacgaagctatacaatgtctttaaaggaatgaaaggcagaaccaggtctgctacaaaacgaagtaagtgttattgcggaataaaaatttgtgaggaatggttgaatgattcttcactttttatcaagtgggctctagagaatggttacaaagaaggaatgcagattgatcgtatagacaatcttagtggatatagtccagaaaattgtaggtttgtcactccaaaagaaaatgccaacaacagagtaaacaatatagttattactgttgatggagaggttaatactattgcatatttttctgataagtacggaattaagcatcacaccattgtcactaggctgaagcgaggatgggattcagaaagtgcggtaaagaaaccgttatctaagggggttaaaaatggcaggccttattcaaaaattgattaa

SEQ ID NO: 397079 - DNA, 474 bp, Salmonella enterica
atgatgttcaactggaaaacgatgtttgttggcctgttgctcgtctcgctaattgttgccggtcggctggcaaatcactaccgaaataacgccatcacctacaaagagcagcgcgacaccgttactcataagctgacactggcgaacgcgacaattaccgacatgcagacacgccagcgtgatgttgccaccctcgatgccagatatacaaaggaattagctgatgcgaaagctgaaaatgatgctcttgagcgtgatgttgccgatggtcgccgtcgcctgtacgtcaacgccacctgtcccgcaatgccgacaggtaaatccacctccaccgcccgcatggataatgcagccagccccagacttactgacgccgctcaacgggattatttcaccctccgagagagaatcgaaactgtaactaaccaattgaatggattgcaagagtatgtgagatcacagtgttcatattag

SEQ ID NO: 397080 - DNA, 378 bp, Salmonella enterica
atgaacaactacgcaatcgccgctttaaaggcacatcattatttagttgtgagtaagtcaatgtctcctcgcgaggcatgggctacggctgtagctgaggttacagaaagtgagtctgcaagaaagaaaggatgcccaaaaataacatttcttaccctggctgattgtggttatctgaagaacatagaagcacgacatgaggagaaaagaagaggaaaactgcaccagagagcaatccaggttgcaaatctgatattagattttcctgcaatcagcaaatccgagttggctgataaaacttgctataaagacagtcaagggtcttatgacattgttttagcacttgctcaaaaaggattacttaaacatccaaagtaa

SEQ ID NO: 397081 - DNA, 2187 bp, Salmonella enterica
atggcagcggtacttgatgagctggttctggcactggatatagaaagtaaggactttaccgccggggagcaggctgtacacgcagcgctggacagactgaccgccgcgatggagcgggtggcggatgttttcgaactgggacaaaaacagaccagcaatgccctggcgaaaacaggcagtgatgcggataaggctgcgcgtgagacggaaaccgctggtgagcgaacgggtaaggccctgaagaaaactggcgcggaagctgataaagccgcgtccggtatggagcaggcgggaaaacgaaccggggatgcgatcgtaaaaaccggcaaaaaggccgaaaaaaccgctaagggtatggagcaggcgggcaagcgtgcgtcaacgtttttttccggtatacgtacccagatactggcgctggcaggcgtcaccctgacactgggcggacttaaaagcctggttactggctttgccggtgacctcaaccagttgtccatagcgtctgatgcctttggcatgaaggcaaagcacctcgacggctggcggcgggctgctcaggcaaacgcggttaacccggaggagattactggggcgttttcgcggctgaccaatgcaaaaggtaactgggactccggaaaagccgttgatcctgtcatggctgagttgtttcagacgatggcccgtgcgggggtgaacttcgacccgtcggaaagtcctgaaaaaatcatgcgtaagctggcggagattttcccgcgactgacaaagggcgagcagatagcctacggcaatgcgctgggcttcagctatgccggacagcagtttcttgggtcgggtcatgcgcttaaagacgttgacgattttacctcacgttctcaggttactccggagcgtatcgagctggcccgcaaactgcaaagggcgctggttgagctcgatcaggtctggtccaacatcgggatgacgattggcactgtgctgatgccatatgcgctggaattcagccactggctggaaaaactcggcgactggatgcagcaacatccggaagaggtgaacaagtttattactggttttctggataaagttgagagtatcgcctcgaaggctaacgaagcagcggatgctgttggcggctggaagaatgtcatcattacgctgatcgggctgaaagtggtgtcatgggctctcggttttgtcaacgcattacaaaaattgctggcgctgaacgccggaggcttaggtacgggaggggttgtaggtaagttgggggtggcaggagctgttgcagttgccagcgaaccttatattgatgatgccctgaactctgtgttcgggaaatacgattactatcagcgcataaggactgctgactgggatcacttttttccggcgcttttcggacaaggtgatgcagggtgggtaaacggtaaatgggttgataaaagaggcagtgagcgtcccgaaatagcgcccccgacatcgggcatgacaccctggcaacaagccacgcaggacactctcaattccgctgctttttccgcgatgggtgagccagaacagcacgctcaatccgttaagcgcccgcgtccgacgaaggccggggaagccctgttaggctggctgcaaccgaaactggctcaactggaggagaaatataaccttccgcccggactactgcgcagcgttgcgatcaccgagtccggtggtaatcagtttgccgtttcccgtgccggagcgatggggctgtttcagttcatgccgcagacggctaaggaatttggtctgagggggaacgacgcctttgatcccgaaaaatccgctgatgctgccgcgagaaaactgggtggcctgatgcggttttttcatggtgatctggctaaggccctggcggcatacaactggggcgagggaaacgttcagcgtaagggactgtcggctgcgccggaggaaacccgtaattatgttccccgcgtgctggcgaacctgccgcagccgggcgcggcgatgtcagtacagtctcgtcatccggcaccagtatcgcagtccacggtaacagaaaccacgcatatagggacgctgaacgttaccacgacctcggacaacgtgaagggcattactgatgatgcgcggcaacgtatccggaactcggcgcttgtgtcggtgtattccagcggggtaacaggatga

SEQ ID NO: 397082 - DNA, 1461 bp, Salmonella enterica
atgaagcttaacgataaaccccgccaactggcagtaccctttgcgagtgccggggataaaaataatatcccggacaaggcgacgcagcagaccaaagagagcggtaacgcggcgtatgattcgggttttcctccggtgaccatgaccccgatttcagcgggaggtataccgccacacggcaaggattttaacggtctgatgcacgatattaccgcagcaatacggtatgtccaggctggcggtttgtacacgtataatgccgatttcgccggggccattggtggatatgcaaaagatgctattctcgccggagtctcaacaacagcggtctggctgaataccattgatgataacctgaccgatccagaaggtgctgacagcgcgggctgggtaaacctgctggcagatcccctgaagctgtttctgtggcaaaaaaacaatctgtcagatcttcagaataaaggaacggcacgggataatcttcaggtctacagccaggagcagacggatattaaatacctcgccaaagaccagaacggtggcgatattccggaaaagccgctgtttgtacaaaatatcggagcgctccctgcatcaggtacggctgttgcagcgaacagactggcatcacgcggcgcgcttccggcactgactggtacgataagaggcagtgatagcggcctgataatgggcgaggtttacaataacggttatccaacgccatacgggaatgttttgcgtctgaccggaaccggtgatggagagatattaatcggatggagtggggttagtggtgctcctgcgcccgcatatattcgcagccatcgggataaagccgacgctgagtggtcagaatgggcgatgctctatacctccctgaatccacctccagtacccccagatttgaatcctgtcgggtcggcgatagcgtggccgtctgacaatatccctgccggttatgccctgatgcaggggcagtccttcgataaatctgcttacccgctactggcaatagcatatccatccgccattattccggacatgcgggaatggaccatcaaggggaaacccgccagtggtcgtgctgtgctctctcgggagctggatggcaacaaatcgcactcgcacaccgcgcgggcgcaggatactgacttagggacaaaatctacctcatcctttgattatggtacgaaaagctctaatacaacgggcggtcataaccattcggcgggcggcacatacggtggtgattcaatcggtggaaaaattcgcgtccagcgtgatggcaatgaccagttaacaagctggaatggcgatcacgcacataccacatggattggcccgcatgaccatactgtatacatcggtccacacggacacgttgtgattgtggacgcggaagggaacgtcgagacaacggttaaaaacatcgcctttaactatattgtgaggttagcgtaa

SEQ ID NO: 397083 - DNA, 672 bp, Salmonella enterica
atgtgtggacgctttgcacaagcacagacccgcgaagaatacctggcatatctggccgatgaagccgagcgcgatatcgcttatgaccctgaacctataggccggtacaacgtggcgcccggtaccaaagttctgctgctcagtgaacgcgacgagcaactgcatctggatccggtgttctggggatttgcgcccggatggtgggataaaccaccgctgattaatgcacgggttgagactgcggccaccagcagaatgtttaaaccgctatggcaacatggccgagctatcgtgtttgctgatggttggtttgagtggaagaaggaaggcgacaagaaacagccatacttcatccaccgggctgacggccagccaatattcatggcggcgatcggcagcataccgttcgaacgcggtgatgatgccgaaggattcctgattgtcaccgctgcagccgataaaggtctggtagacattcacgaccgccgccctctcgttctgtcacctgaagcagcgcgggaatggatgcggcaggatattggcggaaaggaagccggagagatagcagcagacggggcagtgcaggcagataaatttatctggcacgccgtgactcgagctgttggcaatgtgaaaaatcagggaccagagatgatcgagcctgtcacttaa

SEQ ID NO: 397084 - DNA, 987 bp, Salmonella enterica
atgtgtatttttctaatagcgttgttgcctgcattccagtatggtgtcggtactgattattttagctatcagaatatatataataatgataatgtagttgacactttttatcaaaataaagaatacatattctatgcgtatgtgaaattttttcaatttttagggggggattttaaaacttttgttatctatacgtctttattgcaatcattattaatatttattatcattactcagatgtacaaaaattatggccactcgattataataatatttttccttttctggaccgtgacaaacttattacacactcagatgaatataataagggcttcgtttgctatatatatatttataatatcaatgctttttaagtttagagggaaaataattgtttgttttgtcttgatgattattgcaattggatttcatcgttcagcattattaggtttgtgttttgtattaattcctgtaaaagtatattattttgcatataatcacgtttttaagatttattttttatcttttttgttatttgttaccccatttttacatcagatagtgttctatattgttcaggagttgtttccatattacactcattatctattctcatttgatgaaaatgcagtgagtttttggaatgtggctacaaaaatatattgggttccgtttggtttgttttttatatacctaattaaatgtaatgctattcttatcaaagattgtgagcgtggtttgattggtttgtgggtattaactgggaatgtatatttgttaatgcttaattttgattttgtttctagagttaatttttattttgtgtttttttatataattcctattgcatatgtttttcgttactttatcagaaataataatgttattttattatatgttggtttgctatattgttttatcccatatttattaaaagttagtttgtttcctgtagctgaattttattataaaacttatcttttttaa

SEQ ID NO: 397085 - DNA, 537 bp, Salmonella enterica
atgtatctctgcctttgcgtgtgcggtaattcatgccacagagccgcaaatcagctgaaaaacacctcaattagtagttgcgggtgcatgacaggaaaaaacaccactcacggtcaacgcaatacccgcgtttacaggatttggagcgggatgaaaaaccgctgcacgaatccaaacaacaaagacttcgaaaaatacagtaagcgcggcatctgcgaaagatggctgacgttcgagctatttcttgaagatatggggcttcctcctacgcctaagcatcagcttgatcggatgaataatgaaggtccgtattcaaaagataactgcagatgggcaacggttaccaagcaggcggaaaacagaagtacgtcgttttattggtttgttgataggttgcgttttgaaagcgtcggatctgcagctgatcattttggcgttaaaccagcaaccatccacaaatggtgtaatggctacaacaatagagggataaacatcccgccaagagccaactgccgtaaggagaggaaatatggatag

SEQ ID NO: 397086 - DNA, 828 bp, Salmonella enterica
atgacaactccatgcctttacagcattgttaggtatgcaccctatgcggaaactgaagaattcgcgaacataggcgtggtcatatgtgcaccaaaagaaaattactttgactttcagatcactaagcgtaacgattctcgtgtcaaaaacttctttcacgatgattgcattttccctatagccaaagacaccattcagagagagttgcaattcgcaaaagcccaagcatctcagatttcagggcaccaacaacttgctcaattctttagatatttcacgaccaagaaagaatctatttttcagttcagcacgacaagggttgttctcagtgccaacccaaaggaagatttagcacgcatttataataaatatgttaatcactccgattacacaaaagaacgccgagaggatgtgcttgcaagagaactcaaacggagtattgacagaattgatggtttaaaaaatgtctttaagcaagagtctatcgacgggttttattcaaaattctccatgcctttggttgccaaaaagcacaatgagattcaatgcgcgataaagcctatagcattcacccaaaccgagcctggaaaaatgatggaacacagcgacatatgggtcatgcggattactcgagcttcagaagaaaacctactggatatagaagacattcttttcaccattgaagttcctgaatcccctactaagggccaaagcaaggttatcgataccatcaagagaacaatggatgctaagaagataaatcatattcctgcatcaaatcataaagatacgattgagtttgccaaaaaattacttttagagacatga

SEQ ID NO: 397087 - DNA, 750 bp, Salmonella enterica
atggagcgcgaagcaggcaacgatgatgcaattcccaatgttgttgaagtaattcgtcgcattaatgaagggtctacacaaccatttctttgcaagtgcgatgatggtcagttatatgttttgaaatcaaaaccatctatgcctcctaaaaatctcttggctgagtttatttctggttgcctggctcaggatatcggccttactttacctgattttaaaattgtatttgtgccggaagaacttgttgagtattcaccagaactccagagtaacatttgtactggtcacgcctttgcgtcacagtacattgaaggtgcggtagcactgacgttctctcagtcaagaaacgaggccatcgtacctatagaacaacagaaactcatctatgtgtttgacagatgggtaataaatgcagatagaacgcttaccagtaaaggtgggaacgttaatatcctttatgacgttggcaacgataagtattatctaattgaccataatctctcctttgatgaaaatgcaggaccagacgattttttggtccatgtttacggtcctggtaatcgcaagtgggagtttgacctggtagatcgcctcgagtatcgtcagaaggtcgttgatagcttagttaagcttcctgctattattgaagaaataccagatgagtggatcgttgatgatgagtttttaccttttgtttacgatactttagacaaaggcgaccgtgacgaattttggagcgaaatagtatga

SEQ ID NO: 397088 - DNA, 858 bp, Salmonella enterica
atgaccacttcaattacacttgttactgcttattttgatataggcagaagtcaatggacatcgcaaaatgggtttgctccacgcattgagcgaactactgatgaatatatgacctggttttccaatcttgctcaacttgaaaatgatatggttatttttacttcacctgacctcaagtccagaattgaggaaatccggagaggaaaaccaacaacaattgttacattagatttcaataaaaaatttcatcatatcaggtgtcggatcgctgctatacagtcagatgtagcgtttaagcgcagaacgcccgtagagcagcaggggaatccagagtatctgtcggctgattacgttttactctgtaatctgaaaacgtactttgtgaatcaggctatccgtcaggagttgatcaaagacgatatggctgcctggattgattttggatattgtagagattctgataccacgaatggaataaaaaagtggtcctggcccttcaataaggaaaagatgcatctttttacgatcagaagggggcttaaacttgaaacactggagtcagtattcaactgtatgtcaggtaaccatgtgtatatcatcggtggcgttctggtcggaacgctggaaaagtggcaagaattttaccgactggtatggcattgccaaaagaaggtgttgagagagaatattgtggatgatgatcaggggatatttctgatgtgttattattacagacctgacatgataaagctaaactacctgggtaaaaacaggtggtttgacttattcaggtgcaaaggggaaaaaactattcgcactttttctcacaagatgaaaatattatgtttgcgcagatga

SEQ ID NO: 397089 - DNA, 585 bp, Salmonella enterica
atgtttaattacacacttgcgttaatattcgttatttttggtagaaatgataaacttttatattattggaaacatgaaataataagaagggataaattttcgattaaaagacttttacgtgagaagagtaacaacagaggtagaaattttttattctggtggagacttgctaacgaaatgtatattaacggtgggaagccgtttaaaaaagccgcaaaaaaaatcaacatacgacttctagagaaatttggatgtgaaattagcctaggggtacaaataggaaagggaataaaaatcccacatcatacaggtattgtaatccatcactcagtaaaaattggggacaactttgttattcgtcaaaacactacaataggtaagaaagacggcgatcctaaatctgcaatattaattatcggtgataatgtcgacataggtgcgaatacatgtattgtaggtctcactcataaaattggaaacaatgtaaaaattggaggaatgtcttttataaataatgacattccggacaactgcacttatgttacaaaaaaagaagcaagaattataaataatacaaaacagtaa

SEQ ID NO: 397090 - DNA, 270 bp, Salmonella enterica
atgcgactgatcaaagactacacgccgcctactccggaagatctgaaccagctaaaagagacgctgggttataccggcgcacagatggcagaccttgctggcgtggcaagtaacagccagtggcgtaaatacaccggtggtgagtccccccgagcaatgtcgcctcacatcctgttttttatggctgctcaactaactttgagcgaagatgatataaataaaatcatagataaaatgattgaaattggtgctgaactcaaagatcagtaa

SEQ ID NO: 397091 - DNA, 321 bp, Salmonella enterica
atgaaaaagctcacaattccactttatttcacactggctgttttttcatcgtatacctgtgccgttactccggataacagagccgacgtcatacgaaaaaatgcacagactgtcgccccactccagccttctgttgatataaaaagtaagccttactctcttgagctgggtaataatgacatgatcgtcatcccggcaggcaggacattgacaatgccgcagaatgaagcactaaacatcatcgctcacatggtaaattacaacgatatccaggagtcccgaagaataaaatccgatggtgacacatttactctggaataa

SEQ ID NO: 397092 - DNA, 573 bp, Salmonella enterica
atggaagcctgtgcttctgcccattttggggccggcaaactaatgtcgatgggacataacgtcaaactgatggcccctccgttcgtcaagccatatgtcaaaaccaataagcattatgcttcagacgcagaggctatttgcgaagccgtcacacgacccaaaatgcggttcgtgccagtcaggccccctgagcagcaagccgtattggcacttcaccggagtcgtcagagtttcatccagcaacggaccgctcaggcgaatcaaattcgggggctattggctgaatttggcatcgtcgtgtcctgggggatccagcagctacaactacagttacctgagctcgtggaagatgctgataactcgttgtcatctctgttccgtgtacagctgagtctgttacagcaccatatggcatatctgttcgatgtcatcgctacgctcgacaagcagattgagcagtgctgccgcgcaaaatgcgctatgtcagcgtatcagcaagatcccaggcactggcccggttaccgcaccgcactcattgcgactaattggcaacgccagcaattgcgaaaatag

SEQ ID NO: 397093 - DNA, 210 bp, Salmonella enterica
atggaatggtcgccccctacaatcttgtgccacagtgggacgataaatcgtcactacttgagcggagcggtcatcatgaacgttaagactaccggcatcaatttggcaaaagaggttttcctggttcacggaattgacgaacacgtcaagcggttgttcaacaagcaactcaaacgagcaaaaatgctgccaacattcctccatgtttga

SEQ ID NO: 397094 - DNA, 567 bp, Salmonella enterica
atgaaaaaacatactctcccgctttgtgggttagctatttcattagggctgatgtcatcagccatggcagcaccgacgtcaggctcacagactattaaaggcacactttctgcgccaacgtgtactatttcaatgcccacagaatataaagttccggatgtaactgttaacgaaattgtgacgcattctaagcttagcaggttttttgcaaataatattggaggcattaatattaaaaactgcagtaacgttactgcatcagcaattaactctgcgggtcaaaatacttctgctttggggaatggaaggtttctttatgcaagcaacgtaaatggaatttacttttccaaagaaccattagcatatcaattagagcgtgtgcctaattcacaaatatctgatggtaggatcggtaatctttttaatatgaatggctcaaataaagttagcataaaagatggtgataattttttgtttaaattgatcagaggaatagctgatgatgttagtaaagagtacatcggtggttactcaactgatttaacatttacgttcaattacagctaa

SEQ ID NO: 397095 - DNA, 561 bp, Salmonella enterica
atgaataagttaaatgttttatttggtacaattgctgttctgctggcaggttctggtgtggcaaatgccgcaggtcctgctactgctgagctgcatcttcatgggtctattatatctgacacctgtacttttgtgttcccaacgaccgcacctgctttaaatgtgagtggtgaagattattcagctactaatgttaatgggcaaattggaagtgaggttagcctggggaatattaccgtttccggttgtaacacgaagacagttacccttcaggctatgtcagatgcacaaatcgcagggaatgctgaaaaaggaaaattctcttatacgaataaacctgctgacgcaaaggatccgcttgcattttcgattggctacggtagttcggggaacgcgttcctgaaactggataattcatccccggtttctttcaacgtcgattctgacagccttgatattccgcttaatattagcgttctgaagcaggactctgtggataatattgcagcatactcaggtgatttttctgcgacagtaacctacaccgcagatttcagttaa

SEQ ID NO: 397096 - DNA, 735 bp, Salmonella enterica
atgcgttttattatcggggctttattttctgttttctcatttttatcttatgcggcgaatgatggaggcgtttctctgggagcaacccgggtggtgtttccttcagataaaaacagtgtcgtgctggcagtgaataactcatcatcatctgcaacatggttgttacgggcctggatcagcgaatacggtcatgacgttcagtcatcaaaaaaagatgagccatttgtcattactccaccattatatcgcctggaggcgtccaataaaatacagctgcgcatcaataaaactcagacagataaattgcccaccgatcgtgagtctgttttctatattaatgtattagccattccgcctgaaacaaaaattcagggagaaggaaaggccgaatcgatgggcggacatgttcagtttgccattaacaaccggataaagcttttataccgccctcaggatattaatgaccaggatgaaataaaaaaagcactccggtctctgaaaataacccgtcagggggagaaaatatctgtggataataaaagcccttattactttacgctggcaaacataaaagttaatggccacgacctgccggacagcgtgatgaatagtactgactttatggttccgcctttcgggtatatggcgtttccggcaccaggtgcccgggatatgacctgggatacgattaatgattatggagcctttgtgaaaggtgacacgctacatttttaa

SEQ ID NO: 397097 - DNA, 2571 bp, Salmonella enterica
gtgaaaagaatcaaacaaagattattattgtcttcgggttattgttttgctctcagtatactggcgaccagtattgctcatgcaaccactcagcctgaaaaaaaaaacatgtcacagcccacaggcgatgacaccgccatgaaattcaatcccggttttttggggctgtcagacggaaagagcgcagaagagattaatctgtcctggtttgagcatgaaggtggaatgcagccgggtcagtaccgagtggatgtcatgctgaatggtgaatacgttgatacagatgtctttacctttaaatcttcggcatctcatccggggcgtttatatgcctgcgttactgaggagcgctattcccagtggggaatagcgcagcctgacacagtgacggtgtcgccttccggaaaggaaggagaaacatgtggagagggaattaccggatttattccgggagccacggagcggctcaatttcagcgaaaaccagctggtgttgtctgtgccccaggcttacctttcacctccgggctggctgaacacaccttcccgcctgtggaatgaaggcgttccagccgccatggtgaactacaccgtttcaggctccagccaggagaacggcgggcagacatatgacagccagtacctgtcacttaacgcagggctaagcctgaaaggatggcgactgcggcaggacagtaactggaatcgcagtaaggggcgttccggtcactggcaggcgcttaatacatggctttcacatgactatgcctggggtcagggcggacaattgaccctggggcagacgtccactgatggcagcatttttgacagtttcccatttgagggactgtcactttcttctgatgacggcatgattcagcctctcctggccagttattcccccgtattcagtggggtggcttattctcaggcacaagttactgtccgacagaacggggcggtgatttaccagaaaaacgttccgccaggaccatttgagttacgtgatgtgcctcagttgtattcgggcgatgtggttctggaagtccgcgaagcagacggaacgatacacagaaccctccagactgcggccagcgttccggtacttcagcgagaggggcggctgcgttacagcctggtggccggacgttatcgtcaacaggacaacgcatccggaactccgtccccgaatctgattcagggaacaatggcatgggggttaccgggagacaccacgatttatggagggagtctggtggcaggtaactatcaggcgggtctgattggtgtggggcgctattttgaatcactgggcgctttatcactggatgcgtctcatgcccgttcggtgttttcttcccgttccggccttccgggtgttcagcaggggcagtcgtaccggatggagtatgcccgcagtttcagtgaaacaaacacctctttcagcctgacaggatatcgttacgccacccggggtttttactcctttaatgatcttcagcagatgcagtcaggccggaatgacagtcagtatcaccagcgctcccgtctgacgacaacaataacacaggattttggtccggtggggcagttcagcctgtccggcagccaggacagttactggaataacgacagtaatggttataactggatggcatcatggagtcgctcatttccatgggtatccgcttcactgtcggtgggttataaccgggcaccacaatataatcaagccgacaagagcgtctttatgagcctgtcggtaccgctgggggcctggatgaaacagcagaatatttctctgcaaagttcgacttcggtacataactcacaggttcaacagcaggtgggagtaaatggctcgctggctgataaccggctgagctatagcgtacaacagggctggcagaaccagcgacagggtaccagcggcggcgtgggtgtgaactggcagggggcatccggtctgtacagcagtgcctacagctggcagcgggacggacatcagtggctgtacggcgtcagtggcgggattacactgcatcagcatggtctgacactgtcccagcctctgtccctgaatggtggtaatgccctgattgaggctccgggagctggtaatgttcgcctgctgtcgggtacgggacagtccactgactggcgcgggtatggggtggtgccggggctgtcaccgtacaacaaaaataccgttggcctggatatcagtcagttaccggaggatgctgaggcacttaccacaaataaaacgctaataccaacccggggggctctggtggctgtgccatttcatatccggacgggtgcgaaagcactggttaccctgagctataacggaaagccggtaccatttggcagcatggtggcggtggaagggacgtccggcggcgagtcagtaaccgggatagtggcggatgaggggcaagtttatatgagcggtctgccggagcagggaacacttaaagtgaactggggaagtgaaatgtgctctgcgcaatatacactgccatcaggtgatggagtgctggggagagttagtgcggtatgtcattaa

SEQ ID NO: 397098 - DNA, 939 bp, Salmonella enterica
atgagcgggttcgtaatacgcatggggtaccttcttctggcaggcatggtttccatactgtatatcggtcaggtacaggctgagccggaaaatacaggaatgataaagaccggcgctacggtgagggtggagctgggtgaccttgagcgacagttgagtgtacctgaaggtacagtgtacggagggaaacagctacaactctccccgacctgccctacctgtacggtgaaatggacaagttcggcgaaagagctgaccggtgctgattcgacgacgctggggagtaagccttatcttttcgccagtgggatacagggcgtggcactgtccgtcacaccaacagaggatggccatctgaatgtggggttgatgaacagtcagcaggtgaaagagggacctgttgccggggcgatagcgttacccggcctctcccgtcaggaaacagacccgacaaatgatattacggtctcttaccccgttgtactgggaggacatcttattgccccagcctgtgaaatggattcaggacaggatctggacttcagtctgtctccggtaacaaaatccgcgctcctgtcggtaagtccgggagagccgttacagacattcagcgccagcgcttccctttccctgcgctgcgcgatgaatgttgacctgacgatgaagtttcaggggacgcacccggaggggtttcagggggtgctgcaggcaatatcagacagcaaccagtctgccgacagtggtgtgggatttattgttaaggcgacggagagtgggaaagccgctacctgggataataccaccgcactctccgtgcatgtcattcctcagtcagggaatgtttcggtgccgtttacagcaatgtatacccgtacaggcggcgacatcattccggggaaggtgaacgctgtcggtacaattagtgtcacccttccctga

SEQ ID NO: 397099 - DNA, 327 bp, Salmonella enterica
atgaaagaaggtatttatactgtggcgtttgagagtagccggcagtcggtgggggaaggcctggtggtggtgagcaatggtcgggtacacggcggggatattgcctgcaccatccggggaataatgaatcgaccggtgatggagctggaagtgcattattacaaccgggagatcccgtcggtactgggaatggaggaggactactggcttgagataagttacagcgaagccggggaagggcgctacgatttcagcggtcacgtgaaaggacatcctgaacgaacgctgagggcatatgcgatattccttacgcctttgttgaaataa

SEQ ID NO: 397100 - DNA, 294 bp, Salmonella enterica
atgacgttcgagagttttgtcccggcgtttaacacctggtttgcacagggtgggggcgctgctggtctggtggggattcgggccgatgagtcgctaaacagttttctcgccatcagttcgcggtgtaagctgcggctgtcgctgaggtccacccgacagccggacggagactgctggagcgtgtatccgctgtacgactggcatgtcacggatatctgccgttttcatgctgtgagcagcctgccatataacccggtatatgacctgatgtttcggacggtggcagcctggtga

SEQ ID NO: 397101 - DNA, 258 bp, Salmonella enterica
gtgagcaggtatccttcggcaggtagccgtaaaatttcgctggggacgaatgtactgacggcggcctggcagcatattgccgatatcttcgaccagtttgagcgtatctgtctgtcgtcttccggcggtaaggattcgacggtgatgctgcacctggtggcagaggaagcatgtaaacgaaagcgtaatttcagcattctgtttatcgactgggagatgcagtacaacgctaccctcgtccatgcgggagcagtatag

SEQ ID NO: 397102 - DNA, 756 bp, Salmonella enterica
atgaatgaatccctgattattttcagtcgggagtgggctgtgacggcggctctgacgactctgctggcaccggaatactcccgaaaggccacgacgatttacgatctggggcatctcacgcgtgcactacaggaacagccgcactctcctgtggtgctgggcctgcgcccgcatgagcatgtggccgacctgtaccggctgaagtcgctgctgaccggccgggttgtactgtttgtggggcgctgtttttactggacggactacagcctgccggattactttggactgacccgttatggattctgttcgtgggatgcaatgcaggatccgttttcccggcggatggagatgcggcgtttcagacagctttctgctgctatacagaagaatgaaagtccgggggataaagcctggtggccggtttctgcggtattgcccacaactgagatgcagatactggaaagggcgaaccgctggctgtaccgggaactgtcagtctgtggtctgaccgggtatgaagttcgtgtgctgtggctgatgaccgacggacgtaccggagacctgccgtcccggacgcggagcctgcataaaaataacgggttgtacaggctcggtatgacaaaacacgtgatgaacctctaccggggtgtgaaggtgcgtcctgcactgcaggccaggctgccactgcaggctgaagagagcggcacagccggtacagcgaatatcctccggttcaggcgagaggcgggccggtga

SEQ ID NO: 397103 - DNA, 531 bp, Salmonella enterica
atgacagggaaactgcacgacggcgataagcgggtcgtacccggtgaggatgagggcaccggaaataaaaagaaagtcctgaagaaagtgacacaaagtaatcatgatggatatattgttccaccctgtatggcaccatgggcggacgagccgctgtatatggtggtggcccgctggggccagatacaaaagcggtggataaactgtaatgacattgcggaggtttttcatatacctgaccgacgggcctcatttcagctgtcctatatttcacgcaaaaaagagcgggtagcctgccggacgcgctacgtaccggcagagggcagcgggcgacaacgggtggagatttttatcgactatatcctgccgccccgacaggaaaaacaggcgcacggcccactccgcaggcgtaacgtaccggctaagcaggccggtcccacgttgggcagggtgggcagcggcatggccggcaataccggattatgggaaaagctgcttaagggatgccgggagggacgtgacgatgaatga

SEQ ID NO: 397104 - DNA, 174 bp, Salmonella enterica
atgtcagaaagtcagtttattcaggaagtcaggcaccgggccagcctgctgaccggaagttttaacccggacagggccatcaggtggggccgacagggcggcaatcttcagtggataaaccagttgcaggccgggacccgtcaatacctgtcgggcaactgtacgccacagtag

SEQ ID NO: 397105 - DNA, 480 bp, Salmonella enterica
atgaagcatttatcctcactccgtcccggtgattttgatgacaacggtctgctgaaggctccggtgcttttttggggcgggctggttcttctggcgcgggcctggtggctggcagggctaatggccatgatggcacctgtgggctatatgcatgccggtgttctctggccggatatccggtttcagcttgtctcactggccttcggtattcccgggatggtgatgctgtttatttacccgctgcgggaacggtggcctggtcttttccgggccgtctatgtactgatactggctgccctggttttgatggtggtgacagacctgacggggctgatatctgcggaaatgtgggatgcgggatgggggtttttatttctggacacggtctgtacggtgatgctgtggccggaccgtcgtcagcgggctgttttttcagtacaggccggcaatggccttccggtagcaaagcgcggagagtaa

SEQ ID NO: 397106 - DNA, 2022 bp, Salmonella enterica
atgacttcccggatttcagaggtcgaaaatacggccaccgatgttcgcgacctggttgagtttatcggcgttcccgtcggtcaccctgctcagccggatatgtttaatctggagcagtttgagtatctggtgacacaacctgacagcgagcctgccgccaggatgctgctgcttctgctgacacaactcgacagtcactatgggcagtgggggccacagttttcagcatatgcgccgggggtgccccccgaagggctgaatcctgttctgtgtacccggattgccggggcggtgacctcgcttttttcccgcccggactttacggtcagcgatgatggatacgtgcggctgatgagcctgcaccgctggctggcgctgatttttgccgtcagcagctatggtcatgccgaccatattatccgcaatatcaatgcagcgggcggtggggtggtcgaaccgttgacgctgaacgcccacaacctgcgtctgttctgcctgtgctacttcccggattcgcagattgccctgcagccggacgcgctgtggcagtacgaccgccggacggtggcccggctgttcctggtgcttatcagcgggcgggctttaccgacatccgccgcgcacggcaagcgggaacaactgctggcctggttaccggaccggcttgcagagctggattcgctggattttctgccaaccgcggtgctgcacgatgtgtacatgcactgctcctatgcagacctggcggaaaagcaccggataaagcgcagcctgaacgaccttatccgtcgctcgctgttggccggtgattttgccgatatcgcggtggagggtaaccgggggcagacgaccacggacaacccggcgatccagggaccgcccaaaaaaccggtcatgctggttgtgcttgagtggtttacctgtcagcacagcgtgtaccggactcactcccgggcgctggcctccctgcgcgagcgcttcactgtacatgccgtggggctgaatacggcagtggatgcggccggacgagaggtctttgacgtctttcacggggtgagtgccgcatctgccctacaggaggcgtatgccattgccagagagctgcgtcctgacctggttttgtacgccgggataggtatgtttcccttcacgatttacctgagcaacctgcgcctggcacccctgcaactggtcggtcttggtcacggggcctcgacgttctgcgaacagatgaacggctttgtgattgaggaggacctggtcggggacgagcgttgcttcagcgaaacggttatccgggtgcccgccgatgcgatgccgtttgtacccccggcagatgtccactgcgtgccggtcacgcgcacgccgttccttacccgccagcaggcgcagtggcgtgaaccgctacctgttcgggtggcggtgtgtgcctccatcatgaagattaacccgaactttctggcgacgctggcggaaatacagcgtcgcagccgggtggtcgtacagttctgcttctatatggggtttgcgcaggggctgacgctggattatctgcgggaggctattcgtgccgtgctgccgggggcagaggtgaacgcccatatgccggtgcaggcgtaccaggttgccctgaacagctgcgagctgtttgtcagcccgtttccctacgggaacatgaacggcgtggtggatgcggtgcgtatggggctgccgggcgtgtgcctgaccggaccggaggtgcacagccatattgatgaggggctgttccgccgtctgggattgccggaagaactgattgcgacaggggatgagtcgtacatccgggccacgctgcgtctggtggaagaacatgactggcgcgagatgctgcagcatcagcttctggacaacgacgtggagcaggtactgtttcaggggcatccggaaaagtttgccgtagcaatcagcgatgtgtggcagcaggtccggccctttgtggctgcttctggtccggagcggaaaagccggaggaagacatcatga

SEQ ID NO: 397107 - DNA, 6204 bp, Salmonella enterica
atgaacaaaatatacaggctcaaattcgacaagcgccgtaatgaactggtggtggtcagtgaaattacggcgggcatgggcaaggaaaaaagcaccggtcatattgcagacctgtcggcactttccccgttcagaaaacttctggggacgttaacccctcttgcactcctgaccggacttattatcagcctgtttcccgggatggcactggcaaatccggacctgccgaccggcgggcagattgtgggcggccaggggagcatcagcacgtccggcaaccagatgaccatccatcagcagacgcagaacatggccaccagctggcacagttttgacgttggccagaacaacaccgtgcagttcgtgcagcccgacagcagttcggtggcgctgaaccgggtaacgggggccagcgggtcacagattatgggaaccctgaaggccaacggccaggtgtttatcctcaacccgaacggggtgctgttcgggaaagacgcgcgggtgaacgtggcgggcctggtggcctccacaaagaacctcagcaccgcggattttatgaaggggcagtacacgctgggcggcagcggtaatccgggcgcacaggtagtaaaccagggcagcctgacgacgtcgaaaggcggctacatcgtgctggccggggagcgggtcagcaacagcggtaccgtcaccacgccgggcggaaaaacggtgctggcggccgggaaaacggtcaccctgcagctggataacggcgggctggcgtcggtatcggtgaacggcagcgtggtgaatgccctggtggagaaccgggggctgatatcggccaccaacgggcaggtgtacctgacggcgaagggtcaggacatgctgttgaacacggtggtgaacaacagcggcaccattgaggcgaaagggctggcgagtcggggcggggagattgtgctgagcggcggcgacagcggagtggtaagtcagttcggtcagttgctggcagacggcctgaccgggcagggcggcaaaatcaccctggaagggcagaatatccacctggcagacagcagtctgacctcggcgagcggtaaaaccggcggcggagaggtgtacgtgggcggcggctggcaggggcaggacgagcgcatcaaaaatgcctcgaaggtggtgatggacaaatcggccacggttgatgtgtccgccacggatgcgggcaacggcgggaccgccgtgctgtggtctgacgactacacgaacttcagggggagggtcctcgcgaaaggcggcgcacagtccggcaacggtgggcgggtggaaacgtcgtctcatcgcaatcttcaggcatctggtgaggtggatgcgtcagcacgcgccgggcacggcggcgagtggctgctggacccgacggatgtgaccattgtggggacgggggctgattcgaatatcgactccaccacaagtgcaggcattttcaccccgacggccggcggggcgaaaatcctcaataccagtattcagaaccagctgaacgccgggacaaacgtcaccgtcaaaaccagcggggcggatacggacggacagtcaggcaacatcacggttaatgcgaatatcctcaaaaacgccgggccggacgcaacgctgaccctgctggcggataacaatattgtgacagctaaccgcatcagtatgggggccacgggcggaaaactgaacctgaatctgctggcgggtaacacgacagacaacgccgccattcagcttggtacattcatcaatatctcgctcaacgggggcgattttctggcggggcctgcgaataccgctaacaatgtctcgttgaattacagcaacaatggccagattcatggcggtaatgtcaccctgaacgtatccggggggcttaatggatatgcctataaagttcaggcagataatgatctgacgatcaacggtccggtccgggggcgtacgggctggggcgttccgcttaacttcactgccggcggcgtaatcacgatggtgtctccggggagtatcgatctgcaggctgcggaaaccagcaatagtgggggaagcgtggttatcagcggagacaaaggtgtgagccttcaaagtaccggtgtcctgactctggctgctgcgaacgccacgaccaacagaatcagcattatcagtcgtcagggcgatgtgtccgtgaacagtggaggcgcgctggatctgagacagggaaatatatccggtgcaaacgtcattttgtccggtactgcatcgggtggtggagcagggattaatattaataatctgcagattagtgccaccacggcagcgaatctgtcgggtaaggcggattcagggaataatggactcacttttaataacctgacagtcaacagctgcgggacggtggatatctccgggaccagtaactgggggaatgccactcaggtaaactggctgaacgtaacctctgcaggtgatgttaacatcagcggtcaggctcctggtcgggcctgggcgttgggcctggatatcaataacagcaatatcaactccaccggggggaatgtcaccctgaccgggttatctaactcagaccccaataataagtctgccggaaacgggctgaacattaaaaatagtaacatcacggttaataacacgaccggacgtattgtcctgcacggcagttcgtcggataaaacaggtttgtgggtaaataacagcaatctgtcaggaaattctctgtcggcactgggggggtcaacaaagacgggactgggatttgcctttgatggcagtcatttactggggggactctcagatcttgctaatgtgacgttcagttctgcaggatcagcaacaggggtgagaaataaactcgatgccagtctgatccctgacaacatcagtcgcgataacctgctggcgaagcatattgaaaatataacgtccattgatatgaacgggacggcgatttttgatgaccttacgaagggcttggtgatggatgcgaccagtgcatcaacgccgaatggcggctggatattggataacacgtcactgaacgccgggggggatgtcatcctgaagggatttggctttacgaactcctcgctcaacatcaccggcggaggtctggatattgataatccgggcttaacatctcttacgggaacatcagtcacggctgatggtgaggtaaaaattcacgcaggttcggggaatataaacctgacaaacggaaatctttcgacgaagggagatattgtgctgacagcggacactggaacgataactctgtcaggagcaaacgcgttgctaaattctagctcaggaaatatatcaatggtgtctggaaattcgatttatattactaatggggctcatgttcaggctgccggggaactctcggtttttgtgaacaacaaatacaatatcaataatgcaagactatttaatgttataaatgcaggtttatcaggaagtaatttgaacatttctgtcaatggaaatgtatctccatactattcccttttgtttttatcaaattcgtcattctgtgggggagatatactgattaatgctactggaaacgggaggggggctgaaatttattatctaaataaatttaaagggaatttaactctcagcacaaattctactagcacttatactggggacgctcctgcatctatctttcttggtggtggtagtcgaatcgaagtggacggtaacgccgatatatcatcacatgtgaatgggcaagggggaaaaggagccgctctctctcttaccggaggcattaatgttagtggtgaccttgcgttgactggcatgtccggagatgatggcgttggcgttatttctgttcagtcgaataaagaaataaaggctgaagggaatataactatttcagggggatcaaatggtggtgttggcgtcctgataacaaaaggaaaaattaaaggcgataatgttgtcgttaaaggtacgtcaacaacaggttcgggagtgtacatatctgatggtgtggcattaaataatgcagaaatcaatggtggttcagacagcggtatcggagttctggttgccggtaatgcgtcactcaatactgcgttcgtaaacggtacatcagccagtggtaccggcacaaatatcaatggttgcctgacagtcagcgggacttctgacattaaagggacttcaacgtcgggaaccgggttgaatattgataaaacggtgacggtagcggaagcagacagggataatatcactttcaccggcacatccactgataaggcaggagtgatactgggtggttcgatgaatggtggttcggtcatcggtacttcgatatcagtagacgggattgtactggcggataacgctgtagtgacagatgcttccctgaaaggctcatcaacaaacggcagcggcgtttcagttaccggcaatatatccctggacgacaccactgcagccggtctgaacgccacttctgccagcggtgccggtttgtcacttgagaactatgcgaatgtcagcgtcgtcaatataacgacggtcacgcaggagaagcatgacgcggacggtaatcctgttatcggtgctgacggtaagccggtcatggagatagtgaccacgacgaagccggtcaccacgccggtaatccttacggggacctcacaaaatggcagcggggtaattacctccggtaacgtcagtatcagcggagtgatcctgaatggctcggccaccacggcggaaggtatcggtgcgacactgggcggcaacctgaccatttccgacaacatctcgggcgtaaccgttaatgcaaccggaaacggtacggcgctggttgtggataatgtaaccatcaatgcgaatggctacaccgaaaccgggaaagactttgtcattaacgcttccaccagtgacagcgacggtacggcgattaaaacacagggtaacaaccagttgggtgatgtcacactgaacgccacggccagtaatggaggcacggcggtagaactgggtggtcaggtatcaggtggtcaaatcacaggcaccgctgacagcggtcagtcagtggtggtgtcagatgggacaaatctcgacagcacggacgttaaggggcattccggcagcggtaccggtctgaatgtcagtggtaacgtctcgctgagcaatgcagtcctgaccggcactacagagacgggaaccggctctgtagtcagcggtgccgttactgcagatgaacattctgaggtcaacggtgtggccacggcagacggcgggaccggggtcagtgtgggcggtatgttgacaggtggcagcgtcactggctcatccacaacgggtgacggagtggtggtgtcgcatgaggcaaatctcgacagttcggatgttaaggggcattccgccagcggtaccggtctgaacgtcaatggtaacgtctcgctgagcaatgcagtcctgaccggcactacagagacgggaaccggctctgtagtcagcggtgcggttgatgcagatgagcattctgagatcaacggtgtggccacggcagacggcggaaccggggtcagcgtgggcggtgtgttaaacggcggcagcgtcaatggttcgtccaccacgggtgatgcagtacatgtcactgacggctcgcagattaacggggcagacatccagggaacttcacaggatggttccgcgatcagaactgaaggtcaggtcagcgtcagcaactcgcagttaagcgggcattcagtaaatggcgcggatcttgaggtatccggcacgttgtcacacgatgtggatacgaagattgatgctgagaccgttgtgggtcatgaaaatattcaggaggtgaaaccggacacgccactacctccggaggaagagggcggcagcgataaacctgcagaggataatccttcagcgccgtctgaggcagataatgatgagtcattcagcaagctggctgaaataaacagcctccgtcagggtgcggtaaacgcgcaggtgacacacatgaaccagcctgaacaggacggtttccactctgctgccacgccgccagtatcggtggacggttacagaccagctgcgcagacggtggatataaggctgtgcgacgggaatgcctgccagttggtggtacttgatgccgccaaaccgacggatgaaaaatcggcgttatccgacagataa

SEQ ID NO: 397108 - DNA, 756 bp, Salmonella enterica
gtggatgtgcgtctggacggagggcagcagttcctgacggataattatccggaggtgcttgccactgagtcaggcagttcacgtggtcgcaagacagtcagtctgggcactttatccgtcagtggctctgttgcaggccttccgggcggactgaccgggtttggtgtcagtggttctgccggtaatgttgatttgcgcagcgacatttcccgcagtttctcgcagcaggcgggttcgggtggtcagtttgcccgtctgaactggcaactgaatcatgaccagcaggtgtggggaccattctcggtgtatgccggcattaaggggcaactggcagatggcaatctggatgcgtcacagaaattcctgatgggcgggccttctgcagtacgtgcttatgatatcggagatggttccgttgaccatggtgtggtcggtacggcggaggtccgtagccgctggggtattccggtgcagggctggctggggaatggcccgcaactgaccgttgccaccttctatgaccagggccggggtcagcagtaccgtaataaccgtggcgctgacggcaggcctcttgcttccggtaacaatcacaacagccttaatcttgccggtgccgggctttacgccactgtggcggatgcgggcagctatgccctgacgctgacctgggctcatcgtaccggcaatgctgacccgaatgcggtgcatagcgaccatgaccgtttctgggtgtcggcggtgaaaaccttctga

SEQ ID NO: 397109 - DNA, 405 bp, Salmonella enterica
atgtacagcccgttaacgggcgtgaaccagctttatcacactgactgcggcttcagtgaccgcgaggggatttattatgcacgctatatggatgactttctcattcttacgcagatacgctggcagttacgccggtgtattgcacagcttaacgattcgctggatgtcagtggctttgagcagcatccggacaaaattttcactggacgtattacgcggggggggggctggtctgaaccgggggccgccagtctggcaccccggtcactaaggctccatcgtgagcggtgtctgcggctttatgagcaggcctgtcgtcagggattaacatatgaagaatccatgacacgggtgcatgactaccgtaaacgctggcttatacatgcgggaaagttactgccgtaa

SEQ ID NO: 397110 - DNA, 486 bp, Salmonella enterica
atgaccacgaccaccaaatgcctactcgctggtatgacactcactatttgcgggagtgccctcgctacagtgacgccagcgaatactactaactcaccgaacgcgctaatcggtgataccgcgcacagcgtcacggtaaccgttgcttctccttcggtccccctgacgttcgtcgacggagtgatcaacagctcggctaccgccggacaaacattaaatagcggagacataatcacatactcttcgttcgcgaccgtggatggacataaatacacactggcaacagaaagcggcgatgcgactacggatcaagttaaattcagcttcagcgactccgccacaagcctcaaaggcgcgaactacaaatggctgacatccgcgagtggggcgggggacgcatacgttctaatcagcaaagatacctccggtaaactaaatgctggcctgcataactacaccttcgtcgtaagcgactacgcctcgtaa

SEQ ID NO: 397111 - DNA, 369 bp, Salmonella enterica
atgatcagactcattgaaatctactcgcggctaaacgaccttgataacgattttacaatgatgctcaaacatccggatacccttcgcgcaagaaacatcatcgaacgtataaccgcgctggtggagtatgttgatcacgtatacacagtgatgtggagacagcaggaacgggacaccctgtcagtatttgatgcacgcttcaccctgcccgtagtttctgaaatatggctgcaggtaaaacaagagctaaacgtaaacagcaggtcgctatgtgagttagccggtagtattacggggctaatcagcctgatcagtttttatctttcccgcatcgagggcagcggcgataaaaacagggtgctacattga

SEQ ID NO: 397112 - DNA, 1119 bp, Salmonella enterica
gtggcggaaaaaaaatctcagggcgtcaaatggctcccattcattcttattctggtgatcgccgccggactgtggcagctaacgcccccttccgggttaagcgcgccggcctggcattccgcgattatttttgtcgcgacgatcgcctcaattgtggcgaaagtgctgcctattggcgcggtcggtattatcggcatcaccgtctttgcgctcgcctatgccgccggcgataaaacggccagcggcgcgattaccacggcattgagcgagctgaacagttcactgatctggcttatcgtcgtggcatttatgattgcccgtgggtttatcaaaaccgggctgggtcggcgtatcgccctacaaatgatccgtctgttaggtaaacgaacgctgggcctggcctatggcctggcgtttgccgatctgatcctctcccccgcgatgcccagtaacaccgcgcgctgcggcggcgtgatttacccgatcgccgactcgctggcgcgcagctttgattcacatccggaagatgagtctcgcagtaaaatcggcacctttctgatcacctgtattggcaatgttaacgacgtcaccgccgcactgtttatgaccggttatacgggtaatctgctggcggtaaaactggcggcgaacgccggcgttacgttgagctggggaagctggtttatcgcagcgctcctgccttgcctggtctctcttcttatcgtcccgctgctggtctactggctgacgcgtccggagattaaacatacgccgaatgcgccggatctggcgcgcaaagagctggcgcaaatgggcaatatggcgcgcggcgagtggctcatgctggcgacgcaaaaagtggcgaaactgctggataaggcgtttgtggatgtgggccgtaccgggatgttttttgagggatttggcgtcgatcatgtgcacagtaagctaagtccgatgcacggcacagctaatctgagtgaatggaaacctatcgaatcgcgacagaataaatttttcgagcgctacgaggggtatctctcatcgcacgatcatgaacgggcgggtgatgaaaaactggccgcgctggcggccagaattcggcaaatccaggcgtaa

SEQ ID NO: 397113 - DNA, 654 bp, Salmonella enterica
gtgctcgttttactggatacactgaacattaatggtgcgctaatcagcgttgatgccatgaatacgcagaaaaagatcgccgataaaatcattaaccggggagcggactacgttctgtgtgtcaaaaataaccacagagagctacgaaacgaaattgccgcctgtttcactaaagtcagccgcgataccccggaatacttggcccgatatgaagaaaccgatgcgggacgcgggagaacagaggtcaggcgttaccgacagctacgggccaatgaatggatcaccgaaagtgcccactggcaggggttgcagacggtaatagaggttgagcgagaacggcataccagcaaaaccggggagccgtcacgagagaaacattattacatcagttcactgccgccggatgtgaaactaatagccggagccatccgcagccactgggaagtggagaataaagtgcactgggtactggatgtgacgtttaacgaagatgacagccgcatcagggccggagacggagcggaaaatgtggctgtaataaggaggttcgcgctgaatctggcgaggctacatcctctaaaggacagcatgcgcagcaagctaaaacaggctggctggagcgataagttcaggagcgaaattatctttggttaa

SEQ ID NO: 397114 - DNA, 543 bp, Salmonella enterica
atgatgacacattgtcatacaacgtccactgacgcacaccttaccgggggagaaaccctccgtaaggtccttcagcagtccaccgaccagtatccacgtctggtggcgtttcttttgaccctgccaacagtatccccggtaaacgtacagcattttcacaaaagtgtttatcagcaggtcagcgaactggctgtcgcccgccagctaagcggcagaccggtgcccccgacggtactgcgctggatttgggcgtccccgccaggtcagacgggcaggatgttactgctgctgaaccaggacaccttctgccatccccgttacgacagaccaccggaccgctgttttgaaacgatggagacgctgctgcgggatgcggttagtaagataaatgacgtccggcaccaccagccgccggagataaccgtgttcatggtggaccggacacatccggcgcaggctgatgcgcagtacagccgactttgtgaatgtgccctgtcgctgacccccgcagccactgcccgtagtgaacgtatcagcccctga

SEQ ID NO: 397115 - DNA, 255 bp, Salmonella enterica
atggagcctgacggcgccaatattctcagggatacgggactgatatccgcccgtcagatacccgttacacttatgaagtaccagcctgcggagggtgttcagacgctttttcaccgggttaaccctgttttgaatcagggattaactgtctgtatcagcagaaaaaggggccgggtatggagcgaaaatataaagcccttcctgcttatctccggtggttcaggaatgaatctggttcatcatgttgatttttaa

SEQ ID NO: 397116 - DNA, 1446 bp, Salmonella enterica
atgagtggggagaaactgccagaagggtgggtagagagtgaattatctgcattaggtcatatcgtcactgggaaaacgcccagtactaaggaacctgctaattttggaggcgatattccttttatcaaaccaggcgatctagatctaggtggttatatcacggcaaccgccgatactttgacggagaaaggattagctcttgttccaacactccctaccaattcaatcgttgttacctgcattggaaacttaggaaaagttggaattacaactataagatcagcatctaatcagcaaataaatgccttgatcccgtcaaaaaagctaaatattaaatttatttattatcaaattttgacattgaaaccttggttagagtctcaatcagcagctacaacgattgcaattgttaacaagagcaaattttcccaggcaccatttaaattcccgccgacatcagaacaaaaaatcatcgctgaaaaactcgatacgctgctggcacaggtagacagcaccaaagcccgtcttaagcaaatcccgcaaatcctgaaacgttttcgtcaggcggttttagctgcggcagcaagtggacgcttaacaaataaatggagagagaactatactccaaaagaagaaataaatttaatagcaagtaaatataagccgaccgatagcctttttaaacaagctaaactctctcttccagaaatacctcaaagctggtacgtagttccatctgcccatttaatagactatgtcaccagtggttcaagaggttgggcaaattattattctaccgaaggcgctctctttcttcgaatgagtaatgttcgttacaacacgacaagactagatctacaagatttgcaatttgtaaatcttcctggtcatgtagaaggtaagcgctcacttgtcaaaattgatgacttgattatatctcttaccgcggatgttgggcgcgttgccagaatagataaagacttaggtgaggcatatattaatcaacaccttgcattattaagaccaaataataatattaattccgaatattttgctttatctattgcggcacaaaatataggtgtaaagcaaattcaatcacttaaaagaggggctaccaaagttggccttggtctggacgatatacgcagtttagcaattcctttaccatctttagaagaacaacacgaaatcgttcgccgtgtcgaacaactcttcgcctgggccgacaccatcgaaaaacaggtcaacaacgccctgacccgcgtcaacaacctcacccagtcgatcctggcgaaggccttccgcggcgagctgaccgcccagtggcgtgcggaaaacccggatctgatcagcggtgaaaacagcgctgccgcgctgctggaaaaaatcaaggccgaacgcgccaccagcgacggtaaaaaaacctcgcgtaaaaagtcctga

SEQ ID NO: 397117 - DNA, 231 bp, Salmonella enterica; identical to SEQ ID NO: 397066

SEQ ID NO: 397118 - DNA, 246 bp, Salmonella enterica
atgcaaaacaaaccaaaatgggaaccagactggtatctgaaatctcttctgaacaaccatatcaatcaaatggttgcccgctactcctgcatgcgggctctacgggttgctctgttctatcagcaccatgctgcgaaatatcatctgcaggatcaccgccaacttgaaatggatctccgcatgctgatggcggcaatgatgcaggtggacattgacgttggtgatacagacttaagcatcaactga

SEQ ID NO: 397119 - DNA, 570 bp, Salmonella enterica
atgaacccttacaacgccaatccccactacgtaatgaacggtcagatcctggaggacataaacgcccacatggaagcgatgtttcagcgtttcgcgaagctgttacccttcaggattgattttgcttaccggaaaaacaccgccagtttcgggcatgcctgtaaacacacgatgtgtacagaaatccgtcacctgcttgccgaaacagaaaacgcgctggcaggtttttactgggtgatggaatacacgccgaagaaaggtctgcatatccatttactcggttatctgaacgggcagtatcaccagaacccttacctgctctcccgaacgatgggggatatctggaaaaggtcaaccgaaggagacggataccactacctgtgccggaaaaaagagaattatccggtccggatcaaccaggttatccactataccgatacccctgcaattaaagccctgcagtatgccatcagctatctcgcgaaagttaaacagaaagagaatggcatgattctggggcgaagtacggtaccggagaaaagcagcaggggcaggccgcgacagggctga

SEQ ID NO: 397120 - DNA, 423 bp, Salmonella enterica
atgtacgcaaaatcctttatcgctctcgacggcaatggtcgtctgaccggtgcccgtaccgcacagaccgtcccttacgaccgctatacctgccacctctgcggtagtgcactgcaataccatcctgactacgacacggaacgtccatggtttgaacaccagcatgacgcactgacggagaacgggcggcagcactgcccgtatgttaatcctgaactgaaagaaacccgacacacccggcaagtgaaatattatgtaccagatgcacgcccgctgattttccagactgactggcactgttgtggttgtgacagcgattaccacggcgaacggtactgcgtaacctgccgaaccggtaaaaatagccggggcctctctgaggttgaaaaccggactgcggaggtgacgacatgcgtatactga

SEQ ID NO: 397121 - DNA, 1635 bp, Salmonella enterica
atgactgagtttgaaaaacagaaattgggaaaaacgctctggaatatagccgatcaattgcgcggtgccatgaatgcggatgattttcgcgattacatgctggcttttttattccttcgttatttgtcggacaattatgaaaccgctgctcaaaaagaactggggccagactatcctaaacagaaagacggggagcgccatcctccgctgactctgtggtatgagcaaaatgagcaggatgtgcctgagtttgagaaattgatgcgtcgtaaagtgcattatgtaatcgaacctcagtatctttggaccagtattactgagttggcgcgaacccaagatgcgaaattgcttaatacattacaggcaggcttcaggtacattgaggaagagtcttttgccagtgttttccgtggcttgttctcagagatcaacctagcctcagaaaaacttggcaaaacatacggcgacagaaatgaccgtctttgtaagattatcaaagagcttgctgaggggcttcagcagttctctaccgacagtgacacgttgggggatgcttacgaatatctaattggtcaatttgcagcaggctcaggtaagaaagccggggagttctacacacctcagcgcatttctgacattttatctgccattgttacgttggatagccaggaaccagcaactggtcagcgttcgcatttggacagtgtgtttgatttcgcctgtgggtccggatctttgctcctgaatattcgtaagcgtatgggtcagcatggtattggcaaaatatacggtcaagagaaaaatattaccacttacaacttggcacgtatgaacatgctcctgcatggagtaaaagattcagagtttgatattttccacggtgatactttgctcaacgactgggatctgctacgtgagaccaacccttcaaggatgcctaagttcgacgctgtagttgctaatccgcccttcagctaccgttgggaacctacagaaacattagctgatgatgtgcgttttaaaaatcacggcctggcacctaaatctgctgccgattttgcttttcttctgcatggattccattttttaaaagaagatggcgtaatggcgataatcctacctcatggtgtacttttccgaagcggtgctgaagctcgtatccgtacgaagttactgaaggatggtcatatcgatacagtaattggtctacctgcgaacctgttcttttctacgggtatcccagtatgtattctggtgctgaaaaaatgcaaaaagccagacgatgtattgttcatcaatgcatctgaatactccgataaaggtaagcggcaaaaccaactacttagaacagacgaaatgcctaacggtgaaatcgggcacatcgaaaagattattaatacttatcagttccgcaaagaagagccacgctatgcacgtcgtgtaagcatggaagagatcgagaagaatgattttaatctgaatatttcacgctatgtgagtacggccgaagccgaagaggaaataaaacttgattcagttcatgctgaattgatttctctggatagtcagattaaattagcaaccaaaaaacataacgaatttctaaaggaactaggattacctactttaccgtaa

SEQ ID NO: 397122 - DNA, 1173 bp, Salmonella enterica
atgaaaccaaagcagacctttgctgatctttccgtgttggctgatcagttgcgcggcaaactagagacgatgaataccatcctgctatatgcctacaacggcacaggaaagacacgtctgtctatggcgttcaaggatgcgggtaaaaaaacaattcaccgtaccttatcagttggtgatcatgtaggggaaccattaacaattaccgagacgatcggcgatactctatattttaacgcattcactgaagatctgtttcactggaacaacgatctcgaaggcgatgcagaccgacgcttgctgatcaacagggattctcgcttttttcagggactatttgagctagaaatggacaaccgtattcgtccattgttgcagcgttatacagatttcgattttcgcattgatacagaagaatggtcgataagattttcacggatagtggatggtcaatctattgataacataaaggtttcacggggtgaggaaaatatcttcatttggtgcttcttcttagccgtagtacagctagcgcttgatggtgctgatgtttatcaatgggtaaagtttgtctatatcgacgatcccatatcttcattggatgagcataatgctatcacggttggtagtcatcttgcgcaactactgaataaggctgataaccctttgaaagtggtgatctcgtctcatcatcctttattcttcaatgtcatgcacaacgagcttgatgctcgtaaatccaaaaaggtcgctgcctattttttatcaagatctagggctgatgggagctattctctgagctatacaggtgccacaccgttctttcatcatgttgcgatactgaccgagttgtataaggtagatcaatccggtgagctatatacatatcatttcaatatgttgcgttcagtgctggaaaaatcagccagcttccatggcttctcaaatttttcagcttgcattgcacaagatgctgatgatcctgaaagaattttgcattcgaggcttattaatatcctgagccatggtaactattcactgtttgagcctcagcctatgcttgacgagaataaaagttatttcagaaagattttgcatgatttcctgaaacgatatccttttaaccctgatttatttcctcaacagattgaggaaggtgaagagaaactatga

SEQ ID NO: 397123 - DNA, 1287 bp, Salmonella enterica
atgaatagctatgataaacaatcatttcctcggttgcgctttgaatcatttagagcttcagaaccatgggtatttaaacctttaggaaaactggcccagcgttcacttcgcaaaaatgtggatggtaaaattacccgtgtcttaaccaactcggctgaatatggagtagttgaacagcgtgaatattttgaaaaagacattgctaatcaaggcaatcttgaagggtattacgttgtagaagaagggagctatgtttataacccacgaatttcagccatggctccagtcggaccaatttcaaaaaataaaatcgggttaggcgtgatatcgccgttgtacacagttttcaaattcgttgatagcaaaaatgatttttacgctcattacttcaagtcaacacattggcatcaatacatgcggcaagtttcgagtacaggtgctcgccatgaccgaatgagcatcagtaataacgcttttatggagctaccgcttcccgtcgctactccggaagagcaacaaaaaatcgccgattgcttatcatctttggatgaccagttaataacggaggccaagaaactggatactttgaagacatataagcaaagtctagcgcagcaacttttccctcgtgaaggcgaaagtatgccacgattacggtttcctgagttccaagggaatggtgaatggaaagagaaaaaacttgggagtctcactaccaaagtgggaagcgggatcactcctttgggggggcagaaaaactacagaaaatccggtcgcccgttcattcgaagtcaaaacatcggttggggtgagcttcttcttgatgatgttgctttcattgatgaagaaacgcacaacagttttatcgcaacacagataaattatttagatgtttttttaaacattaccggtgcatcaattgggcgaagcgccattgctgaccctagggttgttggtggtaacgtcaatcaacatgtttgtataattcgaaccacgggcgagttaaatccaatatttttaaatcagttccttatctcgaaagatggacaatcacaaattgataagtgtcaagcaggtggaaataggcagggtttaaatttctcacagattagagcccttaccattccgcttccgacggatataaatgagcaaatgaaaattgctaatgtattggcttctgtagatgcgctggttacgagtcaaaataagaaaatcgaagtcctaaaaaatcacaaaaagggcttgttgcagcaacttttccctgtatttggtggggcctcagtatga

SEQ ID NO: 397124 - DNA, 2973 bp, Salmonella enterica
atgagtacgactgaaaatcaaattgagctagaccttattgccaagctggctgagttaaaatatacacttcgacctgacattcgtgatcgtgcttcactcgaaaaaaacttccgggcgaagttcgaggctctcaatagagtgcatctgaccgatagtgagtaccagcgtttgctcgatactattgttacacccgatgtatacaatgcagctcagacactacgaaatatcaatagcttcgagcgcgatgatggaacaccgctcaactatagcttggttaacattcgtgactggtgtaagaacgactttgaggtcgtgaaccaattgcgtatcaacaccgagaacagccatcaccgctatgatgtgatgcttctcataaacggcattccagtggtgcagattgagcttaaaactctatccgttagcccacgccgtgctatgcagcaaatcgtggattacaaaaccgaacctggtaatggttacggaaagacactgctgtgtttcattcagctcttcatcgtcagcaaccgtactgatacttggtactttgctaacaataatgcgcgacattttagctttaatgccgatgaacgctttctgccggtgtaccagttcgcaagtgaagataataaaaaaattaccctgctagagagcttcgccgataagttcttagccaaatgtaagctgggacaaatgatcagccgttatatggttttggttgccagtgaacagaaacttttaatgatgcgcccgtaccaaatctatgcggtcaaagctatcgtcgaatgcattcatcagaattgcggaaacggctacatctggcataccacaggctcaggcaagacgctgacttctttcaaagcatccactttgctcaaagataatccagacatagaaaaatgcctttttgtcgtggatcgtaaagacttggatcgccagacccgggaagaatttaaccgtttccaggaaggctgcgtagaagaaaacactaatactgaaacactggtacgccgacttttgtccgacgattattctgataaggttattgtcactactatccagaagttgggtctggcgctggacggtacaaataaacgtaattacaaagagcgtttggagccgttgcgagacgcccgtatagtgttcatcttcgatgaatgccaccgctcgcaatttggtgaaaatcacaaggcgataaaagaatctttccccaatgcacagctctttggcttcacagggacgcccatttttgagtcgaatgccagttaccagcaaatcgaaggccagcaagccagcttacgtaccactaaggacttatttgatcggtgtttgcaccagtacaccatcactcatgctatcgaagatcgcaacgtcttacgctttcacatagactatttcaaacccgaaggaaagaatccacctaagccaggcgaagggatagctaaatctaaggttatcgaaaccattctttccaagcacgattctgctactaatggacgcaaatttaacgctgttctggctacagccagcattaacgacgctatcgaatattttgagttattttcgagcattcagatacaaaatgcggaaaaagattctgaattccgaacattgaacatagcatgcgtgttttccccgccttctgaaggtaacaaagacgttcagcagatacaggaagatctgcctcaggagaaagaggataaccagcaagatcctgaaggaaagaaagctgcacttacccgtatcattgccgattacaatgcccgtttcggcaccaatcatcggataagcgaatttgattcttactatcaggacgtacaaaagcgcatcaaggatcagcagtatcccaatacagacttatctgctgcgcaaaaaattgacatcaccatcgttgtagacatgctgcttacaggattcgactccaaataccttaatacattgtacgtggacaaaaatctcaaacaccatggtttaattcaggcattctcacgaactaaccgtgttctcaacgataccaagccatacggcaacattctcgattttcgtcaacaacagaaatcggtagaaggagccattgctctcttttctggtgagcaaatcgataatccgcgtgagatctggctggtagatgcagcgcctaaagtgattgataatctgcaaaatgccacgcaaaagctggccgattttatgcaatcacagggactgactaatgcaccggaagaagtagccaaccttaaaggtgatgtcgctagagcgcaatttgtaaacctgttcaaggatgtccagagactcaaaactcagcttgaccaatatactgatctttctgaagagcagaagcaacagattgagagcatagtaccgtcagatcaattgcaaggattcaagggtgtatatctggaaacagctaaacgattgaaggaacaacaggataaaggccatacaccaccagaagtgcaacaactcgattttgagtttgtactctttgcctctgcagtaattgattacgactacatcatggggctaattgctaacctgactcagcagaaaccaggtaagctcactcttaaccgcgaagaactcattggtctgatccagtctgatgccaagtttatcgatgagcgtgaagatattgctgagtacatccgtggtctgccggtaaatgaagcactaaacgaaaaacaaattcgaacgggttttgaaaagttcaaggcagagaagaaagcgaaagagctctttgagatcgctgccagacatgaactcgcagctgatgccctgcaagtttttgttgatgaaattctgcgtcgacgtatcttcgacggggaacgcctttccgaattactggctccgctaaatttgggttggaagactcgtacaaaaaaagagttagcgttgatggaggaactagccccgttgctgcacaagctttcacagggcagtgagatcgccggactatcagcctatgaggaagaacgataa

SEQ ID NO: 397125 - DNA, 183 bp, Salmonella enterica
atgactcgccttaaagacgaaacactttctatacgcacatctgccgacattaaacaacttcttcgcctagctgctgatcgtgagcgccgctctgtcgcttcaatgattgagattttgattgtgaattatgcgaagacgtacggaataacactggatcaatctaaaaataacactgtcgagtag

SEQ ID NO: 397126 - DNA, 150 bp, Salmonella enterica
atgcagcagatgcaggtcaagccagaaaatgtattgatattattagatgaaacaataggtgtgacgcccgacaacgtgaaagatcacctggaacacgttgcgccgtgtattcgaacatcaccgttcacttatgacagattcaataagtga

SEQ ID NO: 397127 - DNA, 1227 bp, Salmonella enterica
atgaaaagtgaacgacgtattacgggaccggacagcggttttgccatgatgagcgtggcggtcgcgctgctgatagtgatgatgatggccacgatggcgtccgggtatatgtctgactatctgaagtcccggcagtggcaactgatggcggcacagacaaaccggttcacccaggcggtggaatcctatgccgggcgttattacatcagtgccctggcgtcggccaccaccacccggccggtgaccataacggcgcagatgctgaaaaacaccggatttttaccggcgggattccgggagaccaacagcaacgggcagcagcttaaagcgctgctgatacggaatgctcagcatgcggaggtactgcaggggctggttatcaccatgggcgggcagccactgccttataaggcgctgcgccagatatctctggatatcagttcgggactcggggggtatatccgtgacggccggacggcgacaggcgccatgaacagctgggcagtgccactggcgggttttggaaccagcggcggtaacggtcatatcgctgttctgctgaacccggaaacaatgacgggagcacgtgaagatagcgacaggctgtaccgctttcaggttaatggtcgtccggaactgaataaaatgcacacctcgatagatatgggaggtaacaaccttaacagtacaggtgtggtgaacgggagatacggtaactttgacgtcagcgtggtgagtaatggcccggtgacggcaggaggcgatattcgcagtacaggtgggtggattatctcgcgtcatggccgtggctggatggatgagtcacacggcggcggattttacatgacggataatgaatggatccgcagcctgaataacaagagtatttacacaggtggacagttaaaaggtggttcactccggtctgacagtgacctctctgcggggggagtgttaaagctcgatcagacgagttatgcaggcacctggtgtccgcaaaacggggcgataagccacgacagctccggggggatactttcgtgtcagtccggtaggtggcaaaaagaccccgcggttttagagcagcaggaatgtttcgagaccggaaatcacaacggacgcgacttccaggagcatcgttgtcccacggggtggtatacagctggtcttcgcttctcgggccatagacgtggggaatcaacatatatgattacatgctgtcattag

SEQ ID NO: 397128 - DNA, 162 bp, Salmonella enterica
atgcatgtgatggccaccacggatgcgtcgtcagtggaggattccatcggtaaatttatctgtgccacctttatgctggggatcgatgatgaagcgaaaaacgtcagcacttttattatctcatgtatagctattctaattcgcaaaaatattgttatatag

SEQ ID NO: 397129 - DNA, 798 bp, Salmonella enterica
atgaaaatgattcataaggcaccactggaaacgtcccgccagccagcacttccgtacaaaaacattattgtatacggcgactgctggccggtagtcagcgcgataagtagcattgctgaaattatcatgccggactgtcatttccattcatgttattccattaatgtacttaaaaagctacagaaggatatttccgatgcccgctttatcttttgccttagaccaagggagcacgtttgtcttttctactttctcacccacactctgtcacgctcacctctgctggttattacagacagccttttgccaacagatcgggtagttctgaaaaccagcgcctgtgcggtaacggttaaccacagtcaagtatattccctttacaccagcctgagttcagaacgacactgccagacggtaaaggaaaacgctctggttagcgggctcacgctgctgacagaaccgggatttatatcccgggttgaaggcctgcccatggttttcagtaacggcattgaccttatcagctttatgaatgaatgtcttcagcaatatatgcaacaaaagggtgttacccgtctccagctaaagatactggaaaaaatgagaagtgaacccactctaaaatctctcgccaccactcttgatattagtatcaaaaatctgagttataacaaagcatatgccctgaataaactgggagttgcgggaaaagactatctggccatgtacgggacacatttttgccagaaatgccagaaaacgtcgttttctgtgcctactctacggggaagaatataa

SEQ ID NO: 397130 - DNA, 480 bp, Salmonella enterica
atgaaagataaaagcactaaatttacttatcgtaacagacaaagcaaccatgagacctgctttattccagagtgcgtaagatgttattccacagatccactctatatcatagttgcccactggtgtgtcattcagggaggatgggttgatcgtaacagtatttcccgcgcattctttattaccgggcgcagggcttcgtttctgataacctatatccactccaaacctgactgtgtggcatgtaatatcagaaaaattccggtttcaggtcgtgtattccgctacgaaatttgtgtcagtaatgtcagccaccctgtgagaaaagccttatccggagtaaagcgtgtgaaccgacagactattgttaatagcagtaaatctctttcagagcccggaaaaatactttttaacgagattatgcatcagctcagaacccgttcactttcacaaaaaggagaaagtgatgaaaatgattcataa

SEQ ID NO: 397131 - DNA, 1131 bp, Salmonella enterica
atgaaaaaaatattaatattacagcgaatttccaccctgtccctgattaaaatcactgttgtttatctgctgtggatggtatgtggtcagtcccgggcagcagctaatccttacccgcaaccagtcaacggaccgatgtgtggttggggtaatgcttactgggtcggacagtacaaccttaccatacccagttttaatttcagcagtagtaatcttcacaccggacccgacaaaattttttatactgaccccaaagtgattagtattaattaccgctgcgttgataagccagacaacaccacaataaaagtcccgtccctgtatgctgacagaaatcaattttttactatgcaatcaagcttacagagagcagggcttaggctttatttactggtaacgaatgtttcaggaaaggttacagagtgggcgccaggggctgacggacaacccaacgcaataccgcttggcgattcatacataacggatacccgccccgggcctgatcattatggtttcaatacgatatccgtacggatgaggctaaaacaaattggtgacatgaaaggtcctctgaaaatagattttccttctaatcagggaatgttaagagtttctcctgatgcttacggatctggtaagggactcattattaaaacttctgcattccacttacagtatataccgacatgtattggtaaagtatctgtaacgcccaccagtatttatcttggacattttcttacagcacgcctgcaggactcgttaccgcaggcgataaagactatcaccattactgcacaacagaacccggcgtgtgaaaccggaatggctggcttttttgcactggatctttatacccagttttcaacatcttccctgttaacggacagcgggcaggccatcttactcaaaaacgacgccggggaacagacggggctgaagctgtcaataactgagcagacatcaaaaaagaaagtatttttcgataaccggaaaaccagttttggcagtatccagcaaggatggcctctcatgaaacgtacatatactacagatgtatcccccactggtggcgatttacataccggtaaattttcagcagatgtggttataaaaatcacatatgaatag

SEQ ID NO: 397132 - DNA, 729 bp, Salmonella enterica
gtgaaaaacacccgattaaccggcatgctacttttcgcatttatcaccgtgtggagtatatccgggtttgccgccatcaacgtcgatcgcacccgtatcatcatggacagtaaacagaaatctctgtcggtggtgcttactaatgaaaatcatcggactccttacctggcccagtcgtgggtggaagacgataaggggaaacggaccaacctgttgcttgccctgccaccgttgcagcggatagaccctggtaaaaagtctcaggtacgcattcttcaggctcccgggggcgggacgaaattgttgccacaggacagagaaagcctgttctggtttaacgtacgggaaataccgccggaagtttcctctgatgaaaacgtgctgcagctggcaatgcagagtcagttaaaactgttttaccggccggcatccctcaggaaagctgacggtgatacgccggaaacacgtctggtggtaacccgcgacgacggacatgcagtcctgaaaaatccgacgccatactacatcacagtggcctggctgggaccggaccgaaagacccggttgcggggatttaatgagtcgtccatggtggcgccgttttcctccctgcctctgaaggccatgctgccttcagagctgacttcactgttcgttgggtatctggatgactacggcggcctccggataaatatgtatcgctgcagtgcaatccgttgtgtgctgtaa

SEQ ID NO: 397133 - DNA, 2484 bp, Salmonella enterica
atgaaattcagccgcctggcactactcacagtattaagtttatctgcgttgtcagttcaggcgactacattcagcgcccgctttctggatgacccggacggagcttccgttgatttatcctcattctctcgtgacggggggatcgcaccgggtaactatctgcttgatgttttcatgaatgaccgtctcatccgtaaccgttatttggtcagtgctgttactgttcccgacgggcagacacttttctgtattactccggaactgctggatatgctggctcttaaaaaggatgcagtccgtcgtttcagcatcatatccggagctgatggcggccagtgccataatctcaacacgccccaaagtaagctggtctatagtccggataaccagacgcttgatatcactctgcctcaggcatggatgcagtaccaggacccggactggattcctccggcccgctggagtgaaggtgttaacagtctggtgctggattacaatctcatggccagccggtatatgccacaccagggcaatgcttccgacagttacagcttctacggtaccgcaggcgttaatatcggggcctggcgtctgcgcagcgattaccagtacagccgctatgacagtggtaacgggaatgcgcagtcagatttctggctgccgcagacctacctgtttcgcccgctgccatcgctgcgttcaaagctgacgctcggccagacgtatctcagctccgccatttttgactccttccgcttcgcgggtattaccctggccagcgatgagcggatgctgccgccttccctgcaggggtacgccccgcaaatcagcggcattgcgaacagcaatgcgcaggtcaccgtcagccagaacggccgcgttctgtaccagacccgggtttcccccggtccctttatcctgccggacctgagtcagaacatcagcggtaacctggatgtcagcgtccgggaaagcaacgggacggttcacacctggcaggtcaacaccgccagcgtgccttttatggcccgtcagggacaggtccggtataaggtggcggccggtcgaccgctgtatggcggacggcataacaacaacacggccagacctgattttctgtcgggcgaagccacctggggcgcattcaataacacctccctgtacggcggggccatcgcctccacgggagattaccaggcgctggccctgggggcagggcagaacatggggcttctgggggccattgctgctgacgttacccgctcagatgtccggttaccacagggaaagcaccagaccgggtacagctaccgggttaattatactaaaaccttcgacagcaccggcagtacgctggcgtttgtaggataccgtttttctgaccggcactttatctctcttcaggaatatctggaccggatcgctattaatggaggacgttttcaggacgagaagcagagttacactgtcagctggaaccagtatatccatgccatcggtaccggactgtctttgtccgttagccgcctaagctactggaatgccgccgacaacaataactggaccctttcactcagcaaaacgaccgatatcggtcccctgcataatgttggcttaacgctgtccctgtcccggaatcagtctgcggggtggaagagccagaaccagatttataccacagtcagtattcctctgggagatacccgccaactgacatggaattaccagcaggacaatagtggcagcctgagccagagtatcggttacaacgatttcagtgacccggataccacctggaacctcagtgccggggctcagcggggcgatggagccggacagaacttaagtggcagtatccagagttacaccccttacggccaggccggtgccgatgtaaccctgcagtccggtcagtaccgcagtcttggccttaactggtacggctccttcacagccacagcgtacggtgcggccttcagccagcctgtgcccggtaacatcccccgtatgatggtcgatacaggcggggttccgggtgtttcattcagtaatggcagcggtataaccaaccgcttcggcattgccgtggtcagtggcggggacagttaccaggaaagcgatatcgccgtggacatggacacgttgccagcggatgtggatgtcagcagtgctgtggtcagccaggtcctgacggagggagctgtcggctaccggaagctggctgcagatcgggggctgcagttgctgggatacatccggttacctgacggaaaatcaccgccactgggagcgacggtaagtaccgggagttccggcaatataccgggaatggtcggtgacaatggtctggtttacctgaccggtctgtcgcctgaaaaccatcgcccgctgactgtgtcatggaggggtaaggcgcagtgccggctggtattgcctgatgtcatcaccatgactcacgggccacttctgttgccctgcaggtaa

SEQ ID NO: 397134 - DNA, 588 bp, Salmonella enterica
atgatgaaaaaaaaactttctggcatatttataatggccgctcttatcagcgctactgcttatgctgcagatgccacaactggcggggactttggcggcggcacgattaatttcaccggctcagtgacacaggcaccgtgcagtattgcccccaatgatgataaccagactattaatcttgggcaggtatcagagaagcttctggcatcatccagtggtaaaggttccagagttgttccggtcactattcatctgcagagttgtgatctttctacctcagccggaagcaccactttaactaaagcccatgttgaattcacaggtgcaggaatagatatgactaatgcatcaaaaggctacctggtcaacagcggtagtgcaaccaatgttgccgtccagctgactgacctggcggggaccgcaatggatatttcctcaggcaaggggactgcggatgtcacgttgagcagcggagataataatattctccagtttggggcacatatagtcaattccggtacaggtactggagcagtcgcacctggagatgtaaaggccacagttacctacaagctcaaatacagctga

SEQ ID NO: 397135 - DNA, 663 bp, Salmonella enterica
atgggtgagccggttctgatttacagtcgacagtggccagtgacaaccgccctgaaaacgctgctgacgggaatgttcagggctaaggtggtaccgctctacacgaaggcagaacttgtctgcagtctgaagaataatccgcgtagcccgctggtactgggtctcagtccgcatgaacatgtggctgagttgtactgcctgaagtcgctgctgtcaggtcggtcagtactgtttgttgcgcgacgtttttactggacggactgtcgcctgccggacttctgtggcctgatgttgtaccggtgctgtacgtgggacagactggttgatccttgttcccggcggatggagatgcgatatttcagacaattaatgacgacgaatatcccggccacagcatctgatggtcctcctgtactgacagcggagcagatactgaccgaggcaaacaggtggctgtacaggaaaatggaagaagccaggctgaacgggtatgagcgtgtgatactgcttctgctggcggaaagcaggaggggggagctctcagcccgtaaactcagtcactataaaaacagcgggttgggtaagctggggatgtcgcggcatgtaagtaatctgtaccggggggtaagagttcgtccggcattgcaggcttatctgccctaa

SEQ ID NO: 397136 - DNA, 1944 bp, Salmonella enterica
atggcttccactaccggaccagcagcccctgaaccacagaatgactgtgtggagtttgtcggtgttcccgtcggtcacaatccggaaccggataattttaatctggagaaattcgagtatcaggtaacacagtctgaaaccgaaccggctgcccgcatgctgctactgctactggaacagcttgaccatcactatggccagtggggaccaaagttttcggcgtacgcgccaggtatgactcagcaagggtttaaccgccagttgtgtacccggattgctggcgcagtcaccacccttttttcccgcccgggatttacggtcagcgaggcagggtacgtgcggctgatgaacctgcaccgctggctggcgttgatttttgccgtcagcagctacggacatgccgaccacattattcgtaaccttaatgcggccggcggtggggtggtcgacccgctgacgcttaacggccataacctgcgcctgttctgcctgtgctacttccctgattcgcagattgccctgcagccggatgtactgtggcagttcgaccgccggacggtggcccggctctttctggcgcttatcagcgggcgggctttaccgacacccgccgcgcacgacaaacgggaacagctgctggcctggttaccagacaggcttgcagaactggactccctggattttttaccgacagctgttctgcacgatgtgtacatgcactgttcctatgcggacctgagggataaacatcgtatcaaagcaggcattaatcgccttgttcgtcacagtatgaagcaggctgatgtgacttctcttctgccggttaatgagcctcctgaacgtgaaaaaccgatagtggccatagttctggaatggtttacctgccagcacagtatttatcgcacccattccacctcaatgcgtgcactgcgtgaacacttccgggtggtgggtgcaggacaggctggcgccacggacgaggtgacacagacagtgtttgatgaatttatagaagttccggcagaaaacgctgtccgcgacatcgtcagtcgtctggtggagctgcgcccggatgtcgtgtattacccgtcggcagggatgttcccgttgacagtttatcttattaatctgcgtctggctccggtacagctgatggggctggggcaccccgccacgacgcattcagactgcattgatggtgtgctggtagaggaggattactcaggagacctgtcctgtttcagtgaacgtgtgtatccgctgccaaaggatgcgttgccctatctgccgccggagaacgtaacgcgggttatcccggtacgtcagccttttgcctgtcggcaaacacagttcctgccttttacgttgccggtacgaattgccgtatgcgcctcagtgatgaagattaatccggggttcctggacaccctggcggagatacacaggcgcagccgggtgccggtcaggttctgcttttatatgggctttgcacaggggcttacgttggattatctgcgtgacgccattcatgctgcacttccggacgctgaggtgaacgcccatatgccggtacaggattaccagcgtgcgctgaacagttgtgagctgtttgcaaatccttttccgttcggcaataccaacggtctggttgatacggtacgccaggggctgcccggagtgtgtctgaccggaagcgaagtccacagtcatatcgatgaggggctgttccgtcgtcttgggctaccggatgaactcattgccactgaccgggagcagtatatccgtgcagtacttcgccttgcggaagagcatgattaccgggagacgctacagcaatatttgctgaacaacgatgtggaacaggtgctgtttcggggacacccggagaagtttgcggcagtggtgtatgacatttaccgggacagttgtgaaaaacagacgtga

SEQ ID NO: 397137 - DNA, 6081 bp, Salmonella enterica
atgaacaaaatatacaaactcaaatttgacaagcgccgtaatgaactggtggtggtcagtgaaattacagcgggcatgggtaaggaaaaaagcaccggtcatatcgcagacctgtcggcactttccccgttcagaaaacttccgggggcgttaacccctcttgcactcctgaccggacttattatcagcctgtttcccgggatggcgctggcggcagacctgccgaccggcgggcagattgtgggcggccaggggagcatcagcacgtccggcaaccagatgaccattcatcagcagacgcagaacatggccaccaactggcacagctttgacgttggtaagaacaacaccgtgcagtttgtgcagcccgacagcagctcggtggcgctgaaccgggtgacggggggcagcgggtcacagattatgggaaccctgaaggccaacggccaggtgttcatcctcaaccccaacggggtgttgttcgggaaagacgcccgggtgaatgtggcaggtctggtggcctccacgaagaacataaataccgcggactttatgaaggggcagtacacgctgagcggcaatggtagtcccggtgcacaggtggtgaaccagggcagcctgacgacctcgaagggcggctacatcgtgctggccggagagcgggtcagcaacagcggtaccgtcaccacgccgggtggaaaaacggtgctggcggccggcaaaacggtgaccctgcagctggacaacggcgggctgacgtcggtgtcggtgaacggcagcgtggtgaatgccctggtggagaaccgcgggctgatatcggccaccaacgggcaggtgtacctgacggcgaaggggcaggacatgctgctgaacacggtggtgaacaacagcggcaccattgaggcgaaagggctggagagccgtggcggtgaaatcgtacttaacggcggcgacagcggggtggtgagccagtccggtcagttgctggctgacagccagaccggcccgggcggaaaaatcactgttgaaggtcagaacatccacctggcggcgaacagcctgacctcggcgaccggtaaaaccggcggcggagaggtgtacgtgggtggtggctggcagggtaaggacagcgtcatcagaaatgcgtcaaaagtggtgatggacaaaacggccacggttgacgtgtccgccacggacgcaggcaacggcgggaccgccgtgctgtggtctgacgattacacgaacttccgcgggacggtccttgcaaaaggcggcgcacagtcgggtaacggcggccgggtggaaacctcttcgcacaataaccttcaggcatttggtgatgtgaacacctcagcatcttccggtaagggcggcgaatggctgctggacccgatggatgtgacgatagtcaccgctgaaaataatacccgcgttactgagacaggaaaggatgcaggtggagctggtcttgattcatccacagaccatgtgttcagcccctccgcgcctggtgcacaggtcagtgcgaccaaaatccaggctcaactgaataacggaaccagtgtgacggtggacacgcacggtggtgaaggtactgctaagggaaatatcaccattgccaataatgtgaatataacgaaaaaccagggtgatggagatgcaaccctgaccctgcttgcagataacaatattcagctgggctcagatcccaatggtaatcaggccacgaatataacgataagcagtacttcgggaaaactgaatctgaagctgctggccgggcagacagtgaatgatggttcggcgcaggtattgctggggaaaaagacaacgacaatctccctgaatggtggtgatttcacagtagccagtgctcaggaaggtggaaagattaattttctggcaccacatggagatggtgagactattagtgctggtaacatcagtataacggctatggggacacagggtatgaataccctcggagtgaacctgaacgctaccgggaacattgatatcagcgccagcaatataacatcagcatccacctggggacagaatgtaacctggaagtccggggatcatctgacaatcacgtcagatggtgcggtctctttcctggcaaatgataaaaataatgggggagggaatactgcgttatctgctgagaaagatgtggttattacaggaaaaaatggaacggtgacttttaatggtgatggttctcaggcaaacagcggggttaatatcaccagcagtaatggttctgtcagtctgtccgggaaagttcagaacggaactgtcggtttaacccttaacaaagtgaatatcacatcgaaagacaaagtcacactgaatggtacgacgtactggggacaggccactgagctgaccgctctgaacatcacggccggtggcgatgtggacatcagtggtacagccaaagacgatgcgacggggaatgtggggagtgccagcacaacaaaaggtctgagcataaataacagtaacgtgacctcgaccgctggtaacattaccgtgtccggcctggctgactctaaagttaatgccgccctgatgattaacaacagtaatctcagtgcgaattcacttatggttaagggggttacacccggtcagggaaaaggtttttcattgacgaatactcatctgctgggaagcctgcaaaacctgagtaatgtcactttcagttcggcggggtccggagccggtgtcattaacattctggataacagcattgccggtgatgcaacgacccgggagaccctgtttgcaaagaacattgaaaatatgaccagtgtggatatgaacgggactgcgatttttgatgataccaaagagagcaccaaaggctggaataaagattatacccatgaaggtaaaacaccgggatggatattcaacaacacgacggtaaatgctggcggtgacgtcaccctgaaaggcgtgggctttacaaactctacagtcagtctgaccagtggcaacctgagtattactaataccggtccggcaccgttgacaggaacaaacgttacggtaagtaatggttctgtcagtgtacattcagaggcaggcggtatcgacctgaccaaagggaatatttcagcgaagaatgacattactctggcttcagatgcgggtggcataaccatatccggcgcggataaaaataatgcagcaaatatcatcacaacgaatggaaatatttccataaacattaaagctcaggacgcaccaggaggcattgggctggctgtgaataacgtagacttcaatgctgataataatatcaatattgatgctgttgccggtactacgggggcgagtatcaggggggcaaatttcacggcagataaaggacatataaatctcactggttctgctcttcgtggaggattcgattttacaaatcatgaggtgggtagtgtgctcctttacggcgagctgctttttaaagcggggaccggcactacgataaatgcgacgcattcatctgtagttgcgggttattccccaccggcaccgctggttctggaaggggtaaacctgacatttgaaggaggggcagagattaatgcgcgtggttcatataccggcattattttatctgcatcagatatgatgagggcaagtaagtcaacggtgtttgtcaaaaatggcgatgtaaaaattaatgccattctggatggtcaggcaacaggcgggccaacgggaggatgggggtcatcggcatcgggggccattgttttcaataacgggtatggccaggtttcattcgagctggatgttgatcaaggctcgaatgtcatgataaatgcggattcctctgccaataagtcaggtgcattcgccgcctttgccgcagccacgccagaatctaccgccgcaggcaatcatcataacggttttgtattcagtggcggaggaaatatctccgttcggggaacgtctgattcagcggatgcggtaaacctgcgcttatttaacaatgaaaacctcaccggcaatctggtgattactggcgtgagcgattccggtgttggggtaaactttgataaatacctgtccactaaagtcagcaatgccaccattaccgggaatagcgcatccggtgtgggtgtgcagatgacggcgaagaacgggagcgcagacctgaatggcaacagcgtctccggctcaacggcgacaggtcagggcggggtcatattgtccggcaataatgtcaacatcaccaatggaacgctgagcggaactgccactgccggcacgggttccggagtctcaatggttggtggaagcgacttcgtccttgacggtgcggatgttagtggccacgccgttgatggttctggtatatctgttaacggcacgcttaccgtgaataacggtacgcaggtagtgggcgaggctacggggagcggcgatggcgtggttgtttccggcaatctcaccgccgataccgggaatggtgtcacccttaacggaacggcttcatccggtgacggcataaaagtggccggaaacacctccctgacagatgccaccctgaacggtacgtctgtcagcggtaccggcacaaacatcaatggtcagttaacagtgagcgggacttcagacattaagggtacctcaacgtcggggaacggcctgaacgttgctaaaaaagtgacggttactgacagagaaaagagcaaagtaaccttcacggggacatccacggataaggccggggtggttctgggtaattcggtgaacaacagtactataaacggctcttcccggaaaggtaacggtgttgaactgctcagtacagccagcgtatcaggtggaacgctgacggcgacatccgttgacggcaccgggttacaggcagaacagggtagtcaggctgaaaatgtggagataagcgctcagaccgttaacgggcaggcgattggcggaaacaataatgccctgaccacaaaaggaaataccagtatcagtaccgttggggagcccgggaacgccggtatagcagaaaatatcacgcctgttccgggtagccctacacaggatgtggctgaagctcttggcaaaaaactcagcgaaagcatcaacatgctcacaaacaccctgaacatgaaacttgcagacctgtccggattgcagcagagctggtcgaacctgaaggcgcagctcgacctggccgggaataccggcgcagtcggacagcctgacctgaagcgtctggaggcggtcatgaatggtcttggtacgaaactgagtgtaaccggggagcttaacagcctgaaaaaagacatcagttcactgggttcagataccgggaagacactggacgaaaaactgacgaaggcagatgttatcagtgccgggctgcagggggtgttgctgccagcaaccggagatatcagcgctgtggctgcagaactggacgcagcgaaagcgctgcagtcggccactgtctccctgcagggtgccctgacggccagagtggaggaaagcggaaaagtacagcatcttctggacagcctgcagcagcaactgaaggacgcacaggcaaacgggaaagccggaggcgtggtgctggcggggatacgggagcaactggatggtctggaacagcaccagcaggcatacggtgaaaaccttgcgcgttatcagcaaagtcttgcatcagtcagcaaggacggcaacagtccggtaaccagcaggcaggaaagcgtgaacagactgcagacgggactgtccggggtatccggggtatcagaagcccgggtcagtgcgctgagtaatcagctggaacagacggttaccgtacatgcacagctggtttcggctgttcaggaacagggtggtgtgaatgcgcagacttcagccctgagcagagtcgcgcaggatagtttccacgcgggcggcgagccgccggtaccggttcgcgggtatcagtctgctgagcggaaggttgatatcagtctgtgtgacggggaaagctgccggtcggtatcactcagtgcggacaacccggcagggaataaagttaagctttcaggcgggtaa

SEQ ID NO: 397138 - DNA, 738 bp, Salmonella enterica
gtggatgtgcgtctggacggagggcagcagttcctgacggatatatatccggaggtatttgccactgagtcaggcagttcccgtggccgcaagacggtcagtctgggggcgttatccgtcaccggagctgttgcagacctgccgggtggcgtgaccggttttggtttaaccggcacgaccggtaatgtggaccttcgaaatgaaaccgcccgtttctggagccggaatgatggtcagtttgcccgtctgaattatcagcttaaccataatcagcaggtgtggggaccattctcggtgtatgccggggtgaagggacagctggcagacggcaatctggatgcgtcacagaaatttctgatgggcgggccttctgcagtacgtgcctgtgatatcggggatggttccgttgaccagggtgtggtgggcacggcggaggtccgtagtcgatggggtattccggtacaacgctggttgggtgtggcacctgaactcaccgtggccgcgttttacgaccagggctggggtgaacagtaccgtaataatgatgacggccggggtggacatcttgccgacaacaaccatatgaatctggccggtgccggtctgtatgccacggtggcggatgcggggagctatgccctgaccatgacctgggcgcaccgtaccggtaatgcggacccgaatgcggtgcatagcgaccatgaccgcttctgggtgtcggcggtgaaaaccttctga

SEQ ID NO: 397139 - DNA, 153 bp, Salmonella enterica
atgaatcggaagcaggcgtcatcacagtcccctctatattaccggacggtcctggcacttgcgatagcggttgcactgggcggtggtaccgcaagtgccggggaaaaactggacatgtcatttattcaggggggggggcgatatgaaccctga

SEQ ID NO: 397140 - DNA, 1230 bp, Salmonella enterica
atggcaaggcagactaaaaaactcacagacactgaaatcaaaaataccaagccagcagacaaggagatcaatcttttcgatggtgatgggctactgctacgaatcgctcctttatcaaaaggagggaagaagaactggtatctcagatatccagtgccagtaaccaagaagcgcactaagatgagtttgggaacttaccctcacctctcattagcaaaggcaagagctttgcgtgatgaatacctgtcgctgcttgctaatggtgttgacccacaagttcacatcattgaaaaaactaacgctctgaaagatgctaccgaacatacgctacaagctgttgctcgaaagtggttagatgagaaggttaagacttctggcatctctccagaccatgcagaagatatctggcgcagcctcgaaaaaaacatcttttcaactctgggtgatgttcctatcaaagagatccgccccaaaatgctcaagcagcatcttgacccaattgagcagcgcggtgttctcgaaactctacgtcgtataatttccagactgaatgaaatctttcgctatgctgccacggaagagcttatagagttcaatcctgccgacaatctcgctcagcgtttcagtaaacctaagaagcaaaacatgcctgcccttccacctgatgagctaccacgcttcatggttgctttatctaacgcatctatacggttagaaacccgtatgctgatcgagtggcaattgttgacgtgggtaaggcccggtgaagccgttcgggcaagatggtgtgatattgatgaagagagcagattttggaatatcccttcagaattcatgaaaatgaaacgcccacataaggttccattgagtaaagaagctctccgcattttagaaaacatgcgccctatcagtggtcatagagaatgggttttccccagcatcaaagctcccctcagtcatatgcatgaacaaacagctaatgcggccataattcgtatggggtttggcggagagcttgttgctcatggtatgagatctattgcaaggacagcagccgaagaatacggtaagtttagaacggaggtgcttgaatccgctctggctcatactaaaaaagatgaaataatagccgcgtataaccgttcggaatacctagttgaaagagaagaactaatgaaatggtggggggattatgtcagcagcaaaaaatataagatgatggcagcataa

SEQ ID NO: 397141 - DNA, 1314 bp, Salmonella enterica
atgagaatatcaaaaacattagaatcattatttacatttctaaaggaaaaagagcagaaaggtcaactattcaataaagaggctatactcacagccaccggttggaaagcggctacatttagaacttattgggttaaagggcagttatctgactttattagcgcaattgatgaagatacatttgaggcatcaaactgtcaaaacatctcagttatagagttttcgaaactattatctcaaagtaagcatagaagagggttaggtcataattgccagtcgaaactagcaaaagcattattaacaaaatctagagataatatgatgcttgctcttgaattatataatagaccttcaattgagaatagaatggatgcatttgtaatgtgtttttgcacttcatgggaacaattattaaaagctattttgattgaaaaaaatggtgaagagtcaattttcaaaaaagaaaacaagcgaggattcagagagaccatttcactaagagactgcttagaaaaaacattcccatcgaattcaaaggtaagaaataatatagaacaaataacagttttcagagatcaggctgtacaccttttaatgccagaaatacaagggatagcctcaaggatatttcagtctggcgttcttaattattcatcatattttgaaaaattcacagaggtttcttttctcaataacaatagcacaggaatgatatccttggtaggtgagtttagaacaccgccaatatccgtactgaaatccatttatggagaagtagcgactgatatattagacttagcaacaactcttcagcaagaagttgatgataaaaatgacatagagtatgcaattcccttaaatgtaaaacttgtttttgcgacatcagatgatgatgggaataccataaccttagctaaagctgatgagggaatcgaggggcttaagaaggctctaattatagaaaaaccagtagatagatcaagaacacatccgtatttgcagaaggatgccattgagcatataaatgaaaaaatctacgaactttatagtatagaaaagatagaaaagcatttagtattcaaagataacaaaacaggaaagaaagtgataaataaaaattgctttgatgctgttatttgtaagaacggatggaaaaactcaaataataaatatcatcacaaaaacaacaatccagaataccactattattcaccagcgttagtagatgaatttgtcaagaaagctatgacaaacgaagattatctaatgaatacaaaaaaatggtataatgctagaagaagtaagcaaaagtga

SEQ ID NO: 397142 - DNA, 483 bp, Salmonella enterica
atgaaagaatctttctttaatcctgatgatattcaggaaaccatcattgggctgaaaaaacaacactgtcactctatgcgttcgtccaccaacggcattcctgattttgtcccacgcaggtctcaggaaaataaatgttatcaggcaaaatcaacgcactttatacctgatattccggagcaaacaccgcctccaacaaccaatacagttttcagccaggcagacgttgatgagtttctcgcccgtaagccgaaaacatataaaatgactgagcaggactataaagaactagggaaaaatacattacttggaatcggtagtcttcttgatggcctggtaaccgccactataatttgcgctccagttgcagcagacatgttgaatacaagaaataaaaacgacgacccagaagggtatggatatggcccaaatggatgtggctactatatagatggtataaaaattttcggatctgacagttaa

SEQ ID NO: 397143 - DNA, 480 bp, Salmonella enterica
atgaaaaacgttaagattatggcagtggccgctgccctgagcgcagtgatgaccggttctgtttttgctgctactgcagtaggtgggcaggagctgactattagcacgaccttcaactcgggcgcagtaagctatgcagaagtacagtcagagcacgtgtctattactagtggtaagccattagcggcagatacgctgctggcgaaaatcactaacctgcctgcgggcgcaaagcttattgatacaactgcaacagctaacggtcagattttgttcaccaaagttggtgacactggcgttacgttcccggcaacaattaaggatagttcaggtaatgtcctttctgataatattgccggaaccaacgccagtgtttatgacggtaatgcagtagtctcagtgaaaactgcggctgaaattactagtccgcaaccaggtgtttacacatcacagccaactgtttacacatatatagactaa

SEQ ID NO: 397144 - DNA, 132 bp, Salmonella enterica
atggatgaagcgttacagctacacattccggttgaatccgctaatgaacaattgaccatccgtcacgtcaccaccgtattttgggatgtacagaacctcactcctcccggttatcagagaaaacatatctga

SEQ ID NO: 397145 - DNA, 741 bp, Salmonella enterica
atgaaaactattagcttacgtgccatcaggaagcgttttatggcacagccggaaaaatacctgaatctaaaaaaacaacgtggtatgacgttgctggaaatcattattgtactgggtattatcggtgttattgctgccggggttgttgttctggcgcaacgtgcttatgataccaaggcgataactgacctggcaaataatgcaaacaccattcgcacggccgtgaaagatacctacgggccttcaggcgcgtatccaacagcagatacagctaatactattgcaatgacgacaacaaactatacatcggctgattcgttgaaagcaccagttggtaaattaattgcgttaggtaaattatctttagatgaagcacagaataatatttccggaaactttatcagcataggtccgggaagcatcggtgccaagactaatgccgggtactttattgaacttaatggcctgaatgcccaacagtgtcgcaatctgctgaatcagatggcaaacaactgggattttgttgaagtgctggatgatgctccggctggaagttatggtgctacgactaccgttcagcttgatgctgctgccgcaacaattgcagctgatacagcatctcctactggtatattccgttcgctggattcagcaactggttcacacattcttactcctgatcaggtcgtaatggcatgtactgacaataactccaacgctcttattttaggtagccgttaa

SEQ ID NO: 397146 - DNA, 1800 bp, Salmonella enterica
gtggtgggtgagtccgtaatgaaaaaaaggatgaataaatccctgggcttttcactgctggagataattttcgttctggcctttctgggtattcttttactggctgtcggtaactatgcccgtaaattaattgatgagagaaaccgtcaggcagctgctgatgctgtggcacaggaagtttatggcgcactgcagtttattaatgcgggcagcattaccgcgaccgttaataacgtcacgaaaaaagtcatcaatcccttataccagcaaccggctgaccccatctctgaagacccggcagatattaacacactgggcatacagaagaatcctctctggttggctcatcccggtgataccacgaatgcaggcagtgcttcagtatcgccttatattgccagaacgtggtcgaagagtatcaccacaccggtttcaaacaatatgaatatcactgacaacggaaaaacctattacagccactccctgaaatggagtcaggctgtatggggccaggattcggtccggaggtattttacagacagtggatgcgacggagcctccggtaatatctatttcaaccagcagtttttaagctgtaatgaaaatccggtacagagaggcagtgagattgccatttcacgtctggatctggtcagcgaccaggggactgtcagccgtccggcgggtacaactgccggcgttcccgtcggaattgaccgggtggatgtgtacgtcagcttctcaccggtggataacaatcccgcgcggattgagcagttcatcacgccgttaatgacggcgttcaggctgaagaaaatcacacccaatacgaatggtgtttatctggtcagggaacaggatcatgccggtaacacctggacgttactggacaaaaccagcgggcaaccggcgacggcaaccactccggatagcaacctggccctgttctctgatctgccggacatgattgacaagttacagcacggacagacgtatgccatccggttcagttttgacgggaagggggattatctcagaacagacggcctcaactcagcagataaagtctgctggaatacaaccacaggtgccgccggtccctgcctgacctcgcctgcgcaggacactcttgtattaaaacagcgccagagtaccagtgaattcgcaaatctgcaggttggcaatgtggtctccactgtaagccgtaaggatgcagacggtaatactgtggtggatgaatattataccgctccccgtatccgttatgcagcattcggtaatacaggcaaaatccccccttacttccgtaaccctgttcatggcgcaaaagacttatgtacggaggagaatgtctgtggtctgccgggaccgaatacggatgaaattgcggatatcaataatggcgctattgcggttccggtgcagacctgcccgcagaatgtggtgggtgataatggtaggcatgtggatatgttcccccggctcagcgcatcggtttcctctgtcgtttccggtatgagaaaaacggatagggatgacggaacaatcatcccggaaaatccgggacattatttcgatagtcagtccaggaatcttgcgaatttaagtcagagtgatgtttccatcaaccgactgggcggagctgccctgcagataagccagtctgatactacgtggagaattgccgccatggtgggaactgaggatcccaaccctcttggtcggacctggcaatattataacccgccctggttgtccgtcatgataacgacctggtgcagttcggttccccagccctga

SEQ ID NO: 397147 - DNA, 564 bp, Salmonella enterica
atgatgctgacggagacgatgaaggagcaccggctggataccggtacctggtggatgccgttgccgtccaccacgcatgaacaacgcacccgggcggtgcgaaatctgctggagcgccagtggcggggggtcacctatgatgtggcaacggagggggaaacgggcggcagacaggaaaagcgggggctgacgaagcatcattcctcggcccgggagccgctggcgctgtacatccgtctgctgtatggcaacgggatattttattcccggaccggagacggcatggtctggctgctgatagtcagtgacggtgtgattgtgccgggtactgactgtctgctcagtccgctggtgtttgactccctgatggaagaccggaagttcagtcagtacaaggccctgccggtcagggaactgtcggaggactgcgaagaagagattctgacgcactatcaggccaatcagctgcggctgaaaaagcggcgttatttcttttatggcgtactcgtctgtctggggctggttctgcttgccattccggcggcattcatcctgatggggtag

SEQ ID NO: 397148 - DNA, 1413 bp, Salmonella enterica
atgagaatgaatcatatgtcactgaaccggaaatggattttattttcactggtcctggtgtcaccggcgattctggcggcagagaatctgaattttaactacacccggccaggtgttctcagccttgaaccaggcctgggactacaggcaaaggcctgccactcgaaagcagacccaatggatatctatgtccggtttgataaaaatgtgaatatgaaagatgtttcagaggttaggcttcagattagcggaagtgcatatgccaaaagttatactgtattttctccctcagtaaaaggtcgggcaagttcagaccctgattttctggttccctggggagcacatgcaaagggggcagttaaagtcaaggaaactggcggtgtatatattccggccgttcctgcacataatgagcagcctttttgtttttccaatgcagggccaaaatattattcaattatctatccgccaccgtatagttttagtgggcttctacctatttttaaagatgaaccttactattttgacccactcggttctctggatggaagtgatttttcgaaaaggtgtcaatttgcgttagatatgttaagcgaaaccgatagaaactctctcgactattactggccatacagtacggatttatttgaaaaccgtttgattaaatatggtgatattcagagaaggactggttcctcctttattcagaatggtattaaatcgtcggggaaatcatttttgtttgtggaagatcagcatcatatattttggtcttatcgtgcccctgctgaacctgcacgtacagaaatacagacagcttcgaaggattataatatggatgagaactgctcgaccagtagctgtagttttacctttccgacaggaaaaggaaatcacgaaaatattattcagaatggcggtacatttttagtgcaacttaataacagaaacataacatcacttgtttttaacgtatttaccaagaccgggggccagacctgggagtggaaactgcaggataataatcacagaaatgatttgtatggcttgtatttctacggagggatacgggcagtttccgagtcttacccaaaacccgatgacccctataatattgccgggttttatgcagataaaaaaaatcctggcttttactcaggtactctggttactcagtcggcgctgaatacgacgtacacgaattttaataaggttacccccttatcgttacctgcagttggagaaggcgatatgaatctggttaacactgacagtcttacatttacttttggagtggacaactatggttcaccgacacttaggatacttggtcagccgctgaaatttgccccattaactgtcaatggtaaagaggtcgccagtgctatgcagataagaaatgcctgttactga

SEQ ID NO: 397149 - DNA, 978 bp, Salmonella enterica
atgagaaaatatttatcaggaattattttattcagcagtggtattttgttgtccggagcggcgcaggccggttccctgacggagaataatgacggctttctggatgcttcagagaaggccgcgctgtctgagtggtttacgccagaaaaggtatccgctggtttatctgtcggagtgctgagtggcagtgcgaaggagcgggtgtatgacaacgggcgcagactcagccagctggactggaaatttaaaaatgcgcccatcctcaaaggcaatattgactgggatttatccccgtggatgagacttggtgcatcgggatgggtgacggccggcagtcacggggcaaatgacatggttgaccgggactggatgctcccgcatcaggacggctattcccatatttctgaatcaccgacgaagttacgttcagccagtttctgggatgtgaatgccacggtctggggcgtgaataatgataactggcgtctgggactcatggccggctggcagcagacagattataaatgggatgcgcatggcgggtattacagctactggaacggacttttccagggcgaccttcctgacgggaaaggaattggctataagctacagttcaaaatgccttatatcggactgacgggtggataccgttaccataatgttgagatgaacactgcgtttaaatacagccactgggtcagggcgtccgacaccgacgagcattatttacgtaatatcaccttcagggatacaaaccgtgactcagatttttattccgtgtcagcggatatcggatattacatcacaccacaggcgaaggtctttattgaaggcgaatggatgcgggtaaccaacggtaaaggaaatgaaacggcgacgtcacatgattccggggatgtggcttattacccgaatgcgtccggtattgagagttcgtcatataacgtgacggcgggactgaaatattacttctga

SEQ ID NO: 397150 - DNA, 603 bp, Salmonella enterica
atgcgtataaattatccggtcagatacgaggtcggtgatattgtttttacctgtatcgggtcagcattattcgggcaggtatctgctgcctcccggtgctggtgtaatcatgtcggcatgatcacggggcacaacggtgaggattacctggtggctgaaagccgggtgccgttttccacggtaaccaccctgtcacggtttatccgtcgttcagccggaaaacactatgccgtgaaacgactgaaggggggactgaccgggacacagaaacgggatgtgctgtctcaggttcagccccggctgcataagctttaccataccggattcagttatgattcttcccggcagttctgctcaaagtttgtgtttgatatctgccatgaggcgctgtctgtccgggtggggaaaattgagaccttcggcgaactgttgcagaacaaccctgacgcacgactgaccttctggaaatgctggtttctgggctccattccctggagtcgccggacgattactccggccagtctgtggcgtaatccggatctggagctcatttatcacagtcagaagccggaccgtggtgattctccgttgagggttcgctga

SEQ ID NO: 397151 - DNA, 789 bp, Salmonella enterica
gtggtactgattgtacagcctttaagacgacaggcggtgacaccgtggcagtgctcagcgcgtccggccggatgcgctgtctggctgtgccgggcagtaccggtacgggcggctgacgtgaataacagagatacagacaaccggaaacgttacagggtgacagcagatatcagttatcagattgaaagatactgttttacggaaatcagtgagcctgcacgtctgaaccgtcagtgggcgaatgtgcttcagatgtgccgggagcagcaggctgggccggaggagcgtgtgcgtcttgcgttgctgaacgtggattatgtgaccagttttgaactgcccttccggttgttgttgctccgggcacctcaactgattgcggcggtaagggaaagacagacactgagtcagaaaaatgtgctcttcaacggtaaacgttatggctgtgtttacagcatgaaaactgatatcagcacggttccggacgaatttcagtatcatctgtcacaccgtatccgtcggattacgtcagcaggcagtaccgaaacaccttatcagaagattgcaaaagaagtgaaagcgccacgggaacgcctggcgctggcgctgaccgcgggtcttgaagtgaccgcgctggacggacttttctggttcggttgccagcgtcttgcggcggacgtgctgagactgagaaaatcggggatgcggatagccacggcgagtaaaacagtttcggatactgttaccggaaccatgcgtagtataccggcataccgtagtgaccgcggttaa

SEQ ID NO: 397152 - DNA, 3666 bp, Salmonella enterica
atgtcacaacttcttcgtgttattcttatacacactcacctgcctggtgttgttgaaattcaactggatcaacataccaatatttgtggaacaaatgcctccgggaaaacaactctgcaacgccttgttccggtcttctacggcgaacagcccaataaagtggtcccgagaacgcgcaaaaagttcgacgagttttatctcccctgcagtaatagctacatcatttatgaataccagcgagaaacgggtgacagttgcctggttgttcttacgggtaaaggtgagggaggcgtggaatatcgttttgttaacgcaccttatcgccctgatttttttctccgctatacggaagatggcgcgaaagggctgaattataacgaatggtctgcccagatgcgcaaccgggatgacgtctcagcttcagccaaaataggttcagcgacggagtaccgcagcatcattcagaatgatgtcgcgtcattacgcggtaattcgacggaggcaatgagactacgccgcctggctgcatcgtttagtctcgtgagcagtaaccacaagctcaggcatattgagaaattagtgagcgcggttcatgccggtgaaggcaagatggaaacgctcaaaaccatgctggcggcgatttttgccgatgatggcgtgacgctcccgcagacaaaagtaaaaagtggctttgcgcgggaatggatccaaaaaatgcgccagtcgctgcgctacgataaattacaacaggagtttgagttcatacagcgtctggggctcaagctggatgatacagaggcacagctagccgcgctccaccccttgttaataaacgatgaacaaattcagaagcagaaacgcgcggatgcagagcagttgcttcaccagcgtcgaggagagcttgttcaattagaggatagctttaaccaacaacgtaatgcactgaatgatcggttaagcgaaacgcaaagcgacctgaaagcggttcaggcatggctggatcatgtccagaatcaatacgactgttatgaacgcaaagagatacgcctgttacagacgcacatggaagagttgcctcaatggcgcgaggcgctttcagtgcaaagcgaacaattccagcttatgcaggagcaggccggtgaactttcccgagaatttgaacaacacaaagcaaaactaaaagacagtgtttaccgccaggaacggcttacccaacaaaaaattcaggactaccagcgggaaaaagaggcggtcaggaataaatctgacggccagaaagagatactttggcagcgcttcgaagagcgaaaacaacaacaggaaaatcactacggtgaacaactggagaagatttcaggcgatcgaatggctgttagcattgagcttaaacattcccagttaacagctcaggagcatgaagagcgccagtttgctgagctacgcattgagcaagctcaggagcgattattgcaactggccgagcagcgacaaaatgtactgacaacgctgtctgaggcccgcatagagcaagatagtgcagagcaacaactgcacgacgcccgtgctaacctgcatcagactgaagaacaactgcagcgactgcatcgccagttggatcctgaacagggtacgttacgccacttcctgcgtttacattatgagggctgggaacagaatctgggcaaggttctgaatgaaaatctgctggaacgcaaagatttgcgaccagaaacaggtgaactgtcggaatcgctgtacggcctgcaactggatttaagcgtgttagatatgcaggattttgcgcaagatgaggcttcaattcgacacagccttgataaggcagagcaaatcagagcccgtgctgaagaagcgaagaaaacggcagaagccacttttcaagagcatcatcagaacgttaaccgtttgaaatcacaagtggaagagtgtggaaggcaacatcagcgtcaaagccaggaggttggctatgctcgcgatgcccgatcgcgtttaatcacaaagtatgatgcgctggagcaacaacgtcagcaggaaaaacacgcccgtttaagcgctttagacaaagcacatgccgaattaacgcagcagaaagaacaagatattggtgcgttgacggaagaatataatacgcaagccttgcaattaaatattgacctgcaaagtgagcagcagcttattgacgagaagattgaggaactttctagccagataaataaaaaatacgccgatatggaagagcaaattaggatcttccagcaggtgatggacgataatttagcgaagaagggaatcgatccccgcgaactcaaagtactacggcagcgcattgaaacgcttaaaaaagagattcaggaagtggagtctcgtcgggatgagttaaccgaatggctgcgttttatcaaagttgactacgggacgttgcgccaggagcaacagaataaagagagcgcactctctcagctgaatcgtgaactgttgcagaaaaaacagcaattacaggcagagtatcagaataaaaaagacaggcttaataatgagaaaaaagagtatgagatgcagatacgacaggccactgagtttgtcggtcagttaaaaatattactggatcgattatcacctctgcctttggccgaaatgattccgactcatattgacgcagctgctgatgttaatgaacggatgtcgcgtactagcgatatgctggaacaacacgccagtttgacccgtactctggagagcaaactgaatgagtttaagtcacgttttaatcaggacgctgaccccactttccttgaattgttggattctgagatagataaattacccgattcttcaaggacccggcagcaattgccaatacttgagaaactactacagcttcttaaagataaacagcagcaattgctggaaatgggggaaaatatcggtggagatctgaaaaaattctttgatgttttcagtgatatcaatcgccggatttcacaccaaagtcggcgtttgagcgatgcagttaccgacgatttgcaactggagggcatcaataaatcagaagttcgtattttatcgaccatcgaccagttacgattctggaaaccattaaagcgctttgctaaaaactatagtgagtggcgctcgtctggtcagcaactacctcccgaaagctatttgaatgcccttatggatgtggttgaactgctacatgccgatgagcgttttactatggaatcgttattaaatctcgaacttcaccttaatgaaggcggggaagatattgttatcaaaaacgatcgccagttactggaagcgtcaagccacggtatggcctatctaatcttgtgcaaatatcttttggcgttcacacgtctgttaagaggcaaatcagacgccattattcactggcctattgatgaaataggtacgctggcctaccacaatgtagagaaattatttattgcctgtagccataataatattgtgatagtaggcgcttttccgaatgccgaatcggacgtgttaatgctgtttaagcatcgttatttgcttgatgccgatcagcttgagccaacccagcgcaggctgaaaaggatccagccgaaagtgagtcgccttactgtccgactggcgcagatggaacaggagacaatgtaa

SEQ ID NO: 397153 - DNA, 609 bp, Salmonella enterica
atgcgcaataaattattattagccatggcagtaaccggcatgatgtacggagtttctgcctttgctgagggacccactcctccggcaaaattcggttcaggcactgtcaccttcaggggcaccatcacaaatgctccatgcgatattgccacaggcgatgacgacctgcatgtggacttcggacaggtgtcctacagatccctgaaaacccacgatgccgctgatgacgcacatgcaaaaaacttcactatccatctgcagaactgtgaatttgacgtaccaagtgttacggacaaacctactaatcccggcggaatgatgtccaaagtacagattgccttctccggcaccccggcagctgacagtaaaaaagcttttgtcagtaccactgacccgaatctcggcgttcagttagcagataccaaaggtacagtcattgacccttctgccacacctgatttcactaaagtgggtgaccctattcagttgaatccgggtgacaccccgctggtttacaccgcaaaactgataaatgtgggagcagtggatggttcagttaaacccggggctttcactattcccgtcaattataccctgaaataccagtaa

SEQ ID NO: 397154 - DNA, 2163 bp, Salmonella enterica
atgaaaaaaaatgtgctggttttaccgggtgatggaattggtcaggaggtttgcgaggctgcgctacctgttatcagtgctatggatcttcccattacgctcacttttggcgagattggctgggcatgctggacgcgggagggaaaccccgtaccagatcaaacctgggaaaaaatcgccggggcagacgcggtgctgcttggcgcaataaccagtaaaggtaaagcgcaggcgcagcaggctttacctctgcctctccagcagaaaggtatcgagtatgtttcgccggtgatccaactccgccagaaactggggttgttcgccaatatccgcccggtgaaatatgtcgcaggcgatcgacgtccttttcgctgctgcgtgattcgggaaaataccgaaggtttgtacgccgggatggattttaaaggggttagaccggcggtttccgactggctgaagcatcctaatctgaacaagtatggcccggaagaggctgcctggacggttcggctgcaaacccggtatgggctggagcgcttgtttcagacggcctttgagtatgcccgcaagcaccactttacccgcgtcacatttgccgataaacccaatgtgatgcgcgagagtggtcactttgcggggagcatattccatgaggtggctgcgcgttttcctgagatcacggcagatatccataatgtcgatgctattgccctctggctggtgcgtaagccccatgagttcggcgtgattgtcgcagaaaatatgtttggggatattttgtccgacttagccgcaggggtgatgggcggtttaggccttgcaccaagcgccaatattggcagccatgttgcctactttgagccggtacatggcagcgcgccagggatggcaggacaggggaaagccaacccgtgtgccatgttttacaccattgcactgatgctggagtatctgggctttgagtcacaagccgaaaaacttcaacacgcggttgaccgggtggtccgggacgggaaagtggctacctatgatttgggagggacggcatccacacgggaaatggcgcaggccatcatccgggagctgcttcacccgactctcgggaaaacggccagcgtgatcaccatcggtgatgaactgttgtccgggcaatacccgaacagcaatcagttgcacatcagccagcggcttgaggcggcgcagcatcaggtgagatttcaggcgtcctgcgcggacaatattgcccagatcagcgccctgatcacctcgcgtatagggcaggacgatctcattgtcatttgcggcggacttggccccacctccgacgataaaacccgcgaggcagtggcacagtctctcggcaggcccttgatttatgatgaggatgtctgggccactattcaggcgcagctcagggcgtttggggtgaaaaacgatccgtctaaccgtcaacaggccagatttccagacggcgctagcgttctggataacccgttcggtactgcccccggtttttacaccagcatagccagtagcctggtagttgttctgcctggccctccttctcaagcgttgcccatgcttgatgacttgttatcaggccgcgagcatagcgaaccggcaaagactacatcctcctggacgcttattggtataagcgaaagcgaagtaggttcaattgtgagcgccttagtctcttcgacggcgtgggatgtgcattttttatggaaaagtccctatgtcattgtgcaaatagaaacgccggagcacagcccgttaccacttccggtgtggcaaagtctggatcgggcattacgtccgtatctggtgagtaaacgtaacaaaaaggcgagtgagatattgcaggacacctgcaacgtccgctggcagacggccgatgtggagctgtcatcttatttgccagtggccagaaaaaagacgggaggtgagccagtgctttgcatcgacgtcgcggttaacccctctctggtcgacgtgctggagagtgaaacatggatggggcaaatgacgatgtcggttcgccatcaggatggcaagaaacaccagatgacctttccccttaataaagcccttctggcgcaaaccctgcctgagtatgcggcctggtgcgtactgaaaaccctgacaatacaaaatggatga

SEQ ID NO: 397155 - DNA, 339 bp, Salmonella enterica
atgggttattatcagtacattaaacagtttattcccataaattattcagattgtcagtcagctccagtactgacagattcaacggtctgtatcatgaatctggtgatgaatagtgattatctgacagttctggctcaagcccggttgaacgagcctcgttttggtgatgtactcagtatcctgccaatcggtcactcgctactgcccgttagtcactatgggttgatttatccacgaaaaaggccactaacccaggcagccctatcaatgactgaacagtttaaatggcattgccaacagcataactgggccccgtacttaaatgacaatacaatttga

SEQ ID NO: 397156 - DNA, 1053 bp, Salmonella enterica
atgaacaggccagggttgtggggaataccggctgtgctgattattctgctcagtctcgtcagcttaccggcccgggcattagattctggttgtacaacgttatcaggtacagtccagttgagtaatgttaactcaaatataagtacagcaatatccggccagatactggactccagaagttacactataagttacaaatgcacccggggaggcctgggcgatggtgattttcagacccttatggtttttacgcctgcttttcgtgatttgatggaatcattcaaaatactggggctgggcctgaatttccacattacagaaacagattcaaagggtacatccggtacggttgatataacgtgggcgcagattcagaagagtataacaaccctcaaaaagacagttaaatttggtccgttaaggaatagctattcatatggtgaagaagccactctgtccgcaagcataaatctggaattatttgttgagaacagttttaaaaacggcatgctgattaaagcgatacccgggatgcaggttatggagttaaccagtagtgcttacgcgatgaaaagggctgcaatatatactggcgggtttaacctcaggctacttccggataaccttgggaaagtagatatttcacccatgctggtcagtctggggcatttttatataacagatgcagaaaagaaaagcgggtcgtttacagtaactgcccgtcagcagaatgctgctaacagtgcattcaatgttccgctgaggataaggtttaatgccccggtgggaatgtccctgacggatgccggtaaggctgtattactcaaaaatacgggagataccggcaataatggcctgcagctctcgatagtggaggatgggagcgggaaaaaggttgaatttgataaagatgaggagatgggggatataaatatgggaacatccccttcaggactaatacagaaaacatatcatgcagtgctggataaaaccggggctccggtaaccggaaatttccaggtttcaagcaccgttactgttacgtataactga

SEQ ID NO: 397157 - DNA, 5013 bp, Salmonella enterica
atggcagtggaaaataagttcaaacttaattttattgcagcatcagtgctgatggggctgagcctgtctgcggtggcagcagaggcggttcaggctgaaacatcgactgttacagctaaagcgaaaacgcttgcggaggtggtaactgcagcatctaaaataactgatgctgacggtaaaaaaacgggggtcgcagcaaaagttgatattgcgagtattgccgttactccgaaagatggcaatgtttcaacactggctgaggttctgaagactactattggttcaaacgtgggagattccgggggtaatagtagtaagaaaaaagcttatgatgatgcgctggcggcaaagacaaaactgactgctgaccagcttaaagttgttgagacttaccagaatgcgaaaacggcttttgatacggcggctaaggcttttacagcttctgattttggtgcgaaaagcgctggtattaataaagtctataatgagaagttatctgcactgtatggtgaggctggcggtgtgccagggcatgcctggaatattagtaatggtacatcaacagggagtagtggtactccatataaagactcctcgattgttcttaacggcgcagccggtactccgttcaaaacatacactgacagcatcactgaacttggcgataaaatcaactctcttcaggctgccgcagagacagttcttaaagcagctaatacggatacaactacgcttgatgctgaaaatgcaaaaatagacaaggctgttactgcctataaaacatacctgaaaaattattatgaagtagcaaagttacagtctcaacagactgctatagagcattacattcaggagaaactgcctgcttttcttaaagttgttgaagctaacagaaaggcggcaggaaatactgatgcagatgctaccgcaaataagacaaagctggacggcctctatacatccttcaccagtgcagtgaaagattacaaggcagcctcgtcagactctgacaaagcgacgaagaaagtcgtcgtttatacacaacttaatgcccttgtcacagaggcggtgaaagcggatgttctgaaaaatgatgtcccggacgggtttaaggcgacagacttccagactgcgctcctgtctgccaatgcattatggaaagctaatgaagcagcattaggtgacggcactacaaacggtgcaataaaaacacttaatgatgccaaaaccctcccgaatgatgcttctgtacctgataccctgaagggccaaaaaattgagtcccctgatgaagcccgcaaaagactgtctgagtacctgacggatctcgttaagagtgccaacggtaaaaccggtatttcagaagccaatcagaaggctttgacaggtgctattgacggtattaatggcgctcatgataccttcactaaagcagaagctgcgtataaaacagcgctgggtgaactgaaagtcgcagaaacagcacgtagtggtttgcttgctgactggattgaactgaacaagcagtattctgatgctgctgacgcatacaacattgcgaataccagctacgggatcagtagtgcagctaaaattatcagtgacctggacatagccagaacagcctatggtgataatcttggtaaagtgtcttcaggtattcagtcgtctctggatgctgcaactgaagcttataaagctgcagtgaaaacagacggtggtacagcgaaaacccagcaggaaaagaatgaagcgctgtataccctgattggtcaacagaaagcgcttaccacagcaaaactgatgatggatacggagcttctgaagctcagaactgaagatatggcagcacagaaggatgccataactcaggctgaaacaggtaagtctgacgctgaacagaggtataacgctgccgttaaggaatatctggatgcacagaaaaaattcggtgccgataaaaccgttgataatgaactggcagtgtctgctgctgaggcaaaattgctgacgttcactcagaacggtaatggcaatgcttcgggtaaactgactgagctttatgcgaacggtgcagattttaaaggtggttttaaactctttaaagatctggataccggagtaactaaaaattctgtactgaaaaacttgtccgaggctcagaatacgttgtatgtggttggtgccagggaaaatccgctctccggtagtaatggttttgacattcagaaagctcgtatcgctgttgtggaaggaatgggtaaacttgtcagcctgctcccgctctcaactgctgaagaacagattaaattccgacagcaatacaatgaatcactgacttcgctgaaagaaactgttgttggtgatgatgcgcaaagcaagcgggcaaacgcggaaagtataacgcactatctgggtagcctgactccggagcagattgcaacgttcaatactgcctccggtcagtttaactccgtcatcgttaacgtagatgataaaggcaacgtcaccggcgtgaaggacaaattcacagggaaagacctgtataccggcagcaaagacaagccattcaccaccactgttcttgatatccgtgccctggaactgggtaacggtgcacttgctgataccaacacaatcacggtgggtgaggctgccaccaaagacaagaaagccacaccggttgaggtatgggccagaacagccggtacaccagcaactccggcggtaaaactgtccggtgacctgagaaccgtcaccgcacagctggatgaaaacggaaagccgatggacggacagattgttcgtggtgctgaccagattcatctgcagaacgtcaatatccacaacagcttcacgcttgctgataaagtgaagatgctggctgatgatgttgctgcactgaaccagcaggctgcggataagcttgcgctgggtcagcctgctgaaggtgagggtggtgttaataattggttgaaaggccagaataatttactgaacagtaaatacaacgaccttcaactgaccggcctgcagattgacaccagcacagtcaatcccgagtttaatctgaacagtggtagctgggaaaatgcagcgaaaactgtaattcctgcagatgccagcatcctgctggataatctgaacatcaccctgcagaacgacagtgtgggtggtacatcgacagcgattaacctgtccggaaccggtaaccacattctggctactggtgggatatttgatgcaggcagtgtaacgggtgacgactctcaggcaaatgtccttgatatttccaaatcaaataacatcgttgattttaacggttccacactgaaaggagatattcgctccggtgctacaggtaacaaagttaacctgatgaatagcagtctgaccggagatgccgtttctggcacaggtaacctcacactgaatctggacggaagtgcctggactggcggggctggtccgaacagcccggatgtcagcctgagcaacaactccgtctggaatgttaaaggttatgattttactgctggtgagggtgattcccctgcgtcttcggtcaacagcctgacactgaacggcagcaacacccttaatctggttaacgctgaaggtaaggcacaactgggtgggcgtggttttgttggtagtaaatatggcacagtcctcagtgttgaccatgacctggtcagtgatggtaagggcgtgatttctgtgctggcggggacttactcacctgataatctccacagtctgacgaataccggtcttgctggcggctatcagtttggtggcatttatgcggacggtctggcgactggtggtaagtacgccctgtccgtggaaagcgccggtgctgagccgtacaccattggtgggcggctggctgatggggctgacgcaacccgagcccatgaatttgtgtcatacaaaacgtcggaaaaccgtcctgttacgggcaaggatggtaataccgctgttcagactgttaagtctgacgctgacttcaccagtctgagcgctccggctgagctgggcgtgtaccagtacgccgctgagaaggtgatggacggggtgaataaccggacaaacatctactacagcagcacaggtaagctgtccaacagtgctgccacggcggtttccctcgctgcggcgccggttgatgtggccaatctgcagtctgacacgctggcgaagcacatgaacagcgtgcgtcatggtaaggattccggcgtgtgggtatcctactttggtggggagaaccgtaacaccacggcagcaggtccggaatacaccctgaagactaacggagtcatgctgggtgctgacaccctgacggaaaacaactggctggccggtgtggctgtttcttcagcccgctcagacatgagcgtgatgaacagcagcggtgacctgaacagctacggtgcgcagttctacatgtcccgtcgttatgacagcggtgtgtttgtggacagtgcgctgcagtttaaccacttcagcaacacagccaaagcccgcatgactgatggtcagcaggcgaaggcggacttcagtggtaacagctacggtctggaagctaaggtgggttacgcctggaacagcgaagggttctttgctgagccgtatgtccgtgctgcggcccgtgcctttgacggtgagcattatgccctgtctaacggtatgaccgtgaacagcaacgactataagtccatgctgggtgaagtcggtgccgacctcggataccagtatgacaccagtggcggttacgtgaagccttacctgcacctggctgcgctgaatgagtttgctgacggcaactccgttcgcgtgaataacgtttcactggacaacagcgtgaaaggcgccgccttccaggcgggtctgggagctgaagtgaaggtaacggataacctgggtggatatgcagcctttgattacacgaagggcgataacaccgagcgtccgtggcaggcgacggtgggtgtgaactacacctggtaa

SEQ ID NO: 397158 - DNA, 480 bp, Salmonella enterica
atgaacaagacgataatcggacttgcatcgctcgtggcaatctcagtaaccgtccacgccggagggacgccacgtgaagcacactcgctctactacgcaaaccgggtgtcaaccactgcagtggccggaaccgtgactacaactgttaaaaccactccgctgcaaatttttttcaacccgctcgtgctggaggataaagccgtcgagcaggttgctgcgaccataacagtcagggggagcactagcgaccatgagtacgtcctcgacgaattaagcgcggtcggccccgactcatccgggtactacagcacactcgcatcaatcgggataactgccaccgccgacacaggcactgccgtgacgtacaaagcgatcacgtcggacggaacggatttttatataaaaatagtccacagggcggtgcgaccacgaccaggcacgacggttctaaactttcctttaatcgaatacgcccattaa

SEQ ID NO: 397159 - DNA, 276 bp, Salmonella enterica
atggaatggagatttttaggctctatatcagatgctaggagggctggctgtagcggagtttatcttattgttcatcaagggctttttaatcgtgttgtttatgttggtgtgagttgtaatgtagggagaaggattaatgaacattatgaaggctacctgagaggaaaccgaacaatttataatgcaggccacaatgatgacgtgtatcgtcttatgtcaacttacaagattcgaaaccatataaaatactatcaatcgcttagcaagcgattatga

SEQ ID NO: 397160 - DNA, 2661 bp, Salmonella enterica
atgataaatataaagaaaaaggaagtgttgatattattagcaatattagtttgcctgttcttaactcagtcagcttatgccgcagatttatttaccgtcccggatactgataagtcaaagttgtggtttctggatatcttattccctgacaatttagcccagagtcctttagcgagcacaatgacaatcctcaacagcgctgttttactggttggaggcattttagctgcatatacgctgattgccggaaccatgtcaacggcacatgacggagaaatgttgggtaagaaatggtcttccatgtggttgcccgtaagaactgcattaggcacggcaatgatactcccggcagcaggtggtttctgtgccgctcaggttatggtgctgtggatgattaatcagggagtcggtctggcagataccgtctggaatacctatgcatccaacccctcagatggggctgttatcacaacatcggcgtcttatcaggaacttgaccgtatagcgaaaactgcctttatcaataacgtctgtatgttgaaggcgggtgaattatggaagaaatcagcagcagccgatcccttcccgcacgtcacgcctgcgtttgaaatgacgccggagaaaggtgcctatttatacacatacagttatggggccagcaatgccggtaatgatatgaataaaaatttactggtatcaaaggctgcctgtggaagcatcacgcttacagaccccaaggccaaagcttcttatgatgaacaggctaaagctcaggctaccattgctgctggcggcatgtatatggcctacatgccacaggatataaagacgaatatttcagatgttattgaggcacacaatgccgcattcatcggccttaataacagtatgaaaacgctggctgaacagtatgtcgctgataataacatagatatccagaccgggataaacagcgcaacagcctcatatgtatccattattgatactgcagtacgaacagttttctccactggcgaccagtgggatgatttcaaagagaatgtccagaaagacggatggtttatggctggcgcatggagtatgaaactgatccgtgtgcaggatgcgattaatggagccgctcataatcttcctgtaggtgggcaagcgacaatggaatacggagatatattcgataacagcctgaacgcgattatggcaaaagtggctcaggatatggcgaaatcaacgacagcttcaagatacgcgaatggtattgatgcgcaaaaccgaacggaagccaataccagtggtaaaagtggcgctggccctaaaacagatgatgctggaaaaatagtttcttctcttcaaagtgaagccaataagagtatttctggtgcaatggcgggttttctcagttccagcgttattaatggaagaaagcaagggaaaattgtttcattttcaaccgacacaaccgctgccaatttacaggcgataaacccgttgttagccgttaaagggcttggggatacaatcagtgccgctggctggacgttattaggaagttctgcggttgttggcgcaggtcttggcgcatggacatcagcgactgcaagctgggtatcaggtgcatttggcgctatggggattgttatgccactggttatcccattatggatagctggcgatactttagccgtcgttattcctatgctgccttacgtcatgtggtttggtgtttgcgtaggctggatgatcctgtgccttgaagcaatggtcgcagcaccattatgggtaataacacatttacatccagacggtgatggcgtagtgggtcgtggtggcgctggttatggtctggttttatcgttaaccatgcgaccagcgctaatgataacaggattaatagcagcctatacgatgctccctatccttggtgggatcgtcaatgaaacattctccggcgcgtttggcatgatgtcagccaatgccgggataggtatcatcgagtcactggctctcattgctgtttatattgcgatgatgttcacggtagtgaagaaatcactttcactgattcacatcatccctgatgaaattatgaagtggcttggtgttcatggtggtcagagcatgtcgggttacgcacagtcggcatcaaaaggtgttgaaggtgctatgtttaccaaaaccgtgttggatcaggtttctcatacctcaaatgcgatgggtaatcagatcaggaatgcgcaaatcaacaaagaccgtgaacagcaacgtgagcttcaacaacagcaacaggctcaacaggggaaagcacaggcggctaataaagccaatgatacgggatctgcattcagaactcatatgagtaatgctggcccactggatcagcaggatgaatatcagtctcttgaaagtgctaactctgcttataatgcggctgaggcagcagatgctgttggtgatacagctggcgcagcgggttatatgaatgtagctcaaaaggctgctgacagggcagtctcatttggtgagcataacaggccattgttgccggtaaaccttcagggtaaagcgtcgcctatagagagttttaagcctccgggtaaaagtgatggtggtggatcttctggtggaagtgaccaatcttcatccgttggtgccgataaagagtaa

SEQ ID NO: 397161 - DNA, 366 bp, Salmonella enterica
atgaagcaggatgcggctcagttagagccggtagcgaagaatttcatggataacatcaatcagtcgcttgagactattggctgcacggacgcatggcccgccggaaacctcggcattaatcttccctctgtggattcaataattaaaaaaactaaggaagcggcaataagtaaagcctgttcgattgcgagagaaaaagtcagtcaactgaccggaaatatatccgaaagcatttccattgatatgcccgtccttgggaatgtcgcaagtggaagtatttctacaggaacaggctcttcatcaggatcgggagcaactgtcaacggaaccgatgtctggaacagcatcagtaactcaatgaagtaa

SEQ ID NO: 397162 - DNA, 369 bp, Salmonella enterica
atgtatgtatccgagatcggcaccgacttcacccagcatggacttatagtcgttgttgttcacggtcataccgttagacagggcataatgctcaccgtcaaaggcacgggccgcagcacggacatacggctcagcaaagaacccttcgctgttccaggcgtaacccaccttagcttccagaccgtaactgttaccactgaagtcagccttcgcctgctgaccattaatcatgcgggctttggccgtattgctgaagtggttaaactgcagcgcactgtccacaaacacaccgctgtcataacgacgggacatgtagaactacgcgccgtagctgttcaggcctctcttgtaatggccatcagtgaatga

SEQ ID NO: 397163 - DNA, 774 bp, Salmonella enterica
atggtatctgagaattcagagaaaaagagtacagaaaaactgcagcatatttaccggctccagcagagcaaactggtcagtatcggtcatctgaccgaaaacctcagcgccatccgggtaaacatggaaactttcagcactgagcagaaaatactggccggagaactggaaagctgtaccaacaagtgtcgggtgactatcagacgccttgagcagaaaagtaataaagataacagtaacaaagaagaaagcactgaaaatgatgacgatggctacaaatcgctttccccggccagaaaaaaatcgtttttacataccctgcaggaatttcagaatacatcatcgtcagttgcaggaagtcttcacaggctcgcttctgcccataaatattcagcagagttactggacctgtcggtgattatagtgaagcacttcctctggcgtgagcgggtgtttatggccatcattctggggggctatgacagtgaggcactgaaacaggtcagtatcagaagttgtgcgctgggaaaatggtacgatggcagggggaaaaaagcgtattcccatttaccggcatatcgttcactcggggaggctcactctcgttaccatgatgtggcaaacgagctcattgataaaggtattgaaaaaatgaacttcggtgaattgtctgcagagttaacaaaactggagatgctgagtcaacagcttctgggattcattggtcagatacagcaccatgtagcgttactacaaaaaactcagcactcataa

SEQ ID NO: 397164 - DNA, 339 bp, Salmonella enterica
atgggctgggaacttcacataataagaacagaaaattggttcgatagtgcaagtgatccaataagcagtgaggaatggctccagcttgttgatgatgataaagaactatctatagatcgcaagaatggggagtttttttctatatggagtggtcaaagtgaacacgatgaaccttggcttgattggaatgatggacggatttcgactaagcatccagacgaggcgctttattgtaagatgttgcagatagctgataagttaaatgctgtagttgttgatgaggatgaccataaatatttaataccaagtgatcttaaaaatccatcatgggcgaattaa

SEQ ID NO: 397165 - DNA, 465 bp, Salmonella enterica
atggcgcgccgaattgagcttcagggcatagttaacgctctcaatgggagctttgttagtcgaaacaacgactttagtggatattgggctattggacagttaaaatcatttgctatcgaaagcggcctcaattcaatgagcttttctcttattatacctaataccgactgcatctctcatttgcaacgttatatcgtgcattattacacaggtatgctcgaagacttactaagaaaacagcaaattcctcacttttgggttaatgacgccagcatcatgctcgacttcaaagttgatgaggaaaatgcttggctgcatgaatgttcaacattaggtgaacctttcaaatgcggttgccagataattgatgatactggtcgcagctactcttctattattgatggtcgatgtttaccacactctgttatgagagaactaaaatcgacccgaaagcccattatgtaa

SEQ ID NO: 397166 - DNA, 147 bp, Salmonella enterica
atgttcccgtaccgtgaaaataagatccagatcttcgtcatgttcaaccgcacgatgcacgtcaaagtcatgtcggggcgctttaccaaaacgacggttatagtcagctatataggcttcagcaaaggcatttgcagcctccattga

SEQ ID NO: 397167 - DNA, 390 bp, Salmonella enterica
atgcgtcccgccgtacagcggacgtccggcggccaccttatagcgaacctgtccctggcgtgccataaagggaacgctggccgtgttgacctgccaggtccggacgctgccgtcgctttcccggacgctgacatccaggttgccgctgatattctggctcaggtcgggaagctcaaaaggccccggcgacacccgggtctggtacagaatgcggccgttctggctgacggtgacctgcgcattactgttcgcaataccgctgattttcggggcatatccctgcagggagggcggcagcatgcgctcatcgctggccagggtgagtccggcaaagcggaaggagtcaaaaatagcggagctgaggtacgtctgtccgagcgtcagttttga

SEQ ID NO: 397168 - DNA, 552 bp, Salmonella enterica
atgcgtaaattattactcatggcaggtcttgctgctcttgtatcgggatgcggtgaaaaaggtgattttgagaaagcgatcaacgcgaaactatcacaatctaagctgtgctactccctgcaggacaacgacattgtatttaataaaggttttccgattaaggttaaccgtggctaccgttctaccggatatagtgctagtgatgaaatccttaagggacttgttgaacaagggctgctcactgtttcacaacaggtaaatggctttagcagtgttgatgttctggaagtcacggacaagggccaagaggttgagttttggaaccgtgagaatggtgcttgtgtcggtcgtcgtgctgttgacgagatcaaggaatggacggaaccgggtaacggcggtcagaaggttgttcgcgtgtcatatacatggaagctggttgacgttccgggctggattgacaaaaaggcgttcgttggcgttaaagggatgaatgaacctgctgatggtgcgatgaatctctttaaaaccagcaatggctggaaagccaattaa

SEQ ID NO: 397169 - DNA, 966 bp, Salmonella enterica
gtgactattcaaaaaacgcttgacttttcatccaaagagaaaaattcaactacaaagttagtcaacgggtttgaaccgttttacgaatctaacttgggttcgatcttccacgccgattcgttagacgtgatgaagtcaatacctgataactcggttaacttagtcttcacatctccaccatatgcacttcattttaagaaagaatatggtaatgtctgtcagaaggactacgttgagtggtttgttgattttgcaaaagaaatcaaaaggatactgacagaagatggcagtttcgttttgaacatcgggggctcttggaatcccggtgagccaactagatctatctatcattttaagttagttattgctttagttgaggaagtaggattcagactagcgcaagagactttctggtacaaccctgcaaagatgcctgtacctgctcaatgggttacggtcaaacgagtccgagtgaaggattctgtagagtatgttttctggtttagtaaagggccacacccaaaagcaagtaataaaaaagtgcttcgtccttatagcaaggacatgcttcggcttgcagcaaaaggtgttaaaactactgttcgaccatcaggacataatattaatgaatctttcgataaaacccataatggagggtctatcccacctaattttattgatgatgaaacaccgtctgatgtattgaaaatgggtaataatgcagctaatgacgtttatacaaaaaaatgtaaagctaatggtatcaaaattcatcctgcgcgtttccctatgcagcttcctgaattcttcattaaaatgcttacagatgaaggggatttagttcttgatccatttggtgggtcgatgactgccggtgctgtagctgagagtttgaatcgaagatggatcggtatagatactgttgaagaatatcttgatggcgcgttatatagatttgaggaatga

SEQ ID NO: 397170 - DNA, 591 bp, Salmonella enterica
atgcgtaataaaataacactcgctatggcggttttcggtatgatgagtaccgtacctgcttttgcaacacctatcgccacaactgatgcaggacagggaacaatacaatttaccggctctgttattgacgcgccatgcagtattgtcccggaaagccagaatattcaggtaaatctgggccaggtgaatttaaaaacgcttgaccagcaaggtaaaacctccagttcagtgccgttcagcatcaatctgacaggatgctcatttgatgccccaggtgccgggagtacgactgttctatattcaaaagtggccgtggctttcccgggtgtgaatagtccgacagggggagcgaatcaaggagaaatatcaaatggtgccactactggtgcggcaacaaacgtggcgattcagctccttcagggtgatggtacttcgcctgtgaattttactccttctatagatgatgctattcagctcgacagcacttcggcaaccagtaagttgcaattctatgcccgcatgatggccacaggtgtagccactgccggtaatgtaggcgcaacagtcacctacaaactgcactatttctga

SEQ ID NO: 397171 - DNA, 165 bp, Salmonella enterica
atgcaggcacttgatttaagattacaaatgcttcaaatcgaaagaacagaagacacaaatattttgcttgcggctctattaggacaacaactacaaccagttgataagcaagtgctgaataatttaaaaacaaatgcgacaagagcgactcaggcaagtgaataa

SEQ ID NO: 397172 - DNA, 768 bp, Salmonella enterica
atgatgaatgaaatagatgttgacttggatttaggcttaaatcccttttgctttgaaacagaactaaagattgaaacaagaaagaaaaatctaactgtttcaagaggaacagaactttttgaaaagaaaaatgcaggtaaaagttatttcgccaatatcgtgcatacccaagaggttgataaagaagagttcattaaactctacacatctcagataaaaacatactttgatctcacgaaaaccgcctataaagtatttttcatctttttacgtatctatcaggatgcgataggaaaagatcacttttacctgagttgtaaaaaagcaatgtcgcttgcggaaaagatagatcactttgtcttgtctgaatctatcttttacagagggataaaagaactcatcgaaaaacgtattatagctaaaaccaatgaaaaaaactggtatttcattaatcctgctattgtcttcaatggtgatcgtgctcgttttgtttcagagattataaaaaagaaagaagcaatagaggagcaaatggaaagtgctatcagtaatgatagtggtaatagaaaagttgacgatagagacagtacaattgaggaagttatagaaaaagttagtaaccaagaagatatagatgtgttaatcgcaagattacaggctaaaaagtctcaagggttagtggagagagaaagtataaatgaaatcccttctgtagagaacacaagtcttgtgccaccagaagaaccgttagattgggataatatttag

SEQ ID NO: 397173 - DNA, 471 bp, Salmonella enterica
atgtctggaaaaaatccattttggaattatgattacaatgcggcacaacgtaatagagaaattgtagactcttaccaacaggccaatgaggcaaggctggattctcaacagtcgcagtttgaagcgtctatggctaatgacagggttagtagaatacagatgcagttgaataacacaatcaatagccataagaaggttgtggctgattatgagcaacgtttggaaggatttaagcataatttctataaaatagctattcagcgaaatgtttttaagaccacattagatcgacttcaagaacaatggcctgaacgtaaagaggatatccttgatgaaatccaacgacagagagaccgctgtaatatgcctgaatatcgtgaaacatggtgtaatgctgtatcccataataatataggtgatagtgttttagagttcccttattctaaacgtgagttaaaaaacaaaccataa

SEQ ID NO: 397174 - DNA, 630 bp, Salmonella enterica
gtgcagagccgtctgccgtggggccaggcggcagcggacgccaccctgcagcccggacagtaccgcagcctgggcctgagctggtacggctcggtgactgccaccgcccacggtgccgctttcagccagtcgatggccgggaatgagccccgcatgatgatagataccggagacgtggccggtgtgccggtgaacggcaacagcggggtgaccaaccgcttcggggtgggcgtggtgagcgccggcagcagctaccgccgcagcgatatttcggttgatgtggcctccctgccggaggacgtggacgtcagcagctccgtcatcagccaggtgctgacggaaggcgcggtgggctaccggaagattgacgccagccagggggagcaggtgctcggtcatatccggctggcggacggcgccagtccgccgtttggttccctggtggtgtccgggaaaaccggcagaaccgcagggatggtcggggatgacggtctggcttacctgaccggactcagcggggaagaccgccggaccctgaatgtgtcctgggatggccgggtgcagtgcaggctcactctgccggaaacggtgacactcagccgggggccgctgttactgccctgcagataa

SEQ ID NO: 397175 - DNA, 390 bp, Salmonella enterica
atgccgtccgccgtacagcgggcggccggccgccaccttatagcggacctgtccctgacgggccataaagggcacgctggcggtattgacctgccaggtgtgaaccgtcccgtcgctttcccggacgctgacatcgaggttcccactgatgttctggctcaggtccggcaggataaagggaccgggggaaacccgggtctggtacagaacgcggccgttctggctgacggtgacctgcgcgttactgttcgcaatgccgctgatttgcggggcgtaaccctgcagggaggacggcagcatcctctcatcgctggccagggtgataccggcgaagcggaaagagtcaaaaatggcggagctgagatacgtctggccgagcgtcagctttga

SEQ ID NO: 397176 - DNA, 180 bp, Salmonella enterica
atgtctaaaaaatatggagcggtgatgacattcttaaaatattttctgagattttcttttaagtcgttgaggttcatgtggctgacagtgttaatgttattaagtttatattcattttttaaatgcggaattcccttgtcaatgtgtgataatgaaaaggtgaacaagacggaattatag

SEQ ID NO: 397177 - DNA, 291 bp, Salmonella enterica
gtgaaccgtcccgtcgctttcccggacactgacatcgaggtttccgctgatgttctggctcaggtccggcaggataaagggaccgggggaaacccgggtctggtacagaacgcggccgttctggctgacggtgacctgcgcgttactgttcgcaatgccgctgatttgcggggcgtagccctgcagggaggacggcagcatccgctcatcgctggccagggtgataccggcgaagcggaaggagtcaaaaatggcggaactgagatacgtctggccgagcgtcagctttga

SEQ ID NO: 397178 - DNA, 243 bp, Salmonella enterica
gtgctcggtcatatccggctggcggacggcgccagcccgccgtttggcgccatggtggtgtccgggaccaccggcagaaccgcggggatggtcggggatgacggcctggcttacctgaccggtctcagtaaagtagaccgccggaccctgaacgtgtcctgggatggccgggtgcagtgcaggctcagtctgccggaaatactgactattagccagggaccgctgttgctgccctgtaaataa

SEQ ID NO: 397179 - DNA, 384 bp, Salmonella enterica
gtggggaacaacaaaaaacatcagtcacgcgttatcactccgcctgaagttatcaaatatgataatcagattgttggctatggttcgcctgaattaagggtagaaaccataccttgttggctcgcccgactcgtaattaccgaaaagcattacagccaccgctttgttaacaactcataccttcatcttggcgtgttctcacatcgcgatcttgttggtgtgatgcagtggggttacgcaatgaatcccgccagtggctcgacggtcgttaccggaacagcaaaccgggaatatatggaacttaatcgcctgtggttacatgactgtatgcccagaaactcagagtcccggtcgataagctatgcacttaaacttattaggtga

SEQ ID NO: 397180 - DNA, 201 bp, Salmonella enterica
atgccacataacgtaagatgccggcattgcaataaactgctcgcaagagccagttttgacttcattgaggtcaaatgcccgcgctgtaagacactcaacactgttatctcaccgagcgccatcgagcaccccacatacacaaggaatcacacctgtggggaacaacaaaaaacatcagtcacgcgttatcactccgcctga

SEQ ID NO: 397181 - DNA, 162 bp, Salmonella enterica
atggataaagaagctcgtctttgcccttcctgtcatgaacagatgacacccatcttccgtggttcattcaccaaaaaaggaaaaacttaccaccctaaaaaggcggcaagctttccgatttggctctgccccagatgttcaccggcagaaaagagtcactag

SEQ ID NO: 397182 - DNA, 393 bp, Salmonella enterica
atgagtcgtttcaccacaccggccactctcgaaatgcttgatcactacctttggcgtatacatgacccctttgagttttacctcagcgacgacaacagcgacgtaatcagcgtaccagccggatttatcactgaccttgccagtgtgccgcgcatcttctggacgctccttcccccggatggcaaatacgccaaagcggcaattattcatgactacctctacgacaatgcgctgcgcacaaagaaagaggcagatcgtatttttctggacggaatgacggtgcttggcgttcctgagtggaagcgcacgattatgtactacgcagtacgattattcggcaaggggatgtataacagaaaaactccagccaataaggccggagttgattactag

SEQ ID NO: 397183 - DNA, 2124 bp, Salmonella enterica
atgaagaacctgaaagcctcgctgattgtcgatttactcggcaacatatcgtctaaatcccgccagtggtcgcaggatttgggggcgttttcgcacgccggtcagcgcggtctcggtggggtgggaacggcggtacgccgtctcggtggtgatgcagaaatcagcagttctcggatgcgccaggcattccgggggatgcgcagcgggatgcacgcggtctcggcagacatggatcgtctgaaactgagcgcggaaggtgttttcggttcactgacccgactctacggactgatagctggcggagccgccatttacggatttaaaaaggcctttatcgatcctgccgctgcgatggaaaactataccatccggctgaactccatcaaccacggcgatacggctaaaaccgaagcgacaaaggcctgggctgtacagaacgcgaaggataccacctgggggctggcgggtgttatgcaggaatacacatccagccgcagtttcgggatgaacgattcgcaggcgaagaagttcatcaccatgctccaggatcagggtggataccatggctggtcgctacctgatgcacagggagcatccctgcagcttaaacaaatgtatgcccgccagagcatccaggcgcaggatgccaacctgctgaccggttacgggattaatgtctatcagcttctggcggacaaactgaaggtggatcagaaagtcatccgtgataagggtgagcggggactgctggggccagatgccattcgtctgttgtttcaggtaatggctgaacaggctgccggagctcagaaaaacgccatgaactcatggaccgggctgacatcgcagatgggggatgtatgggatcagtttgcccgtaaggtcatggacgctggtccgttcagttttctgaaaacgcagatgtccggcattctcgaacagattgctgatatgcagaaggacggtagtctggacgggctggcgaacgatatcggtcaggggatgctgaccgcgtttacgtccgccaaagatgccgtgacctggcttgttgagaaaatcaaagccgcccgtcaggcgctgaaacagttgcgcgatgatggctacggtaaaaccctggacaatatcgccagtggtgcaaaaaccctcgccaaataccttcttctggtctatgccgcccgtactgccctgcgtctggggcgtgctgtcggcatgggggcattccggctggcggctaccccgctgcgctacggtctcgccaccgttggcgcggtcacgtcacctttccgcaaacaccggcccgttatgccgggcgaactgcccggacgcggtggccgcttcatgaacttcctctccggcgtcaatcccgccgcagtacagccggtatttgtgacgaactggccggcgggcgcgctggccggagcagtgggcaatggcggcaataccctgattgaggaaggcggcagcggcagaaaacgccgcagcgggcgcaccaaaaaaggtcccggcaagggccgcggtatttcgacagtggtcacggccggcgaagagctggccgaaagcgccgccaaaaaaggtcttttcgggcgtatggcgtcccgcgtgggcggctggttcggcaaaatccccggcctcagcaaagccggcagtctgctttccgctgccggtagcaagctggggctgggtaaagtggcaggctggctcggcaagggcggaaaacttctggggcgttttggtggtggtgcgcttggtgccgccctgacggccgcccccgttctgctcgatgaccaggccaccacccacgacaagggagcggcggtcggttccggtattggtatggtggccggtggcgcactggggtcatttgcggggccggtcggcaccatgattggctcaacggtcggtagttacctcggcgaatatctgggtggctggctgaccgacgcctaccagaaaatcaccgggagcgataacggcagcggtcaggcggtacagaaagccgccgcccgcgtggagctggtcgcgccgccaggctgggataagcgcagtattgatattgacgactccgatatgttcggtctggatctgaatttctacagcggaggcaactatgtcccctacgggtaa

SEQ ID NO: 397184 - DNA, 366 bp, Salmonella enterica
atggcaggaaatcagtatcagggcgtggcaaccgttcgcgtaaacggcagtgaatacgccacgctggaaggtgcgaccttcacgccgtcgggctttgaacgaaaggtggttaagggtagcagagtgtacggttttaaccagcaacccaaagaagccacgcttgactgtaagtttccggcgggcggtgacgactcccccggaacggatgtaatcaacacatggacaaacgtcactatcgaggtggtaaccgatgttggcgaagttcacatgatgacaaaggcgtggagttcggagccggcatcgcttgccgctaacggcgagatctccgcgaagttcgcctgcgccagaagtacccgcgtgcagtaa

SEQ ID NO: 397185 - DNA, 198 bp, Salmonella enterica
atgcaacaaaaatacgactggtacgcactgttattcaacactcatgaacgggctttcagagcggcttcatgcgtgagtgacagtgcattacatcggtgtcgctgtgccgtcgaaaaggcgattgcttcgggaatggatcaggagacgttcatcagaacggcacttgctgttctggaaggcgaggttaaaaaagtatga

SEQ ID NO: 397186 - DNA, 411 bp, Salmonella enterica
atgaaaattaactatgatgaatttgcaaaaattctcgacaccttcctcgaatcaccaggcgcttttattaccctgaaagatcttaatttctttgaggtgaaaggcgcggaagaagaatctctccatttccacctactgttacttatagagaatggacttatctgtaacagaaacctggaaacgggcgatcccagactacttggttttgtgtttacctccagggggattggcggaagagccgttccaatcatgcttacccaggcaggtcacgattttgcaaacgcacttcatcagaaaccaatccttgagcgacttaaaaaggagtttgcagaagccccgtttgaactggttaaagatgtcagtaagagcctgttaaccaaactcattaaagaccggctcggccttgagtaa

SEQ ID NO: 397187 - DNA, 315 bp, Salmonella enterica
atgagtgctgaaattaaacccgctcaggattatcgcgctgtactcatggcgggcggtatgcctaaagattgtgccgacagactggttgcttatctggatgatgaaaagccagttgagaatgatattgagaagttgctcgttagtgatttgaaaattcagatggctgaagcgctcagtctgtcatggattatacgggagctcagaaagatagctacaggcgaggataaacaggcggcagttgcagccctgcagatacttcgtgagcttagttttcgcttactcaaggccgagccggtctttaatgagtttggttaa

SEQ ID NO: 397188 - DNA, 144 bp, Salmonella enterica
gtgagtgaagaggagcaggaatgcccaacctgtggcaatgaaaaccctgaatacctgaaagaatgcccgtggtgcggttcgcaaaaatgcgacctgtgtgacatgggggatgatacggcctgtatgaattgtgaaggtgaataa

SEQ ID NO: 397189 - DNA, 339 bp, Salmonella enterica
atgacaattattaccagagaacagcaaaaacagattttaattgatacagcgaaccacgtaatcagtcgtgataacacatcaccgtatagcgaaaacctgcgtgaactggcgcgtattgcactggcatcgctggagactaaatcagtggtgtggactgatgcctcgccagcgccggtagtgccggatgactggcgactggttcctaaaaatcctactggccccatgctggcagcaggatatcaggcatatatgaaaggtcagcatcgcgggcgcttttatcgctcatatcaggccatgcttgaggcggccccaaaattatcggaggtggatcgtgagtga

SEQ ID NO: 397190 - DNA, 549 bp, Salmonella enterica
atgatactgccaccgatgggagtacgggggagatgcccggcgcatgtgaaagcctggacgcaggcagaagatgaacagttgatggggctgtacgcaacactgactatagataatatagccacccggttgaaccggacgagatgcgctgtgtatgcgcgggccagtctgttgcgtcagcgctatcctgaacgcctgagctacaaagctgcaccattctcgcagcgggaagatgctttcattcgccaacatgccagaaccatgacctgccagcaaatggcagattgcctcggtcgcagcgcggacactatcagatacagggccaatcttattggtgccagcctggttaaatgtggtgatttgcttccccgtacccaactccccgacagtgatgtgaaacttatccgggcgttgcgtgatgattcacgcccacggcgtctgacgtttcgtgagatcggtgagaagttcggtatatcgggtgcaagggcccgcaatgtttactggtgtcgtcgtactgccgaagatgtcattttgcgggagttattaccatga

SEQ ID NO: 397191 - DNA, 522 bp, Salmonella enterica
atgttctttaaaacctcaaattccgctgcgctggccgcgtgggatcagtatcaattcgactgccagaaggtacgggcagaagccaaaaagcttgaggctgcgctgggctgtggtggtcgcgcgctgttcagggttgatattggtggctgtcgttttcacggcatgtgtttccctgacaatctgcgcccgtttgcccgtgaactgtggacggtacagcgggctaccactggctggagctgtgagccgagacgttcacgtattccggctcatttgcgcgcgctggcgaaagagctggcggacgtatgggacacttaccgtccgataacgatcgccaggactgatgcgttgttactggcgctggggttggatttcagcgcgacactcttcgggccgcttgagtggttccgtaccggcgatgtgatttacgtcagtgcgggcataaaaccttctcacgatcgcatgattgagattctgtctgacgagttttatgcagctaaaaagcaggcggaggtgtccgtatga

SEQ ID NO: 397192 - DNA, 534 bp, Salmonella enterica
atgatcgataaaaaggttctggatggcgttaaggcacttttacaggctcacggcaggctgacctgcgccattctggcggagaaaatgcagatgccgccctcgtcgatggtctactttctacgtgacgcgctggaggctggtgtgttgacggagtgtaacggcttttatgacattccccgaccgcgtccggcgaagccccgtaaacaatatgcgcatatcagtgatgcgccggtgagatggtgcgcgttccgtaagtcagttccctggattgaaggacatatcattccggcgctggttaatgactttgcaatgggggtactgacctgcgaatccgtttacgtggtgatggagctggacgaagccatgcagaataaaggctcgccccggtttaccctcggatatatcgatatacgcctgggtaagtttattgacggcagaacaggctggaatgtcaccagccatgttttgcgctacctggtggttgatcgttctccgaagcctgaacgccttcctgtctctgtggaggtggtctga

SEQ ID NO: 397193 - DNA, 579 bp, Salmonella enterica
atggcaatgcaacagcgttacttcaaattaaatgaagcggactcggttaaatatcataaggagtacctggaaaaaatcggtaaaccccgtaaaaaggctatccgtgattttctgagtgcgtgtaatgcggtcgggtatttgtcacatcaacattttggtactgagcatatcagtgcgctcctggtacgcgggggtgtggactgcggcagaaacaaacgtatttccagtaaaaagtttgatgacgacggtcaggtgctttttgaggtcaggccagaccgccgctacagtgaaggaaagcaacttgcaacccgcctgaaagagataaatgagaaattacaggcactaccgccgtttagcgcctgggctgtaaaaacgctgggctgctatgcagacgcagactacgttaatcacggacagaattttgtcgcctggtctggtgctggttttttccctgagaagaaagcgctggtagtcagtattccggtcggtgagaacggaaaagagcccctgcctgctgatatgagcccgacacttattgaaattaaacactccgaatttattgctattacggaggaataa

SEQ ID NO: 397194 - DNA, 294 bp, Salmonella enterica
atgagcaataaagcacaggttatttttacatttgaacaacagagtcacaccacaacaccggctcaggggggggtaaatgtgatggatttagttgccgcccgagtggagatgtctgaaatgaacgaggaggttcaggcaggcccacacgatgtttgcgccgtgatcctgaagaaaaaagcccccatgattatgcagcttattgcaaccgagctggaaactggtgctaaagcactcggtctggatatgactgtctgtaacgtcgggcaaaaaaataaaccaaccagtatgcactga

SEQ ID NO: 397195 - DNA, 924 bp, Salmonella enterica
atgactgatattagcgaagtaatcaataccattaacgcattaatcagcagcggtcagttaactcagatggttgttgctaaagaaactggtctttctgatgcaacgatttcagccttccgcaaggggaaatacaaaggggataatgcttctgtatcggaatcactgatggcatggtatgagaactggcagcggcgtaatgccctgcctgagcccccccggtttgttgttacgcagacagttaaggagctgcgcgacctctttcaggcggtgcgactgatgggctgtatcaatattatcatcggggttcctggtgtgggtaaaaccgccacggcacgggattactgttctcaccccaatacctggatgatcaccctgtcaccggcgcactccagtgtcaccgagtgtctgctggagctggctgaggcactggagctggggagtgtcgccagaagtaaaggggcgttatcccgtgccattcgccgcaagctgacgggaacgcgtggtctggtgatagtggatgaagccgatcacctgggtgttgaggggctggagcagctacgcgccattcaggatgcaaccggggtgggaatggtgctgattggtaacccgcaggggctttcccgcacctcccactacagtgatctgacgcgtttattcagccgtattgcccgcgccagacaattaaaaaaagctaaaaaagcggatgttcaggctattgctgatgcctggggaataaccggtgagggagcacttgccgtcatgcaggctatcgccgaaaaacccggtgcgctgcgcgttctgacgcacaccttaaaccaggcatggataacggccagtggtgaaggtacacggttaactgaaaggcacattaaaaccgcttttaaagaggtttataccaaccctgaactgcttgcacaggtgtga

SEQ ID NO: 397196 - DNA, 567 bp, Salmonella enterica
atgagaaaagaacagcaaggttcttttcctgagcagggaaaagaacctattatcgaaagaatctttcggctggtagagagatacccatcaaggaatgcggcggccagggcatgggggataaatgaggggacacttaaaaactactacaatcgcaaagatatagccccaacgcctcgttacaaccaactaaaaaagatagcagaatgtgaaggagtatctttggagtggctacaaaccggtcatggtaaagaacccaaagattccaatctgaacaataaaggggcgttagtcacgtcagatttagataacaagatactcactttcctttcatttcttaatgatcgcgaaaaacagcgtctaatcgacgtgttaggtcgcaaaggcgcggaacactgccttatacttttagatagcgatataaatgaattacacgcgcttgaaggtgtgcgtcgctcgttggcattgagtttaaaaaatttacccgaagaaaaagttagagagatttacgaagaatacgaagctaagggtaatcacttcaatgtaaacgaaaaacaggctagcgcgtaa

SEQ ID NO: 397197 - DNA, 249 bp, Salmonella enterica; identical to SEQ ID NO: 390488

SEQ ID NO: 397198 - DNA, 183 bp, Salmonella enterica; identical to SEQ ID NO: 11598

SEQ ID NO: 397199 - DNA, 1053 bp, Salmonella enterica; identical to SEQ ID NO: 91823

SEQ ID NO: 397200 - DNA, 318 bp, Salmonella enterica; identical to SEQ ID NO: 28470

SEQ ID NO: 397201 - DNA, 243 bp, Salmonella enterica; identical to SEQ ID NO: 91825

SEQ ID NO: 397202 - DNA, 1278 bp, Salmonella enterica
atgagaaggaaaatattaattctttccgctgtcctcatttctcctttttcacatgctgagtcatgggaaagcattactaaatccacttatcaaagttctgcctacgctgaaagtaagcaaataaccaatcaggatggctctaagataacggtttactatattgatgctgctatgcaggcctccgcttgtcagggtgctaaatccagtgctcagagtgtatttactcggattaaaccaacttatgagggtatctggcctgattctgaattccgtcttgtttttactggcgattgtacttacagcgattcaccagggcagaaggataaatattggtctttaacggcttatattgttggtaatattcagcgttctgttcctgatgaaaaacctactgacccgacaccagaagaaatttgtgaagcgaagccgccagaagaaggtgtatttaataatgttgattcatatgatggtggtcgctatatctactataacggctgtgaatatgaggctactggtgtcattgtttgtcagggtgatggtactgtttgcgctgcaacatggaagcctacaggtgctgtagctgacccctctgataaaccctcaaccccccaaaatggtggtggtgagtctggcggtggtgagtccagcggtggtgagtctggcggtggtgagtctggcggtggtgagtccggcggtggtgagtccggtggcggtagttctggcggtagttctggcggtggctctagtggttccagtctttctaaaggtgatattcagtctgcgatcgaaggtgcttcacccaaaatagccagcgatattcatgataaattaacggagaaagacacttcatcagatgataaaaaaaatgccgatgaacaaaccaggaataatataaatcgtcttgacgattccattaacaatcttacgcggggggctggccgttttgctgacccttcaggtggtgattctcgttatggaaagggcgactctgaattagatggcgcttctactttggctgattctgaattgggaattgaaaaggattctcacggtgctttatgggaagcgtttttaaataaaggtgctatgctgcctaatttacccaatggtaacggctgctctgattttattatttttcccggagaggtttatcagattgatattggttgcgataaattactgactattaaagatgttctttcatgggttttttattgccttacgttctggtatgtctttacttctttaacttcattgcttcgcaaagggggtgagtga

SEQ ID NO: 397203 - DNA, 342 bp, Salmonella enterica
atgcctttattattaggtattcctgcattgttgcgttttcttattggtcttgttcctttgtttattggctatgtggcgagttttttagctcgacttgctaccagaacaggattaatcgcctttgcattggtcgcattaattacaacaactgttacgcttttaatgcagtaccttgctgaggtcatgtataacggtttacctgctgatttctcccatttaatggcgtctgtattgcctgaccattttcaggcgtgtgttaacgttattatggttactcgtatcagtgtttttgttttcgatttaaaacaaaagtttcttgattatgcaaacagggtgatttaa

SEQ ID NO: 397204 - DNA, 1095 bp, Salmonella enterica; identical to SEQ ID NO: 86251

SEQ ID NO: 397205 - DNA, 1266 bp, Salmonella enterica
atgcgctctgttattgttgcttttttatttgcctgttcattctgcgtttctgctgaaactgttaatttaaataattcatctgttcgctcatttgttcagtggtattcttcaaaaactggcaagcctgttattgttaatcctgatattaaaggaaacgtaaccgtatttaatgctgatgttaatccaacaaatattgatgatttctttaagtctgttctgaatgctaacggttttgtcatgctttctggcaatcctgcggtagtctctttgccgtctaaattaccttcacagatggtttcggattccgatgattctgataaccagtcttatgatacttttccttctgagccatcttaccagccagtacctgtggcgcttacggtcagaaattttaagctgacaaaagttagatcgtccgatgttcagcaactgattaaaatttatcttgattctaatggtggtggtaatgtcgtggattatccaggcaataactcgctgattgtttctgcgcctgacgagctgctgccggttctgtccgattttatcaattctgtggatgttgcccgcgatcaggttctcattcagtcgctgatgtttgaaaccagcttgtctgatggcgttgatttatcgtttgcggcaggttctgcatccggtcataaggttgcggggggctttaatacttctgcactgggtagcgctctttctacggcgggcggttcttttggtatttttgatggtaacgtgttggcgctgtctctgcgtgctgtccagagtaattcacgctctaaggtgatttcaacgccgcgtattcttactcagtctggtcagactggttacatttccgtaggtaagaatgtgccgtttatcaccggaaaggtaacgggcgaatctgccggggtaaataatccgtttcagactatcgagcgtcatgatgttggcgtttctctcaaggtaacgcctgttgtcatgggtaacgggcaactagttctgactatcgacactcgcgctgattcaatcagcaatgatgatcaggcatccgatattattactaatcagcgccagattcagacgacagtccagattaaggatggtcagacgttgttattgggggggcttatcgattcatcgttcagcaatgccgagcgttcagttccagttataagtaaaattcctcttataggctggattttcagtagcaaggcagacagcaatgaacagcgtattatgtatattttgcttacagcacatatcattcgtccactttga

SEQ ID NO: 397206 - DNA, 309 bp, Salmonella enterica
atggattcttatgggattttatctgctctggcagaacgaacgattacagcggaagaagcaaaaacaatgacacttgcagccagaagttcttcggctcaggtaaatgaagcatcacttgctctgttactgattgataatactctggatgcgatcaaagcagctgccagtgaagggaaaggatacactttacttccttcttatgagatttctgtaaaagccattgatttagcagaagaatttttaaggaaacaatgcggctatgttattgataaccagaatggcgtaaggacggtctattggtttatatga

SEQ ID NO: 397207 - DNA, 234 bp, Salmonella enterica; identical to SEQ ID NO: 11589

SEQ ID NO: 397208 - DNA, 183 bp, Salmonella enterica; identical to SEQ ID NO: 11598

SEQ ID NO: 397209 - DNA, 1053 bp, Salmonella enterica; identical to SEQ ID NO: 91823

SEQ ID NO: 397210 - DNA, 318 bp, Salmonella enterica; identical to SEQ ID NO: 28470

SEQ ID NO: 397211 - DNA, 243 bp, Salmonella enterica; identical to SEQ ID NO: 91825

SEQ ID NO: 397212 - DNA, 1278 bp, Salmonella enterica; identical to SEQ ID NO: 397202

SEQ ID NO: 397213 - DNA, 342 bp, Salmonella enterica; identical to SEQ ID NO: 397203

SEQ ID NO: 397214 - DNA, 1095 bp, Salmonella enterica; identical to SEQ ID NO: 86251

SEQ ID NO: 397215 - DNA, 1266 bp, Salmonella enterica; identical to SEQ ID NO: 397205

SEQ ID NO: 397216 - DNA, 309 bp, Salmonella enterica; identical to SEQ ID NO: 397206

SEQ ID NO: 397217 - DNA, 234 bp, Salmonella enterica; identical to SEQ ID NO: 11589

SEQ ID NO: 397218 - DNA, 591 bp, Salmonella enterica
ttgaaaagtaactttatagaaaaggacaatgctgaaaagtcaatttggtgttcgccgcaagaaattatggctgctgatggtatgcctggatctgttgctggtgttcactatcgagcaaatgttcaaggctggacgaagcgaaaaaaggaaggtgtcaagggggggaaagctgttgaatacgatgtgatgtcgatgcccaccaaagaacgagagcaagttattgcgcacttggggttatccacaccggatactggtgctcaagccaatgagaaacaggattcttcggaactgataaacaaattaaccacaaccttaatcaatatgattgaagagctggaaccagatgaagcacgcaaggcactgaaacttttaagtaaaggggggttgttggcgttaatgcctcttgtatttaatgaacagaaactttacagctttataggattttcacagcaaagtattcagacgttgatgatgctagatgcattacctgaagaaaaacgcaaagagattttgtcaaagtatgggattcatgaacaggaaagtgttgtagtaccttcacaggaaccacaggaggtaaaaaaagccgtataa

SEQ ID NO: 397219 - DNA, 228 bp, Salmonella enterica
atgtgttccaacgaaaaggcccgtgattggcatcgtgcggatgtgattgcaggacttaagaaaagaaagctctctttatcagctctttcccggcagtttggttatgcgccaactacattagctaatgcgctagaacgacactggccaaagggtgagcagattattgctaacgccttagaaactaaaccggaagtaatctggcctagccgatatcaagcaggtgaataa

SEQ ID NO: 397220 - DNA, 939 bp, Salmonella enterica
atgaatatttctgatattcgcgcaggactgcgcacgcttgtagaaagtgaaaaagctacttatgcacaaattgcccgcgagtccggcgtggccgcaggaacgttaagcgcattcgtgaataacaagtacaacggcgacaatgaacgtgttgcgcagacgctggaacgctggctggagaactatcaccgtgccgcagagctgccagaaccaccgcgttttgtggaaaccagaacagcacgccaaatctggacgagtatgcgttttgccagtctgactgaaagtatttctgttatctgcggtaatccaggtgtgggaaaaactgaagcagcccgcgaatttcgtcgcaccaataacaatgtctggatgatcaccattaccccatcctgcgccagtgttctggaatgtctcactgaactggcttatgaactgggaatgaatgacgcaccgcgccgcaaagggccgctctcccgcgctttgcgacgccgccttgaaggtacgcaggggctggtcattatcgacgaagctgatcatcttggcgctgaagttctggaagaactccgcctgttgcaggaatccgcccgtattggccttgttctgatggggaatcaccgcgtttattcaaacatgaccggtggtaacagaacggttgaatttgcccgactgttttcccgtattgccaaacggacggcaatcaataaaaccaaaattgatgatgtaaaggccattgcggatgcctggcaaattaccggcgaaaacgagcgggaattattacagcagattgcgcaaaaaccaggtgcgcttcgcatcctgaaccactcgctgcgccttgctgccatgaccgcccacggtaaaggtgaacgtgttaatgaagattatctgcgtcaggctttccgtgaattagacctggatgttgatatttcaaccctgctgcgcacgtaa

SEQ ID NO: 397221 - DNA, 228 bp, Salmonella enterica
atgatgtcacggaatatcagaatggcgacggaagtaaagacctggttacaggagcgcggcagccacgtcaacgaatcctggctgggcgtggcccgcccggtgcttgaaatcacctgcccaccaccggagctggtcagaaacgctgtcaggattatggagcataaatcaggcgttgcccgttcagtatggacggcccgtcttaatggttgtcagattatctggagataa

SEQ ID NO: 397222 - DNA, 231 bp, Salmonella enterica
atgagtatcaggtctggaaaatatattgagtgggttaaacattgtcagcgccacggagtgcctttgacgacatataaatgcccgggatgtggtgaacagcttatgacgcaaagttcccccgaaaatgaagtatgggactctttcacatgttgcccgtggtgcagtggtgttttctttaaacaggtagaaggcgcgaaggtaaaggtcagcgcaattattcagaatcaataa

SEQ ID NO: 397223 - DNA, 264 bp, Salmonella enterica
atggcgaaagtcattatcgaaatcaaaaatgtgacatctgaagttaaagggcagcatttacgcgccaatgttaacgtggaccacagtgcagaactggatggtgatgaatacacgcttgctggtgcgatggcgttactggttctggaaaaaagccgggatatcgttcgcgagtcagcccatgaggccattgaaatactgaaaagtgatggcgtcatttcgggtggcgatgtcacagaaacgacagttgaaggaacacgtcactga

SEQ ID NO: 397224 - DNA, 420 bp, Salmonella enterica
atgaacgccagaatcagaaacgaaatccaggcattaattcgaattaaaatgcgtaataacaatccaggagaattacgcgagtttattttcacccgcaaagtttatgagcatggtgaaactacttatctgattacatttgaccattacagcatttgtgcgcgttattgtggcgaaaacatctctaatgccatcacgtttggcggtgcgtttaacgaggatttatgggagtacgtcatggaccgcgaatacatcagcgcgtcagacccggacgcacgggagcagtggcagaacatctggcgcgattaccggcaaatggcgaaaggctggacgcaggggacgtattcttcccttgccctgaaagcggttcagttatcgctgcggcatattccggcatcactgcgcgaacccctgttgtactga

SEQ ID NO: 397225 - DNA, 552 bp, Salmonella enterica
atgacgaaatacgcctattttaagctgtctgataagacaagccgtatgtatatgaaacgctgggagacagatatttatccggttcgtgtaaagcttgttcgttcattacaacgcgaacttggtgctgctggcatcagtcttgtcagtggtttgaaagttgcacgagtggaaagcgtctggttcgggatgcagccgtcggggttctggaaagtaaaaagcagtaacctttttgttgatggttaccagttctgggaggttatgccggatgtcacgacagttcgggggcaaaagagagaaaagctcatcgcgggatatgaagaacaactgacaaattaccctgaattttcagtatggctgtgtaacgaactgaatattgatttcacgctgaatatctttgatatccggtctgtgtgggaaatgtcatggtcacgcgataggttcagcattttatttaaagttcaggttttttctgacggtgaagtgcatgggcatattcctgctgaatgccagcgtattaaacattctgaatttgtggcactgacggaggaataa

SEQ ID NO: 397226 - DNA, 234 bp, Salmonella enterica
atgtttgtgattgacgcaaaagttttgaatgctgtcagcacattactacgaactcacggacacctgacctgtggtgttctggcggacaaaatgaggatgccagtctctgcaatggtgtatttcctgcgtgatgcggttgatgccggagtgatcaccgaatgtaacggattttatgacatcccacgctcccgaccgactccggcggaaacacaggaaatcagcgagcatgattaa

SEQ ID NO: 397227 - DNA, 198 bp, Salmonella enterica
atgattaagtcaattggctttgtcctgctggttggcacttgcgggaatgatgcctgtgatgccattccggtaacagaaaaaatctggcccacagaacaggcatgtatgcaggtgatggagcgcatacaaaaacgttatcccggtgaaatcttttattgcgaagaggtattaagaaatgaaaatacagatgattactga

SEQ ID NO: 397228 - DNA, 336 bp, Salmonella enterica
atgaaaatacagatgattactgatgctgatttaatggctgcaaccttaatttccagtggcatgtcagaacaaaaggtaaatgattttctggataatgtcgtataccaacgctatgagcgggccagagaaaatttaatttcagaaaaacgcacgatgattgccgaatcattaagtccagcctggattattgaggaattacgaaaaatcattgccagccaggataaagtagcggcagttgccgccctcgatgtgctacagcgaatgagtaaagagctattcaacactgagttaatttttaaatccgggggacataatgagtcgcacatccctgattaa

SEQ ID NO: 397229 - DNA, 552 bp, Salmonella enterica
atgagtcgcacatccctgattaaattaattcatgtcgcccgtcgtgatctacaactcgacgatgacacttaccgcgcctttctggtgcagtgcacgggcaagaccagttgccgcgagctgtccgttgcacaactggaacaagtgctcgatgccatgaaagagcgcggttttaaaaagcagaaaaaacatccccgccgtcgctttaaggggcatgtcacaccgcgcgagaagatttataaaatctggcagcagatgttttttgatggtttcgtctccgatatcagcgacgccgcgctggacaaatacgttgaacgtctgacggccagacgtaatggtggtcagggtgtttccacgctggcctggtgtcatggggaatcgttgcaggttgtgctcgaaacgctcaagcagtggcatatgcgctgcattcgggaagcctttgcccgacatggcgtgcctttacctgtgagcgaaaccgggcgggaactgcgcggatatgatgcactgaccagtgcgtatgcccgcgccagaaacagcgggagaatagttctatga

SEQ ID NO: 397230 - DNA, 402 bp, Salmonella enterica
atgaaagagcaggatttatttggtgattatcaggacgacagtatccttgaatattttgatgatgttcaggaaaaatcgggatttccatctttactggctgagctgaatgctctgttgcgacaagagctgataaggcttggagttaaccctgcccactcccttgagctggtagtggcgatttgcaatcatatcggtgggattcaggtatatgttccgaaagggaaaatactggaaaatcttatcagagacatgcgcatctggcgtgattttgatgggaaaaacgtagcggagctggtgcagcgttacaaagtgacatacaaaacggtatatcaggccatcaaaagaatgcgccgactggagcgtggaaaatatcaaatgcaactatttaaggacgaacaatga

SEQ ID NO: 397231 - DNA, 498 bp, Salmonella enterica
atgaaatatcttccccttattcttttactaactgttactactgtacaagcggcggatacattccagcaaaaagtcaaagatgtttttcagaaaaaaacatccgttgactataccgactggtacggtaaagatgacgctgccattgctgagtttaaaggatttaacttaggtgtatatcaggatttaaagacgtctgtgcgagataacgaaatcaacataaaaatgcagtatgttacaggaccggttcgccccgatagcgacgagttcgctcaaatgacgtctgctttatgtgaaactgtttttgagccttttgttgtccctgattatgttcgcccgacatcatgggacgatgataccccagccccgctgaatttcatgcaagttaaaaatttaaagcaagctgaagatgatcctgtcgaaaaaacagtaaatggctggaagataaaaattgaacgttcagtaatgaagactacgtgttctgcccgtaaagttaactga

SEQ ID NO: 397232 - DNA, 597 bp, Salmonella enterica
atggaaaatcaaaaattctccccggcctttgagcatgcgctgaattttattctgcgtcctgatatcgaaggcgtctatgtcaatgaccccactgaccgtggcggcgaaaccaaatacggcatttctgaccgccgcgacggtgtgattgacggcaaaactgatgtcaacggcgacggcaaaccggatacccgcatcagggatttaacccgcgaacaggttgcgcagatttactggcgcgattactggctgcctgccggatgtgaccagtggcctgatggcgtggcgatgtttgtgttcgatgctgcggttcagcatggcgttaaaaaagccatcaaaattttgcaggaagccgctgatgtggatgctgacggcatcatcggcccgcgtacccgtaaggccgtgagcctgtccaccccggactggctgctggcccgctgcattgtccgtcgttcccgcttttatgccgacatcatcaaatcaaaacccgcccagggcaaatacctgaacggctggtttaaccgcatggaaaagctgaccgacgcctgtctggaaatcatcgatacccctctgggcatcatgtccgccacgcgggggtga

SEQ ID NO: 397233 - DNA, 228 bp, Salmonella enterica
atgggcaaaggctgggatgcctcactgaaagccgggcggcgtgaccgcctgcgtcaggaggttctgcaccgcatggccggaggtccgcctccgaaaccgctggactataccggccatgatggcacacacgccagctactacatgcgtggctggaactccgtggatacacgggacattttctggcagtgccagaagtacaaggaaaaactcaatgcacagaatgaatag

SEQ ID NO: 397234 - DNA, 411 bp, Salmonella enterica
atgcacagaatgaatagtctttttgttcgcgttatttactcccgctttatgttgtgccagtggtcgtttctggggctgtcggcagtactttttctggcgagctgttttgccggatggcgggcgtttgcggtcatggtgctggcatacggcgcgacactctgcctgattcacagtttccagctgggcaacgtaccttatcgcctgcagcccaaaaggcgtttccgggccgcctcccttcgaattgtcgtgtggtcatgggtggtctgggccgttggttttttcatgctgacattcggcattctttatctgaaggagccttatcagctggcattctggctgggcggtatcttttgcgcggcactttataaacatcagcgccgttttcataagggggattcatggatccgttaa

SEQ ID NO: 397235 - DNA, 609 bp, Salmonella enterica
atggatccgttaaccctttcaggcatcgcctctgttctgctgaaagccgggccggggctgattcgttccgtcgggcgctggtttggtggcagcacatctgccgccgctgactcggtggccggtatggtggaaagcgtccgggaaagcctgccggtggctgaacagcaacgcattctggaacaaaaactggtgatgctgtcaccggagcaactgatgcagctggaaaccctgaaagttcagctgcaacagctggaggtggaacggcagaagctggtgctggctgaccagcaggccgcacaccacgaacagcaggaaaccatccgcaatggtgacaacgccacggacagctatgtgcgccagacgcgcccgctgctggcccgcctttcctgttacagcagtctggcctatgtgctgttgctttcctgcggccagattgccggagccattgccggtgccagcggtatcacgctgcatatgccgtcaccggactgggatatcacgctgatgttacttaccccggcgctgggctatctcggcgtaagaacccttgacggctttgcccgttacagcaagtcaagcaaggacaaaatttctgcggggctgaaatga

SEQ ID NO: 397236 - DNA, 228 bp, Salmonella enterica
atgaccgacgaaatcgaccgcatcagtgaagtggttctgaacgagcgtcagagcgtcgttaaagcctggcagacgcggacaaaagaagcgccccacagtcggggcttatgcaatgactgcgggaacgttattccggcacagcgccttgcggcgctgccggatgtggtgacctgtattgactgtcagcagatgcgtgaacgcaggaggaaaacgtgtcctgggaaatga

SEQ ID NO: 397237 - DNA, 306 bp, Salmonella enterica
gtgtcctgggaaatgatcagagccaactggcccattctgtgggcattactgatgacaggaataaacctgcttcagttgattctggcaaagacctacgtcaaacgcgaagagtttgattcactccgttcccgcgtgtcggtgatggaaagccaggtacaccatttacccgaccgtgatgagttccaccgcctgcaactggatatcagcaatctgcggggagaaatcaaagagctggggccatccatccgccaggtatcccgcatcagcgatttgttattagagaacgagttaaaggaaaaaaaataa

SEQ ID NO: 397238 - DNA, 294 bp, Salmonella enterica
atggcgatgaaagagatcctcactgaagaccgtcgtctggtgttgctgcgttccctgctggactgtggcgacagcgcgaatgaatccgtgttgcagacctgccttcaggcctacggtcataaggtatcccgtgatgtggtgcgcacccagcttgcatggctgcgtgagcaggggctggttcgtctgtctgatgtgggcggctgttacgtggctgaaatcaccggcagcggtgaggatgtggcaaacggcctgtccagcgttccgggcgttaaaaaaccccgtgcgagggactga

SEQ ID NO: 397239 - DNA, 288 bp, Salmonella enterica
atggcccgaaaactgaagccgttaagccgtggagaacgtgccgtcgtgcggcaactggcgcactgccttgtgctggcggatatcgagcaaaaggccattgcctgtgcatatgaacaacagaccggaaagccctggaacccggattcaccggacacgcccatgaaacgctttctgcggtcatcaccggcatgtgcgcggctgtggaagctgttaggtaaggatatccagtccgttcgtgaagaaatatacgccggtctgaaaacgcagaggtctgaagatggaaaatga

SEQ ID NO: 397240 - DNA, 582 bp, Salmonella enterica
atggaaaatgaacaacgccccacccgtggccgtctttccaaagtggatttactcccggacagcatccgggagcagttacatcagatgctgcgggaaaagcggcacacgcaggaagaaatccgcgaagccatcaatgccctgattgacgaacacaacctgccggaagagatgcagttaagccggacgggcttaaaccgctacgccatccgcatggaaaaagtcggggcaaaaatccgtgcctcccgcgaaatggccgaagtctgggcggcaaagctggggtccgcgccgacgtcagacgtcggcaagctgctgatggagtttgtaaaaacgctggcctttgaaacgtccatgtcgatggcagaagacgacaaacctgttgcaccgaaggcgctgggccaactggcgctggttgcccagcgtctggaagcggcagccatgaccagccataaacgcgagaaagcgatccgcgatgcgtttgcgcaggagatggcagagaaaaccgaagaactggtcagaacgggcggtctgtcaggcgatgcagctgacaccatcaaacgtgaaattatggggattagcgcatga

SEQ ID NO: 397241 - DNA, 1536 bp, Salmonella enterica
atgacacagatgaacacgttcagtgaatacgatgttctgctgccgtatcagaaacgctgggtggcggatgatgccgacctgaaaattgcagagaaatcccgccgtaccggtttaacctgggcggaggcggcagatgcggcactgacggcatcgctgaagaaggaagacggcgggcgcgatcacttttatatcggttcgaataaggagatggcccgcgaatttatcgacgccgtggcgatgtgggcgaaagcatttaatgcggcagcggaagaaatctgcgaggaagtgatcaccgacgaagacaaggacattctgacgttcgtcgtgtacttcgccagcggttttaaggtcaaggcactgtccagcaacccgagcaacattcgcgggatgcaggggaatgtcaccatcgacgaggccgcgttccatgaaaaactggacgagctgctgaaggctgtgctgccgctgaaaacatggggcggaaaaattcgccttatttccacccatgacggcgtggacaacctgtttaaccagctgattctggaaagccgtgcaggaaaacgggattaccgcattcacaccatcacgctggatgacgcctgcaatgacgggctgtaccggcgtatctgtcaggtgcgcggcatggtgtggtcaccggaagccgaagcggaatggaaagaaggcctgctgcgaaataccgccacccgtgaagacgccctggaggaatattactgtgtcccgaaaaacggcggcggcacgtatatcccccgctcactgcgtgaacgtgcggcccgtggcaccggaaaagtgttgcgctttaccggcacaccggaatttaacgcactgacggaaagtcagcgccgggcagatatccgggaatggctggaaacagtggtgcgccccgagctggaaaaactcccgcagaacctgcgccactgtctgggggaagactttgcgcgttcgggtgacctgaccgtactggccccggtgacggtgaacgatgacaccacccgcgaggtgccgttcctggttgagcttggcaatgtgccgtttaaacagcaggagcaggtgctgttctggctttgcgatcgtctgccccgtcgtgacggtatcaaaatggatgcgcgggggaatggtcagtatctggcagaacaggcggcagagcggtacggcgatgaagtggaacaggtgatgctgtccgtggcgttctaccgcgaaaacatgccccggttccgtgcagcgtttgaagatgatgagctgatccttccgaagcatgaagacgtgatcaatgacctcggggccattcagttactgcgtggcgttcccggcattgatgattcacgaaccaaaggcagcgacggtcacaaacgtcacggcgacgccgctgtggccattttcctgggcttccttgccagcaaggatgactgccaccgttacgagctgcaccgcctgaaccgcccggcgaaaccggaagaacgcaacgcgcgccgccagatgaagctgacgcgcggcctgaaaaatgagggaggtttactgtga

SEQ ID NO: 397242 - DNA, 1572 bp, Salmonella enterica
gtgaacctgaaacaactggccggggccgttcgccgtctgctgaacccggcaaccggtgaggaagacacgctgaaaaaagaggcgctcaacgaagctcaggcccgtccgcgtcatgccggtgtgcgttcggcctcgccgggtatcagcgtcgcctccgggctgaaccccggcaggctggcaggcattctgcgcaatgccgccgacggcatcacgcgtgatttttttatccttgctgaagagatggaagaacgcgatttgcattacgcctcggtgctgcgcacccgcaagctgacggtggcgggtatcgaaccggtggtggtggccgccagtgatgacgatgctgacgtgcaactggcggatgccatccgtgagctaatggccgcgccgcaaatccccgaactgatgtttgatttgctcgacgggctgggaaaaggcgtggcggtctgtgaaatcctgtgggacacccgcaacaaccactggatgccccgtgattatgagtgggttgatccccgttttctgaaagccgaaaagcccacgctgcgccagttccgcctgctgacggacgatgaaccggtggatggcgtaccgctgacaccgggaaaattcattgttcaccagccgcgtctgaaatccggtctgccgctgcgtaacggtctggcccgtctggtggcggtgatgtacatgctgaaatcctttaccgtgcgcgactggtgggcatttgcggaaaaattcggcattccggtcacggtggggaaatacggtcccaacgccacggaggagcaaatccgcgtgctgattgatgcgattgcctccattgcctcggatgccgggtgtgctattccgcagtccatgcaactggagatgcaggaaaccgccagccggaataacggcggcgcactgttccgtgaaatggcggaatggtgtgatgcgcaaatcagtaaggctgtgctggggcagaccatgaccacggataacggcagttcgcgttcacaggcggacgtgcacaatcaggtgcgcatggacattgtgcgctgggacgcgcgacagctggctaacacgctgaatgaatatctggtgcgtccctatatcgaggccaactacgggccacaggcgcactacccccgtgttgttctgcgtatcagtgaagcagaagatctgaaggcgctgacagatgctctggtgccgctgattgaccgggggatgcgggttcaggaatcggagctgcgggaccggttcggcctggctgaaccggacgaaggggctgatgttctgcatccggtttctgccggaatgtcaggtgatgtggcgatgaaccgcgagcgcgtcgccctgaaccgggaacaccccgacgaactggcacagatggtggatgatgccctgcgtgactggcagaaaaccggcgaagcgttcacgaacccggtgctgacactggcgcaggaatgcgacagttttgatgactttctgaaacgcctgcctgagcttcaggaaacgctgaacgcggacgactttgccctgcaactggcggaggtgtgctttaaggcgcgtgcgctgggagataccggtcatgcgtga

SEQ ID NO: 397243 - DNA, 765 bp, Salmonella enterica
atgcgtgaaaccctcatcccgaaagaggcgctggcgtggctgaaggcgaagaagctgcgccccggttttgattaccgggatgtatggcgggaagaacaccggaacagcttcaccgtggcaaaaatgctgcaactggatttgttgtcggatgtgaaagcccttgtggaagacgccctgcaaagcgggccgacgttcagcgagttccgggaggtgctgcaaccgctgctgataaaacgcggatggtggggcgttcaggagatggatgatccgctgacgggtgaaaggcgcaccgtacagctgggcagcgaccgccgcctccgcacgatttttgacaccaacatgcgcaccgcccgcgcggcgggccagtgggaacgcattcagcggacaaagcgggccatgccgtatctgatttacgagctgggaccatcccgcgagcaccgggcggagcatgtgaaatgggcgcgtctgtgtctgccggttgatcatccgttctggctgacacatttcgcccctaacggctggggctgcaaatgcaccatccgtcaggtcagccgtggtgaatatgcgcaactggcggcacagggcaccattcacaccgaagcgccggaaatcagaactgtccgctgggtgaacaaacgcacgggcgaagaggaatatgtgccggaagggattgatccgggctggaactacgatcccggtataaaccgtgagcaggagctggcgcgccagctggcgacaaaacaggcccgttttgacagtgagtaa

SEQ ID NO: 397244 - DNA, 963 bp, Salmonella enterica
atgcaaccggaactgctggcgctgtgtttttccctgccagaacccatccctgagctgacacctgctcaactgccggaatggctcgaactcgtccctgcgggtgagttcaccgggcgcgatggccggacgtggattaaccgcaatccgcatgaggtggtcacccgctcgtccgacatcaaaattccggtggacattgaacacgcaaccgaaattaaagggcaacgcggtgatgaagccccggcgtatggctgggtggaagaactgcgcgtgacggacagcggcaccattgaaggccgtgttgtctggagtgagtacgcccggtggatgctgagcgaacgccgttaccgctattacagcccggcgtttttctatgacgcggagggtgtggtgacgcgcctgtccagcgtcgggctgaccaacaaacctaacctggattttcctgcactgaatacggagaaaaacccgatgacagtacctgtgcaaatcactggcctgcttgggctggctgaatccgccactgtggacgataccgtggccgccattaaacaacttcaggagaacgaacaggtggcgctgaaccgcgcacagacacctgacctgacgaagtttgtaccggtggaaacccacaatctggcactgaaccgtgccgaaaccgcagaacaacgccttcagcaactggaagagaaggaagcagaagcgcttgtggatgcggccatcgaagccggaaaagtggccccggcaaaccgtgacatgttccttgccacctgccgcacggaagaaggccgcaaacagtttgcggagtacaccagaggtgcacagccgctggtgaacaacgacaagcccagccagggcaaggataaacccgcgcagacactgaccgacgccgaactggcgatgtgccgcagcatgggtattaccggggaagagttcctcgccgctaaaccgaaacaggagaataactga

SEQ ID NO: 397245 - DNA, 903 bp, Salmonella enterica
atgggagcagtcacttccgaagtccttcacgcgctgaccacctgtctgagcgccgcttatacccgtgggctgagtggtgtcaccccacagtggcagcgcatcgcctctgaaatcccgagttcgtccgcctccaatacctacggctggatgaaagatttaccggagattaaggaatgggtcagcgcccgtcagatggcaacgctggacggttatggttacacccttgcgaacaaaacctgggaaagttcgatccgcgttaaacgcgaacacattgaagacgatcagattggtcagtacagcattatcgctgaacgctatggccgccagacgtcggagttcccggacaagctgtgttaccccctgctgtgtgccgggtttaacaccctgtgttttgacggtcagaacttctttgatgaagaccacccgctgggcgacggcacctgcagcaacgttgtcggcaccccggcatcagaccagggggaaccgtggtttctgattgatgattctcaggtactgaaacccatcatctggcagacgcgacgcgcctttaagtttgaagccctggatgatctgaacagcgagcataccttcaagaataacgagttcctttacggggtggacggtcgctgcaatgcgggcttcggcttctggcagaccgccgtcggttcccgtgcggcactgacagcggagaactacgagaaggccagcaatctgctgctgggtatgaagaccaccaacggtgaaccgctgggcatccgcccgaccacccttgtggtggggcagaaaaaccgtgcagccgcgaagcgcatcattgacgccatgctggttaacggcggcgattccaacatctggtacaaggatgtggacatcgtggtcagtccgttcatcaccaccccggcataa

SEQ ID NO: 397246 - DNA, 312 bp, Salmonella enterica
atgagtgaaaaagcaggaaccaaaggcgcgaaagccgcaaagaacagcgcagcacaggaaaacccggcaccgctggcagacgttattgtggctgacggtcaggcgaatgaaccacgtccggctgaagacccggttactgtacagggtgacgcccctgtccggctgaacgtccgggccgtgtctgaaaacgggttctggcgctgtggccgtttctggtcacatgctggtgaggatgtggcggtgaccgctgcggttgccacccgcctgatggcagagccgaatctgattgtccgggaagcggagaaaggctga

SEQ ID NO: 397247 - DNA, 438 bp, Salmonella enterica
atggggtatatcacgcaggaagacctgttacgcgcggacggcaatcttgtctggaacatggcgattaaccgggaaaccaacgaactggatgaagacaaaatccgtcaggccatcagtgatgccgaagcggaaattgattcgtttctgtcccgccgctaccagctgccgctgggagtgacggaaatcccgcgcccgctgcaacgcgtggcggtatcgctggcgttttactggttgtcagagcgtgacaatcaaatcacagagctgatccagaaacgctacgacgacgccattaaaaccctgcgtgagatggcgaacggcacccgtgacctgggtctgccgacgtatgccaccccggcagaaaccgaccacgggaagatcattgtggtgggtgccaatgcccggctgttcacccgtaacaacctgaaaggagtgctgtga

SEQ ID NO: 397248 - DNA, 543 bp, Salmonella enterica
atggggatttctgtacaggtcagcggtgaccagcggctggaggatatccgccgtgccgttgaaaagctggcagatggttcattgcaggcagagctgctggagagcatcggtgcggtggtggaatcacagacccgccgccgcatcatcgatgagaaaaccagtccgggtggcgaacgctggccggactggtctgacgggtacaaaaagacccgccacggcaaccagagtctgctgcgcggtgaaggccatctgctggagagtatccagtacatcgtggaaaaccgtgtggtgcgtatcggttcaccgctggattatgcccgcatcatgaatgacggcttttccggcagtgtgccggtcagcgcccacaaacggcttatctcgcagtgtttcgggcgggcgctgaaatatccggtctggcagaccgtcggcgcacataaccgcatgatgaacattccgcaacgtgaatttctggggctgtcttctgccaatcagcaggagctgcaacaggttatcagtcatttctggaaggaggttctgccatga

SEQ ID NO: 397249 - DNA, 612 bp, Salmonella enterica
atgacagaacaacgccctgaactgcgcacaccggggagcaccgttgcggccgcagagcgcattgtggcctggctgaaaacagcacttcaggggaaaacccctgaccgggccgacgtggtggagcgtcacatcggccagttcaacagcccggaagaagtgaagcgctatctgtccggtcgtaccggctgtatccgggtagctgccctgcgtgtccgggatatcaacccgcgcggcgggctgtccggtctggttacctgggtggcttacatcatggcgacggattcgtgggggtactcccgcgacgtgcgctgtgaagtgctggccggaaaggtgatcaaacgtctgctgtcgtcggatgccacagcgggcatgggggctgaacgcctggctgctgatgtgcgggcagacaacatttactccgtcagcctcgacgggctgggtgtcaccatgtgggcggtgacgtgggagcaggaattccggctggatgaagagattgatctcgccgcgctcccggacttcctgcgcctcggggcaacgctgcgctgcggcgaacacactgaaattaacgacgtgatccatgtacggggtgacgatggaacagaaactgattaa

SEQ ID NO: 397250 - DNA, 201 bp, Salmonella enterica
atgtacggggtgacgatggaacagaaactgattaagccagcgcgggaaaacgtccgtgtccgtaaaccggatggcgcgcatttatccccggaaggggaacgtctcgacgtctgcgcttactggctgcgccgtgaagccgagggagatgtggaaataaccacacttccgaaaaataacaacaaaaccagagggaaaaaataa

SEQ ID NO: 397251 - DNA, 1476 bp, Salmonella enterica
atgtcgctgggttcaattcctgatgatatccgcgtcccgcttgtctggatcgatatcgacaattctcaggcgctggatggtgcatccgcgcaaagccgaaaaattctggtcatgggccatgcggtatcgtccggcagcgcagacgccctgtcactgacccgcatcaccagtgacagccaggcagaccagctttatggcaaagggtcgatgctggctgaaatgctcaaaatgctgcgtcgtgccaacacgtatacggaaacctgggcaatgccggttgccgcacctgttggcgcggccgcaaaagccacgctgaccgtgctgggtacagcgactgaagccggaacggtggcactgctgattaacggtgtgtccgttcaggtgagcgtgagcgccggggctacgaaggaaaacattgcaaaagccattgctgatgcggtgacgaaaaagcctgccacgcaggtggccgctgcggtgaaggaggatgccacggatacagtggagctgaccgtgaactggcacggcgtcaccggcaacggtgccgacgttcgcctgaactactacaccggtgaagccttcccggcaggtgtgaaggtgaccgccaccgcgtttaccggcggcaccgggacaccggaaatggcggatgccgttgcggccatcggcccggagtggtttaccgatatcatcgccccgttcaccgacacgaaaagcctgaacaccctgcgtgatgaactgctgaaccgctgggggccgctcaaaatgatggaggcgcagctgtggacggcgtttcgtggcacgcacggcgagacaggcacgtttggtgaaaaccgcaatgactggctgattagctgtatcggcaccaacctgtcaccgcacccggcgtggatgtgggccgcgtcatacggcgcaacggcagcgtatcaccttgccattgacccggcgcgtccgcttcagacgctggtcctgaccggcattctgccgcctgcgcgtaatgttcgctgggatatgccggaacgtaacctgctgctgcatgacggcattgccacgcacatggtggacgccggggataacgtctgcatagagcgtgaaatcaccatgtaccgggttaaccagtacggtgatgcggatgtgtcgtacctggatgtgcagtcccccgccacgctgggccgtatccgttacatcatcaaaaaccgtttcacgaaccgttatccgcgccacaagctggcagatgatgacgtgctggactcactggatgccggtcagccggtgatgacgccgaagctgtgcaccgcagagctgctggatatctgccagaccgaacttattcctgcgggccttgtggagaacttcagcgattacaaggacacgcttcaggtgacacgcgacagcagcgataaaaaccgcctgaactttatctgccacccgaatctggtgaaccagctgcgtgtgctggcaggcctgattcagttcaaactttaa

SEQ ID NO: 397252 - DNA, 357 bp, Salmonella enterica
atggcaaaaattcttggcatggcgaccattcgcgtgaatggccgcgaaattaaaaccgaggggaaatccacgctgaatccgggcggcttcagtcgcacccagcatatgggcggcggcaaggtttggggcatctccagcaagatggcctcgccgtccatcaaagtgaccattgcggcggctgcggatatggacgtgattgaaatcagcagctgggaagacgtcacggtgatgttctacggcgacaatggcctgaactacatgatgacaggttccgccacggataacccggcggagctggacgaggattccggcaccatcagtgccaactttatcggtgaaaaatgcgtgaaggtgtga

SEQ ID NO: 397253 - DNA, 396 bp, Salmonella enterica
atggccgcgatggaatttgaactgaaacacgggcttctgaccggcaaaggcacggcagatgaaaccctgcataaaaccgtgaagctgcgcgaactgaccgccagtgatgtgattgatgcacaactggccgcagaacgcgtcgtcatgggcgggaacggaaaggcggtggcctactgttctgaagtgctgatggggctggagatgatgcgccgtcaggtcgcggccatcggcaacattcccggcccgctggacatgaaacagctgcgaatgctccacccggcagaccttgaacttatcagcaccaaagccgctgcgctggatgacatgcttgaggaggtggcaacgcgggggcgaactgatgccgctggcggcggcactgatgaacctgctggttaa

SEQ ID NO: 397254 - DNA, 138 bp, Salmonella enterica
atgccgctggcggcggcactgatgaacctgctggttaacctgtcccagagattcagcattcagtacctggaacagctgcccctgcggcagctgttccgcctgataaagcaactggagaaacagcatggcaacaggtaa

SEQ ID NO: 397255 - DNA, 1866 bp, Salmonella enterica
atggcaacaggtaaccgtctcagcacggaaatcatgatcaaccttgccgggaacctgaccgccaaagcccggcagtacggcgcaaacatgtcgcagttcgcccggaaccatcagaaggccatgcgccttgtcaaagccacaacggaggccgcaggacgcggccttgatacgctgggtaaccgctacacggcgatgattgccggttttgcgggtagcgccatgatgcgtgagtttgcgcaggtggatcgccggatgacccgtattggtattgccgcagaaaagacgcgcgacgaaatggcacagatgctgaatggtattcaggacgccgccatcaaatttaaggttgatgacagtgaactgataagcgcagtggaaaaagtcggcaccgtgacgggtgagattgattttggtgttaaaaacaaagaaatgatggcggcatctatcgccgcttccggaagttcaggcgaatccatcggctcgctgttttctcagtttacgaagttcggcatcaaggatgaaaacgaagccttaaaggcaatggatactctgaacctgctgggaaaagaaggtgcctatgaactgaaagacatcgcagaaaaagcaacccgtgcgatgtcgctgtattccgctgcgggcggacgtggtgtgcagggtgtcaaggacgtaggggttgcacttgaatctgccgttgatgccacagggaaccgtgataccgccgcaaccgctgttgaaaacctgatccgtgatttacagcttcctaaggttgtaaaaacattgcggacaaatggcattgatgtttacgggaaagatggccggatgcgctcgcttccactattgcttcaggagattgccagaaaatcagggaaccggggcgcagaagaacaaaataaaaggctgattgaagccggttttaaccaggattcagtcatgcttttaagcagcgtaacgtcaggcaaaggtgcagaaaacctgcaacgttatatgaaagtcgtcggtgatggtaaaggcatcatgaaagatgccgcgtatgctgcacaggattttacgtcggccatgcaggcgctggaaaccagctggaaaaaattctcccacaaccagctggcaaaacccgttcaggatctggctgatgccattaacagcgtggaccagaacactgtccagaactggttgcaggtcggtaaatatatggcgattgcgctgggcggaattatcgccatcagaaagacgtatcagttcggtaaaaccatccacgacatcatgaatcccaaagggaaaggcaaaggaatacccggcggcatcacggatgttttcggctccggtgtgatgccggtttatgtggtcaatatgggcagtggcgggatgaatggtaataccggcggtctgccggatgcaccggattcatcgcgcaatccccgcaatcctcgggggtcgggtaagcgtggaggaaaggcaggtaaaggcgctggcatcattgccggtgctctggagttttacgattttctgaccacgcaatatgccctgccgggtgaggttgacagccttacaaaattcgttgccagtaatgccagcgccagcccgtgggagcgcgagttcgcgcaacaaagccaggataaccagaaagcgctcgagtccgtctggcgtaaggtaacggactggttcaactcgctgggtgacaagaacattgccgacccgcgaccgtgggcaggtatgcaacccacacagaattatcctttccttccgcagcaattgcagggggaaatccgtgtggtggtggaaggtgacgcccgcgtgaaaagtgtcagagtggatcaacccggcgtcagactcagtgcgcaggctggcgtcaccagtgtggagcagggttaa

SEQ ID NO: 397256 - DNA, 1275 bp, Salmonella enterica
atgacaatgagtaacggcaaatgggacgggctgcgcgatgcctcgtttcgcggtgtccccttctttctggtggatacggaaggcaccggtggccgcagagcgattccccgtgcgtatccccggcgcgaaaccgcctggacggatgataacggggccgttccggggcaacagcagattaacgcaaagctgccaggtaaaaacttccgggatgatttaaacgcccttttagacgcgctcaatacccccggccccggcgagcttatccacccgtggttcgggatacagaccgtacaggttggcaaggtcacccatcgcctcagcacggaggaagacggcattgcgtatgtcacttttgaagtgtttgaggcaggcgagcgcctgttcccgtctgcggcggataacacgcagcaggaagtgctgacgggcattgatgcggtgaaagccgccattgacgatggcgactggttcggcgcactcgacgggctgggtgagatggccgacagctttctggccgatatggaaaaccttgtggctaacctgcccacgctaccggcagcactgaatcagtggatggacaggctgaaccattttaaggagatggccggaaccattattgccacgccggggcgcctggtcagtgagctgtcctcgttcatcgacggcgtggttgatctggtgacggaaccacccgaagcactggcggtttacacgacattacgcaaccagtgggccggagaacgcgcccgacaggttgccaccggcgcactgccggatgatatcaccgtgaagccaggcagcgtggcagacggcgaaattggctttgctatcgggctgtcaccggattatcagccggtatctgtcagcctgcagaagaacattgacgacttccgccaggtggttgtgctggaaaccctgctgggacaggcaaatgctgtggcctcgatgacgttcgataccagtgatgcggcattatctgccggtgacacgctggcggctgaactgcatgagcaggcggtggcagcggtggaaaataaccagcgggcattgtggcgaacgctacgcgatttacggcaggccgtgattacggatgcccgcgagcgtgccgcccgtctgccggaaacccggcaggtgacgttgaccacaaccacatctgccgcattgctggcatggcgcgaacatggtgacacaagccgacgggatgaaatcgtgcagcgtaaccgcctgcgccatccgtcattcatactgccaacgcaacctgtggagattaccgactga

SEQ ID NO: 397257 - DNA, 1071 bp, Salmonella enterica
atggaatccgtgattcttaccgttgacggcaaactgtgggaaggctggacggaaatgtccgtcagtcgttccctgaaggcgattgccggtgagtttgatctcagtgtgacaacccgctggtcggcagcggcaccgcgcgtaattcgtgaggggcaaccctgcacggtcaggctgggcgcggataccgtgctgacggggtatatcgatgattttatccccagctatgacgcagataacgtggagattcgcgtcatggggcgcgacaaaaccggcgacctggttgactgctctgtggtgcattcgtccgggaaatggaaaggtgtgcggcttgaacaggtggcggctgatgtctgccgcccgttcgggataaccgtcatcacggaaaccccgaccggggaggcgtttgcgtccgtcgttctggaacagggtgaaacgggttttgaactgctcgaccggctggcaaaacagcgcggcgttctgctgacgtctgacggcgcaggtaacctgattatcacccgcgcctcttccgttcgcgcgggtgtgtcactggtgctggggaaaaatatcctcgcagcccgtgggcgcttcagctggcgggagcgtaacagccagtacatcatcaagggcaccaccagtgccggtggcaaactgtgggacagccagcctgcctcgatggtgggtggtcgccagtacatcaccgaagacccggaaattaaccgttaccgcccgcgcattctggtcaatgaagacagcctgaccgtgggcggggccagcattcgcggggaatggtacaaagcccggatgctgggggaatcccgcacgacggaaatcacggtggcaggctggcgcgaacagggcgacagcggcccgctgtggcagaccaaccgccttgtcgatatcgacgacagcattcagaacctgaaaaccacctggctgatatccggggtgacctggacggatggcgcacaggggcggatgacggttctggcgctggttccgcctgaatcactggacatgccggaaatgaaagcgaagacgaagaaaacaaaggcggtggccacatgggattaa

SEQ ID NO: 397258 - DNA, 537 bp, Salmonella enterica
atgggattaaacgccattgcccgccgtctgcggctgctggttgatcgtgccgttgtccgcatggtgtctgacagtctggagcggcagaacctgcaaatccagacgctggcagatgccactgacgacgacgtggaacgcttccagaactacgggtttacttccgttccgccggaaggttctgaagccattgtgctggccgttggcggacggcgtgacgggctggttgccatcgcggtggaggacaagcgatgtcgcccgaaaggactgtcccccggcgatgtccggctttatcaccgggacggcaaatcacacatcaccctgaaggaaaacggcgtcattgaaatcacaggagaacaattaaacgtttcagggaaaacggtaaatctcaccgccgacgaattgctgaatattatcggtaaacaaatgaaattcgtcggtccctgtgaatttactgaagatgtcagaatcaacggtaaatcattcatcgaacacattcataaggacggcgacaatgagaatgcatcaccgcccgtatga

SEQ ID NO: 397259 - DNA, 453 bp, Salmonella enterica
atgacgacaggaatccactggaataacatgctctcacggggtgacatcaccgtcacccataacggcctctcgctggatgaggggctggtcactcaggttcttatctgccttttcaccgatgcccgtgctgatgacgatgatgtcatccctgatggttccggcgacccgcgcggctggccgggcgacacgtacagcgatttttcgtggggttcccgcctgtggctgcttgagcgtgaaaagctgacggaagatgtccgcctgcgtgtggaagattacgcgcggttgtccatgcagccgctgctgcgggccggttacgcccgtaacgccaccgtcacggccagaatcatcgtccctgaccgtattgcctttcaggtggtgttaacccgcccggacaaaaccacgctcacaatcgaaatcacccgccgatgggaggccaccattaatgccgtatga

SEQ ID NO: 397260 - DNA, 1077 bp, Salmonella enterica
atgccgtatgaaatccccacgctgggcaaactgattgccgacggcgaaaaagatattgcgtatgaactcggtctgcaaaagctgccgcctgtcagtgttgagcaggcgctgaacgtgtcattcagcagtcaggtccgggacttatacgaccatcagagctggattaaggaccagataattccgtccaccgcgtctgatgatgaaaccattatcaaaacagcaacgtatgaaggggttatccgcaagcaggccacctttgccagcgggccggtgacattcaccagccagtcatcccttccggcagaaacccggatgcagtccgacactaatcaggtttatcaggtgctcacatccggcgaggtacaggacggcgaggtcaccgtcatcgtgcaggctgaagaagccggtgtggcgggcaatcttgctgccggtgccgtgctgaccctgttatccccgctacccggaacgggcagcacaggcgcggtgactgaaagtggcatcaccggtggcgcagatatcgaatccatcgcagagctgctggaccgtctgctgtatgtgcgccgcaatcccccggtgggcggtgcactgcatgattacgtcatctgggcgcgtgaagtgccgggcgtcagccgcgcgtgggcatgggatgcgtggcacggccccggcacggtcgggctggcatggctttatgatgaccgtgaagacattatccccacacgggacgacctgaagacaatggagcagtatctgttctgccacaaacacccggccaccggcgtgatggtaggtaaaccgggcggcatcgaggtctggccggtgcaggtcaggctgaagaagctcgacctgtccatccgtctgacaccggacagccaggcgaacaggaacgccgtcctggcaaacctgaccgcattacagaaaacgctggcccccggtcagctgctgccggtgtcctcgctgcgcacggccatcggtatgacgtccggtatcacggattacttcctgaacatcggggaagacaccaccagtgatgtggatgagcttatcaccatcggggaggtgacatggctcacagcgtga

SEQ ID NO: 397261 - DNA, 585 bp, Salmonella enterica
atggctcacagcgtgacggaatggctgaccgcactgcaacaggtcatgccacggggtaaggcatggccgcgtgataacgacacggatttaaaccgttttttaagggcgcttgcagagcgtttaacccgcgttgaatacgacgcctcgcgtctgcatgtggagatgcgaccggaaaccacgctccagctgctgccggagtgggagcaatatctggcgctgacggaatgcggaattgccgccaccacaacggaagcccgccgccgggccgtggtggagaaataccgccgcaaaggcgggctggcaacctggcagattgaagccgcagcggcggcgctgggcttcaccattaaggtgacggccgttctgccgcaccactgcctgcgtgactgcatgtacccgctgcatccggcacggtatcgctggctgctgaaagtggaagtcccggacaacgatgccgggcggtttacctgtattgatgacgttatgacgccattaatcagcgaacggacccgagagctggaatgcctgctgaagcattaccggctggcgggtacggaatatgaatattattacaccggagaataa

SEQ ID NO: 397262 - DNA, 996 bp, Salmonella enterica
atgttttatgtggataacccgacgggtgtgccggtgatgccacctgtcgcggcggtggcatcaccggcgacgctttatttcaccgaaggcgggaacggtattccgcccacgtatccggggccggactggtttaatattattcagtctgaactgctggaaattctccggcaggcaaatatcaaaccggataaaaacacaaccgaccagattatgacagcgctgaaaaaactgtttattacgaacagtggttcagccggagctattgccggattaaccggtcagaataatacattcccttattttaccggcaaagacacaatggcattaacaccgctcagtgcgtttgtgcgcagtattctcgggaaaaacagcgccagtgaatttattaaagcaatcggcctgtcaccagacatccttttatcaaaaggaccggtgacagcattaagcagtacagcacagggcaatgcaggacttcagatgtatgaagtgtacaacaacggctatcccacagcttatggcaatgttctgcatctgaaaggcgcggcagcatctggcgaaggcgaactgctgattggctggagtggcacgagcggtgcgcatgctccggtttatattcgctcaaggcgtgataccactgatgcagcctggtctgaatgggcgcaggtgtttacatcaaaagacagcttcaacgcagcatccgccacaaaactacagaccccacgcaaaattaacggtacggcatttgatggcaccagagatatcaccatcagcagcaccgattccggtgctgtgcgtgatttcagatacaccagcgaagtgtttcacaatcccggtggtaacgaaatttcctgggtattccgcgcgccttcagggtgtattttgtcaggtataaacgttcaggaaactggcagaagttctgcggataacatcggcggcgtgtattacaaacaaacccagatttatatcaatggcggatggcgcacggtatccggctaa

SEQ ID NO: 397263 - DNA, 531 bp, Salmonella enterica; identical to SEQ ID NO: 32358

SEQ ID NO: 397264 - DNA, 2628 bp, Salmonella enterica
atgccgcagcttaaaggtgtgattaaaacgcccacgggagaaccgctgggcggcgcaaccattacactgacctccctgcacaaccgtgcagggattctgaaaggtgttttcagtcacgtcaccacacagaatggggaatataacttccccgttctgccgggcgtgtacagcgttcgcctgacgcagagtgtacagcgcctttcagaaatcggtgtcatccgcgtttatgaagattcagcggatggttcgctgaatgattttctgggcgcaaccgatattgacctgcgcccggaagcgctgaaaaaattcgaggacctggcgaaagatgctcagcaaagtgcagaagaagccggagggcacgcgaccgctgcagaacaggcccgcaaggatacagaaacgctcgccggggaaatacggcaggatgcagaagcgattgcaggcaacgtgcaaaaagctgaagaactggcttctgaaactgcacagaatgccgcccacgcagaacaatatgctcaggatgctcaagaggcggcagaaagcgtccggggatttattgatgcgcaccaggctgtatcaacccggtactctgtaacggatctgaacggctatcttgccagccttaaaatatccggtggcgtctgtcatggactgtaccgctatctgaccgcatcaggcggtattaactggtattttctcttcctcgcaatgtatgagagtgaaggaaaggtttttacgcttgcagacaggaagactatctgtgaaaaggcgataactctgggaatatttgtaccctttcaggccaacagttcatatatttccggtcagcgaattgtggtcgggaataaacttttttatgtcaatatttccggcgtgtcgggggattcggttcccgatgtcagcactgtatcacgtggcgattttgtgcgaacaggaacactggttctggaatgcctgggaaatacggttaaggaaatcccggaatcatggcagtggttttttgtggatattgattcatcgcttcggtatccggttgcacctgactcaacggacagctacgcagcattgtggctcgcctgtattgccacttttgcggataaaacctggttactggagccgtccggtgtggccggttacagtcgctgggatgtcatttgtcgcgttgcagacaataatctggtcagtcagacagggccgcataatctgacccgggtgttccagaataacagggcaccggggggaaatcagtatgagctgtatttttgtcaggataatgccgaagtgtatgccgggttacggggcctggtatcgctctgccagctggttgatgatgcagaggcgaaggaacgatatacagtggcgctgaatcaaatcaggaacggaatattatctctgttcgatccgtcagcctgtcgtttcagaacatactggggagaagcagactatcctgaacaggcatcctggcaacgttttgttcagaaagatcgtttttcggtggcaccgtggcgttttggtgttctcagtacacatgatgaaattgaaacatatggccgggcggttcttgatgcactgaacaaatcatacccggagttgtatcagaattatgcgggcattgatgagtttgcgctgagcgatttttttgcctgggcaggtaaggtgacaggctcagaaggggctgtgaacgtggcaataaagcgcgttcagatgagaagagcatcccgtgtgacaatatctgatgtcgtgtcggcaatatcggttgccagctgggggcggacacctgaattacaggtgggcgattttatgcgcatcaatgggcgctcagtcattggtggaggcgatattgaatttttcacgcatgaggtcagacacgtcactccggttgacaatgcgcaggttgttattaataacctgaataataacactgtattgtttgtggataatgattcgccgttgtcatatatccagtttaatctggtttcaggtgcagcggatggtggacgcctttcgattgctgcgaaaaatgatattgcacgggtatcatttatctcccgtggtgtgcaaattcctgatgttcctgcacagctcagttcaggcagttcagtcaattttgtctacaacgcgacaacgaaaatgtggtacagggaggcggtgccacaaatcctttcatcgaaaacaaatctgttgaaaaagcagtcagacgcattgtttgttgatggtgcgcatccggtcatacccaaggtggcaacaaaaagtctgagttcaaacctggatactttcaggactctgcccgacggttcacgggtttatgcactcacgctggaaattgccaatccgctgaagaaagccgtcgttggtggtatcggggtatttatgtcggcgctgattgaacctggttatctctatatggatcaggagcgacgctatataccagcacaatattttgtgaatgcagtttcggcgacaaacagcactgtgacggtggatgtatgcgcggttatgcagggcacgccctggtatgcgttgaatatgaaaacactgaatgaggaagcgaatgctgaaggaggcgtattaccctgtaaattgctggttaaactgattatcggaacaacgctgtcgcaaaacgggatgaactga

SEQ ID NO: 397265 - DNA, 186 bp, Salmonella enterica
atggactctgttcgctgtaaaaactgtaataaattactgtttaaaggaggttttaagcatatagaaattaaatgccctcgctgtaaacgttacatagtcatatcgaatgcccaggagcatcccacggagctgtattgtgggaaaagagaagaaatcacgcattctgacaaaaccctgcgttattga

SEQ ID NO: 397266 - DNA, 309 bp, Salmonella enterica
gtgggaaaagagaagaaatcacgcattctgacaaaaccctgcgttattgagtatgaaggccggattgtcggctatggttcaaaggagctgcgcgttgaaaccatatcctgctggctggcccgcacaatcattcagacaaaacactattcccgccgttttgtgaataactcctacctgcatctgggcgtattcagcggacgtgatctggttggcgttcttcagtggggatatgcccttaaccccaactcagggcgtcgggtcgtgcttgaaacggataaccggggctatatggaactgaaccgcatgtag

SEQ ID NO: 397267 - DNA, 375 bp, Salmonella enterica
atgccccgcaactctgaatcacgggccatcagctacgcgctgaaaaccatcaggttactgtatccgtcagtagagtgggttcagtcctttgcagacgaacgctgcggacgcgcaggtgtggtatatcaggcgtcgaattttgattttattggcagccatgaaagcacgttctacgagctggatggcgagtggtatcacgagataacgatgaacgcgattaagcgtggaggacaacgaggcgagtatttgcgggctaataaggagcgggccgcggtacacaaatttaatcagtatcgctacatcagattcctgaacaagcgcgcaaaaaagcgcctaaacactaaactattcaggattcagccatacccgaagtga

SEQ ID NO: 397268 - DNA, 468 bp, Salmonella enterica
atgtggatcaatcatctgcgccagtgggcccactgccgggataatgcgcagcgtctgggtctggaaccgcagatgctcaacgccgtggcggagattttaattaccgccagctatcgcctcggtttacctcagcagttacagaaaaccatgcagcgcgaggaggtgagcggcgcgcagcttcatgccatcattggtaacttcatcgcctggctcggctacacaaatatcgaggaggcccaacgcccggccagccgcgttcagaaaggcgcagccattttcgccgcaacgtcgcgttcgacaatgttgcgtctaacaaagcttgacgaacagcccgttcacgccgccagccgctatgtctatgactggcttgttgcgctgtataccctggccaatgagaacgcaggatatcggcatccgcaggacgttaccgacgtagacagagcgcaattaattgccctgatagcctga

SEQ ID NO: 397269 - DNA, 477 bp, Salmonella enterica; identical to SEQ ID NO: 374214

SEQ ID NO: 397270 - DNA, 534 bp, Salmonella enterica; identical to SEQ ID NO: 33079

SEQ ID NO: 397271 - DNA, 717 bp, Salmonella enterica
atgacacttgcagaacgcttaaaactcgccatgcgcgaagctggattaactcaggcggcccttgcggaaagggttggtgttagtcaggcggcgatacaaaaactgacatctggtagcgcaaaaagctctaccaagcttgttgatattgccaaaagtctgtcagtcagacctgaatggttatctaatgaggttggaccaatgaaaggtgatggtgttagccatcatcctgattcgtcaatacctccatcagctgagtggagaaatgtagatccatgggacagtgccacccctctcaaagacgatgaggtagaggttccctttctcaaagatattgaatttgcatgcggcgacggcagttttacggacgaggactacaacggatttatgcttcgcttttcaaaatccactttacgcagaaagggaattaacactaacggtgatggcgtgttgtgtttccctgctcatggcaacagcatggagcctgttatacctgaaggcacaactgtagcggtcaattgcaatgataaaaaaatcgtagacgggaagctttacgccattaaccaggacggatggaagcggcttaagctgctatatcgcaccggacctgacaagcttaccattcgaagctacaacagcgcagagtggcccgatgaagaagctgatctaaactctgtcgaaatcataggccgcgtcttctggtcatcaactctctggtaa

SEQ ID NO: 397272 - DNA, 228 bp, Salmonella enterica
atgaacccagtaattaaaaccgccatcgctattgtcggcacgcaaaaggaactagctaaagcgtgcggcgtaagtcaagcagccgtccaaaagtggctgcatggcaaagcaaaggtggctcctcaaaacgttgcgtcgctagtgaatgcaacaggaggaaaggttaaggctcaccaagttcggccagaccttccctcgctattcccgccgcctacaaaagcggcctga

SEQ ID NO: 397273 - DNA, 492 bp, Salmonella enterica
atgagcctagaagttggagaatatatacctggttatgagggtaaatactctgtaaccaaagacggtcgtgtttattcacatttaagaggcaggtttttgaatccatctccggataacaagggttatctaagagtcactttgtgttccgatgggattcagaagacgttaaaagttcatcgtcttgtagctcaattatttatcccaaatccgtattgcaagccagaagtaaatcatatcaacggcgacaaatcggataacgccatttggaacttggaatggtgtacctgctcagagaatttaaaacatgcttttagcatcggactgaaaagcgcaaagggagtttttaatggtagggcaaaactatctgaaactgatgtgattgatatcaggaattctgttggtatgaaactaagcgaactatccactaaatacggagtgagtgaaatgcaaatttccacaatccgcagaggaaacgcatggaggcacctttga

SEQ ID NO: 397274 - DNA, 192 bp, Salmonella enterica
atgaaagtcacttgtcaaatttctatgcgagggaaattatttctggcactgcgttctgatgtactcctgcaggtagttaacctgcgcggttatcttgtcgattccacttcggaggcggtaataattgagttcagcatctgctgtaagtcttgggctttctccatcgcccatgccgctggctccggtcgttga

SEQ ID NO: 397275 - DNA, 546 bp, Salmonella enterica
atgcaagagttaacctttgcatatctgcgtgaggctctttcctatgaccctgattctggtttatttacctggaaagagaggccgaaaagccacttcagcagtgtgaaggcatgtaatcagtcaaattctcactttgctgggaaaattgcggggagcaaggatcctaaacatggatatctacgaattaagctttgtgggaaaaatcataaggcacatcggcttgcatggctttttatgcatggttgctggcctgagggtgagattgaccatgttaatggcataagagatgacaacagaatggaaaaccttcgcgatgtttcccacaaattgaatatgcgaaatagggccaccccaataacaaataggcatggtctgcctggcgtctcatatagaaacagaaagaaaccatggtttgcgcagattatgaataacgacggcagaaacgaatatcttggttcattcaaaactccggaagaggcttcttgcgcctatctcctgagggcgagagagcttggctatcacgaacaacacggtaataggagttaa

SEQ ID NO: 397276 - DNA, 738 bp, Salmonella enterica
atggcaggatgtgaagcgggtgcttttacagggcgcgatgtcgtcgtttactacgcgattggctgcccagaatcacaacccgccaacggtgactataagcgccttggcatgatgcgcgggaagactgtttccgctgaatgggatgctgcagacgctaccgctgatatgagcgcagcgtatacgcaggaaaatctcgtaacctataagaacatctcgttctctggggacggtgtaacccgcaaagaagatgtttatgcgcagaacgcgcttaaacgccacgtctacaatccacccgcagagaccagtaaccagccgtatgtctggctgaagatcatctctccaaacgatattaccgaagggccgttcatggttacttcgtgggaagacgaagctcctcatgatgacgttgccacctggtctattgaggcgtcaagcgccggtcaggttgatgtacgtgatgtcggcgccgtaattactatcactacgcagccgcagaaccgcacgctcacggtgggtgatgcactaaacctgtctgtggcagcaaatgtctctgacagttccactctgacctatcagtggaagaaggacggcactgacatcactggcgcaacgaacgctacctacaccaaggccagcgtcgttactggtgatgcggggtcttactcctgccaggtgacatcctcaaccgccggctcggttacatctaacccggcgacggtgacagtgaacgaagcctaa

SEQ ID NO: 397277 - DNA, 567 bp, Salmonella enterica
atgactaaccaactcgcaaaaccatccatcgatttcacttttgaagatcacgaaattcgcacagtaatgcgcaacgacgaaccgtggtttatcgcctctgacgtgtgtaaggctttagatctctctaacccttcaaaatcggtatcggcgctggattatgatgaaaaacaactctttaacggcgactctaacttgaagttagggccagcagggaacggcgctcagagcatgatcatcatcaacgagtccggtctgtacaccctaatcctccgctgccgcgatgcagtgaaacaaggcacattgccgtggcgtttccgcaaatgggtaactaacgaagtcctgccgtctatccgcaaaacaggccgctatcaggtagaagaaaagcatcagcaggttccagtgttccgatacgttatcaccctgcactaccgtgatgttgtcaccgggcaggaggaaacactcagcggcggcgcgaactctccagaagaaattgtgcgcggcacggcgaagaagttcggcatcttcatcccggaaatgctgaaaatgccggttaacgcatactactga

SEQ ID NO: 397278 - DNA, 330 bp, Salmonella enterica
atggaacaagaccaattgcagcgcttggcagaggaagttgctgctgcctatttacgctatcttaaacataaaactggtgatgataaagttacatatgatggagtcacgaagcgtgttgtatttgaagagttggtgtttgctctcgttggtgtgtctcactacaatgctaaaaactcaccagagcacccaattttaagcgatccacataaacatctttctgagatgataaatatattcaccaagccatacacgattactgattttggtattagggttgttgagcatcttaacgagatatccatccataaagagcgcggggctgcgatgtga

SEQ ID NO: 397279 - DNA, 471 bp, Salmonella enterica; identical to SEQ ID NO: 142766

SEQ ID NO: 397280 - DNA, 216 bp, Salmonella enterica
gtggagattgaagtaacgaatatcacggcagcagacaacgaggtagctacgggaattaacgctactgttacctttattgattacgagaataatagtggtgaaattgttgtttacgtaaagctgcctttagaaaagcaactatcaatttctgatgttgaggaaaaggctcaggaattggcgaaaaataaattgaaagcgcttgtggctggcttttaa

SEQ ID NO: 397281 - DNA, 864 bp, Salmonella enterica
atgcgcaaagatgccctgcttgctttcctgatgaaccaaacggatttttttgatccggaaaatgtcagtgaggtgtttaccgcgcgctatctggcgcagcgttttaatatgcagcgcaataccgccagccattatctgaaccaactggtggcgcagggcgtgctctgcaaaatcaatacccgtcccgtctatttcctgcataagcaggcatttagccaacagttttttaccctttcgcgtaatgaatacgccagcgtcgcggagctgttagcgcacggggaacaggagtgcgcgccggacgatcacttttccctgttgattggccataacgaaagcctgaagcgcccgattgagcaactgaaaaccgcactgttttatcctgacggcggactgccgctactgatgaccggcgaaagcggcaccgggaaaagttatctggcgcagctcatgcacgaatatgccatcgcccaggcgcttctgtcgccggatgcgccatttatcagttttaattgcgcccagtatgcgagcaatcccgaactgctggcggcgaatctttttggctatgtgaagggcgcgtttaccggcgcgcagagcgacagaccgggcgcgttcgaggcggctgacggcggcatgttatttctggatgaagtccaccggctgagcgccgaagggcaggagaagctctttacctggctcgatcgtggtgaaatttatcgggtaggcgacaccgcgcaggggcatccggtttcggtacgtctggtatttgcgacgaccgaagagatacacagtacctttctgacgacatttttgcgacgcatcccgattcaggtcaacctgccggatctccagcaccgcagccgctag

SEQ ID NO: 397282 - DNA, 846 bp, Salmonella enterica
atgtattatcacgcgttaaaactttcccgactggcgatgttgacgttggcaggcgttgccgtatccgcctcggcaatcgccgccgattctgccccgacgtcgcaaattggcccgacggcggaagcctacatcgtcagtcatccggataaagtgggagaggtggtggcaacgtatttggccgaacatccggaatttttggtcgccgccagcgagacattgcatcagcgtcagcagattgcgcaacaacaggcatatgttcaactggcattacagtatcgtgctgagttgctcagtagcagcagtccttccgttgggcccaacgaggcaaaagcggcggtggtgatgttctttgattaccagtgctcgtggtgtagcaaaatggcgccagtggtcgaaaacctgattaaggcgaacccggatacccggtttattttcaaagagtttcctattttttcctcccgctggccggtatccggactggcggccagagtcggcgaacaggtatggcttacccagggcggggcgaaatatctcgactggcataatgcgctttatgccacagggaaggtggaaggcgcgttaacggaacacgatgtctataccctggcgcaacattatctaacgccgacgcagttggccgccgtaaaagaagcgcaaagcagcggtgcagtacatgatgcgctcctcactaaccaggcactggcgcagcatatggattttagcggcacgcctgcttttgtcgtcatgcctcagacgcaaaacggtgatgtaaaacgggtgaccgtgatcccgggaagcacgactcaggatatgttgcaaatggcgattcagaaagcgaagggatag

SEQ ID NO: 397283 - DNA, 294 bp, Salmonella enterica
atgcacacacgaaacgtcaacgtcaaaaccgccgctcaagaatctaccggaagatgtgattcaaacctcaccacgtcccagttcacggatctgttttgctgggtcctggcagcatcggaaggggagccacaaccggcaatttttacgccgccagagaatgccactgagctgacgttaattaatgacgaatgcacggattatatctctgtctgggttgtagatggtcgcccggtggcagctgcaatgccgctggataattttcaccgcgttattccttcatcacttactaaataa

SEQ ID NO: 397284 - DNA, 822 bp, Salmonella enterica
atggtcagtttcgcaagccgctatcgtatgcctacctcgatccgtaaagaccgtccgctgacgaatgaggaattacagctcatcgttccgagcgcgttttcatcggataaacacgattcacgttctgaacgttatacatatatcccgaccataaacattcttgatcgtttacgtgatgaaggttttcagccgtattatgcaactcagtcacgtacacgtgaccaggataaacgcgactttacaaagcatatgcttcggctgcgtcgtcatgaccagattaacggaaaagaagtaccggaaattattctgctgaatagccatgatggttcaagcagctataaaatgatccccggtatgttccgtcaggtttgcagtaatggtctggttgcatggaaggattttggtgaaatccgcgtaccccacaaaggtgatattgtcggacaggttattgaaggcgcttacacggtgctgaaaacatttgacgcggttgatgaaaatattgacctcatgaaaagcattcagctcactttgcctgagcagcgcctttttggtgcgaccgccctggaacttaagtacgagggaaaaccagcgccgattacgccggagcaaattattaacccccgccgggtactcgacagaggccaggatttatggaccacgtttaacgtggtgcaggaaaatgtgatccgtggggggattcgtggcagaacgcaaaaagggaagttgaccagaacgcgggaagtcaccggaattgatggtgacatcaaattaaatcaggttctatggaaaatggctgaggagtttgcaaaactgaaggcctga

SEQ ID NO: 397285 - DNA, 540 bp, Salmonella enterica
atgaaaatatcgttactgcctgcggcattgctgactctttccatgtctgctggcgcaactccccagatgtgctttgatcaggccgggaaagattatcaaattgatccgctgctgcttatgtcaatttcgattaaagagagccatctggtaccggatgcgataaatggatcaaacaggaatgggacagaagatgtctgcggtatgcaggtaaacagctctcattacggtaaacttaaaaacttcaatattacccgtgagcgcctgttgaatgatccatgtatctgcgtttatacgggtgcatgggtactggcgcacaacttcaggtcatacggaaaaaactgggacagcgtggggatgtataatacggggccgagcaaaaaggtcattgcgcagcgcaaggcgtatgctcaggatatcaaaaatatatatcgcgttttgctggccagaaaaaagttactttctgaacgcctggcgccagctgcgggaaaggagcatgagattaaaattgcggatacggcctcgttacatagcggacagtaa

SEQ ID NO: 397286 - DNA, 387 bp, Salmonella enterica
atgccaagaaagaacatttactttaaagacaaaattgaccgcgaaatacatgatattcttgaaatagaactacagaaaggggccaccacatctgagatgaactattcatcaattgtcaacgaattagtacgtcttgggctaatggtttacaaatcgaaagaagagggaagtacatttgacctggatggcttcagacgtgacctgataaaaaaagtttccgggtcacgcgaaggtattatgattctgaccgcccttgtctctgacatcttcgtcacacttaaaggccccgactctggcgtgaaactggaagaactcataaacaccaacatcagtgcaattaacgatgcggaagataaagccgaaaaagaccacttccttgcaggataa

SEQ ID NO: 397287 - DNA, 642 bp, Salmonella enterica
atgaaagttaaagagaaaatgtgggatggtcgcggccgtccaaggaagtttcagccgggtgaagctgtggaatggcggttgcgggctcctgataatttgcttatggagttgagaatatgcgcccgggctggcaacaggagtgtaaatgaagaaattattgccaggttgttgctgtcccttaattatcaaaccgggaagcctgttattaaaacagcggagggagagaggttaatagctttggcggtgagatttgaggagtggcttggaagattacttgatgaagagtccgttgaggttgggggtgaaattaaaacaccgctcaagcaggagcaattgtgggtgtggcgtgagggtgaaagaattttgctccccgggaaaacaattggctacagtatgcgtattcctgagaatcttgcagatgaaatcagggcaatggcgaaggtgcataaccgtagtcttaatgacgaaatgcttacccgcctgatgaatacgctgggttatttcacggaaaggttacttgaccagaacgaggatgcgcaggcgctaaaagtgctttgcatggagtttgaggtgttcctgaaggaaaaaataagggaggtggagaaaggcgagcttccgtggaacgaaagaccgtctcagtga

SEQ ID NO: 397288 - DNA, 354 bp, Salmonella enterica
atgttaaccaaaggcagtgcccttaacgtcggtaagggatgggcggtagcgtctttattccgcaaagcacgcgaaaatcgccagactaaattttacttaaggtcagtaggcgcttttttaattgcacttatggtcactcacccggcattcgccagcggcaccgaccttctttcctcacagaacaccacggttaattcaaccttcggttctggctcatcattgattaaatggttttacattgccgaaatcatcatgggcctgtttatttacatcaaggctcgctcaccgctggtattcgtcggtatcgtgatggcaattatctttacccgtgtcgccttcggcatcgcgagttaa

SEQ ID NO: 397289 - DNA, 303 bp, Salmonella enterica
atgagcagggaagaagataaatactacttcccggaaactctgaaccagcaggaacgttatttaggcttaccgattgatgagctaattgttaccgcaccccttattttactgggggtgcttaacaacatgtcggtcgagcttggagtaattgcaggcctgctctggtttcttgtccgatatctgaaaaaagggcaggggtcatactggctgcttaatttctgctactggcacctgccatcacttttattcaaagtcacatttcgccagatacccgactcaagtttccgtcactggagggcatag

SEQ ID NO: 397290 - DNA, 582 bp, Salmonella enterica
atgaaactgaatattaaaggagagcgcgataaacaactccgctatgcgtttattggtctttcagctttaactttactcatgggcgcagggaatgtactgactggctcactggcatggtatttcgccaccacccagaaaaccatcaccacgccattaacgtttaaccgcccgttcgcatccgattcaaaaagtgtggatgccaccggcctgacacaattcgccgcttcctttatttactggcgactgaacgtaagcccggaaaacatcgacaacaaccagaaaatgattcttggattcgtcccttccgccgagcgggacgtactcaagaaatccctggacattgaagctgaacgcatcaaaaaatcgggcataaccacccggttcgacacgaaagaaattcgcgtcatggatgatggctccgtgcagtacagcggggtactgaaatcctccaccaccaacggcgcaatcatcaccccactggaagaccaggaaaaaacttaccgactgaagctgagttaccggaacggtgtgattaacctccacagctttgaagaactcaagccggcatctcccactaactaa

SEQ ID NO: 397291 - DNA, 741 bp, Salmonella enterica
atgaaatttcgcatttcaccggcagctgctgctgtgtttctggcagcgggattattcacaagcggccttcgggccgcttccgcacccgcagccattccgtttgagaacgacgccgcctttaacgtcacactcagcaacaccaacccaagcaaggttgttgtcgacggagaactcattaccagcatcagcggaccaaccggtgcctacgaccagagcacaaccgatgacggagcacttatcctgtcccccctcgtcggccagaacttcacgctgttcatccagaccgaccgcggctcctccctgagccttaacatcaggccgcagccgggtaatggcaaaacactgcgcttcaccccagcgtcaccaccacttcgcaagaatgacgacgcgaaggcatgggaagaagggcagacctacgaaaaaacgctggtcgcactgtcccgtgccgtagtcaacggccaggtaccggacgactaccaggaatatccggtcagccgcatgccggcatacacacccgccagtgatgtacgcctgacaccggaacgccagtttgtgggtaaccacctgcgtgtcgtgcgcttccggatgagcaaccccggaaacatcacccgcgacctgcgcgagcgtgacttctggcacaagggcgtcagagccgtaatgctgtcacaaaacaaactgtacgccggtggcgaaggctacgcctggattgtgttttcagatgacggagacacccgcccatga

SEQ ID NO: 397292 - DNA, 1404 bp, Salmonella enterica
atgaacctgaatgaaaatctgaaaacccgccgaaagcaactggccatccttgccgccgttatcatagggggcgcggctgcaacgggcggtgtcatatggtacggcaagtatcagcaggctcagaaacaacccgcaccagttgcagccccaaatatgaccggtgtcgttaccgccgcgtttaaccagcaggttaacgatgccgcactggcacagcagcaggcaaagacctccgcacttgaggacaagctcaccacgctcacccagcagtttgcacagaacaagctcactaccgagcaacagctggccaaaaaggatgaagaaattcagcgcctgaatgaccaactctcgaaagcccccggcagcaacgcgaccactggccagcagacaccacctgccggtcagaacggaacaccactccccggccccgttgctgccggtcaggcccgacctcccgaatacactgtgacccccacaggagcaccggccgccactggtgtcaacatggggcagggcacagggttctatccgggcggctcaggtcagcgtatgacgggcgggctgtcgaccacaaaattcagctatgaaagcctgaagaaaaagccaaccagactcccctggattccgtccggctcgttctctgatgccatcctgattgaaggcgctgacgccaacgccagcgtcaccggtcagcagaacacccagccagtcaccattcgtctgctggggaacatccagatgcccaacaacaaagagtacagcgcagacggctgctttgtggtgggtgaaatctggggtgatatctccagcgagcgcggcgttgtcagaacgaaatcactcagttgcgtgctgaaaaacggcaaacatgtcgatatgacgttcgatggccacgtgagctatcagggtaaaggtggtgttcgcggtaagcccgttatgcgaaacggcatgattgtcggctatgcgggggcagcaggcctcctgtctggctttggcgagggtatcaaatcggcggcaacgccatccgtgggcatcggcgccacagctgacgttggcgcggcagatgtgtttaagcagggctttggcggcggggccagtaaggctgctgatacgctgagccagtactggattaagcgcgcagagcagtatcacccggtaattgatattggtgccggcaacctggttactgttgtgttccagaaaggcttccgccttgaaaccatcgaggatgctgaggaagcgaaggcgaaagaggaaatgcagaaagccggcaacgccgtgcagaacgccgtgactccgcaacctgcgagccagaccacagcatccggcactgcctccgtcggcaacatcaacccggacgacgttctacgccaggccagccagttgcgcctcggtgacaccatcaactaa

SEQ ID NO: 397293 - DNA, 276 bp, Salmonella enterica
atgaaagcacgaaaattactactttgggcaacaaccagatggaggccaggactgacattcatcgtttcatggtccattttgttcgccacgcttttctccagttttaagtggatacagctaaccggattatgtctctgggcggcaggaaatctttttctggctgaatcaattcccggtggcatggtgtggcgtgagctgcactcaccaccttcagacgcaacaccggaagaaaaggaggctaaccctcctggttccggcaacaccatcaaccgatga

SEQ ID NO: 397294 - DNA, 288 bp, Salmonella enterica
atggcggcacaaagaacatcgcgggagggggtgtccgaccgcaaaacaaaggatgtgaacgtaagcaaaaaaaggaagctggccgaccggttgtacggagcatttctgctcttatgcatggtagccgtggtaagcctttttttctacggacaaagccataacagcatgtggagcatcgttgcatttggtacaggcggtattttgtggtgtatcgcacctgagtattacaacagacctgacatcgacagcaaaaaggcgtcggaaggagaaggcgacggtatggcctga

SEQ ID NO: 397295 - DNA, 387 bp, Salmonella enterica; identical to SEQ ID NO: 134017

SEQ ID NO: 397296 - DNA, 555 bp, Salmonella enterica
atgaaaaaactactgggtgctgcactgctgtgcagcgcactgaccggctgcgccggtctcaattcagattttgactgtaacaagactgccaccgaccagtgtctgacgaccggtgaggccaacaggctggccgcacagggtaaaagcctggatgacctgacggccgataaagccgcaaaaaagcctgcgggtgaaaccctgccggcactgcgaaatcaggctccggtcgtgaatccgttccggcctgtctccgtcgcagcaaccggaacgaccaccgccaggccggttgcgtctcgtcctgttactactgccccggcggggacgtctgattctctggtgacgcctctggcttctgccagtcatgcaacgccagttgcagtcaacacagcgggtcacgtccccgctcagcgtattcctgatgcgacgcagcgcctgtggattgcgccctgggtggacactgacgacaactttcatcagccggctgtggtcgagttcgtaaaaaacaaatcccactgggatgagagctaccgcgttatcggggagggcggagaatga

SEQ ID NO: 397297 - DNA, 186 bp, Salmonella enterica
atgatcggattcagtaacgatccatcgctggctgaacttagcatgatggccgaaggaaaaatgctgagtaattccacatacagaatggagctgaacgctgatgtaccggtgagcgtcagtctcaccgaggaggctcgtcagcgtcgtctcgaactgatccgggaagcagcggagggccgaaaatga

SEQ ID NO: 397298 - DNA, 2610 bp, Salmonella enterica
atgagttttgtcgacagcctgatggatatgctgaaaaacggcgggcaggaagacggtgctgccacggcacgaaataacctctcccagacatgggactatccgtccctggttgctgcgttgccgtaccggtactacgacgatacaaatgaaattttcgtcaatgccggctctgcgggtttcatgatggaagctgctccgttacccggtgcgaacgaacaggtcatggccgcgctggacgacatgctgcgcaaaaagctgccccgaaaaacgccggtgactgtcattctccttgccagcaagtgcgtcggtgagcgtatcgatcgcggcgtgagtaatgacatgtggaaaggcgggatggccgatcatctcaataaaatcactcgcgcgttctggcagcgctctgcgttgcacggtctggccaacgaacgcgaatacccgctctatctgcgcaactaccgtatctttcttgtctatggtcagccgttgaaacgcgcctcccagacgcagcgggtgattgatgacctgattcagatacgcaacaccatccgcgtatccctgggggccgcacgtatcgacagcatgaacgtcgatgtgaatggtttcctgtctgcggtacgagagcagatgaattaccgtcaggagcaggtgctgacctcttccggggactacaacgaagacgagaagctcaaccgccaggtagttgacccgggtattgaccttaaggtgcatccgtctcatatccggatggaactgccggagaccttcgatacgggagggacgcgaatgccggcatcgtcatgtcgcatcatcaatatgcagctcagcaaaaatccgcgtcgttttgcgctctggcagggggctgacaacctccagaatctgcggtttcccgacctcggtattccctgcccgtttatgctgacctggactaccgagctggaggagcagaccaaaagccagagtgaggcgttccgtaaagaccaggacctgtcaaaaaaagccaactcggcctacgcggctcttttccccaataccaagaaagcggcggaagaatggcggcgtactcgtgaacagctgagcagtaacgaaattgcgctctgtaatacctatttcaacctgaccctgtttgcgcctgacaataataccgacgcgcaggcctgcgaactggctgccgtgaacgtatttcgcaaaaatgagctggagatggtgacggtgcattaccagcagatgcgtaactggctggcaggcttcccgtttgttatgcaggaagggatgtgggaagacctgaagatgacaggcgcaacgctgcgcgccaaatcatggaacgcggtgagcctgatgccggtcgtggctgaacgccagctgtccaacgtgggtatgccgctgccgacataccgcaaccaggtggcatttttcgacatgtttggtgaggagaacggcagtaccaactttaacatcgccgtgaccggcacttcaggcgcgggaaaatccttcctgacgcagggtattctgcgtgacgtgctgaatgccggggggtacgcctgggtaatcgacatgggtgacagttacaagaactactgtcatcaggccggtggggtttatcttgacggcgcgaagctgcgctttaacccgttcgccaacgtcaaagacatcaaccattctgcggaaggtattgtgcgtctgctgacggtgctggcaagcccgacccagccgctggacggtgtctgcgaagcgattctgcaaaaagcggtgatggatgcgtgggagaaaaaaggaaacaaagcccgtatcgatgacgtccataactacctgaccaatgaggacatcaatcaggcatttgcagacaaaccgaccatcatcgctcgcctcgctgagctggccatgctgctcgatacctactgcacctgggggccggacggtgaatacttcaacgctgacaacccgacgctcgatggtgacacccgcttcgcggtgctggagctgctgagcctggaagacaagccgaagttactttcgtccatcctgttttcactcatcctggcgattcaggaaaagatgtaccacagcccgcgcgacctcaaaaaggtctgcatcatcgacgaggcctggcgcctgttgggtggttctaacccgcacgcggcacggtttatcgaaactggctaccgcaccgtgcgtcgtcaccgtggcgcgttcatcaccatcacccagggtatcaaggacttcagcgccagtaaggaagcagaagcggcctggaacaacagctccaccaaaatcaccctgttgcaggatgcgaaggcgtttaaacagtaccttgccgataacccggatcagttctcggacatggaaaaagaagttatacgtggcttccagcctgcgctacagaccggctacagctccctgctgataagtgccggtgaatacagctccttccaccgtctgttcgtcgatcccgtgacacgcgccatgttcagctcgcgtggtgaagactttgccttcatgcagaaattgcagagagaggccggggccactgcggaagaagcggcgtatctgctggcggagaagaaattcggcagtgagcttcgtgaacttgaggaatgggtgaaagcggcatga

SEQ ID NO: 397299 - DNA, 417 bp, Salmonella enterica
atgagtgaacaacaggacaagccatatgacggtgactccgtccgcgatggcgtaacgatggtgggatggttgacctcccgaagcatgaaattagcaacctttgtgcttgtctcccagatgattatgacggggataacatggctttacatgaaatccactgagccggagatcgtcgtcttcgatatgaaggggacagtcgacctgttcatgcagcagtccgcccagttgcagctcgatgaagacaaggccagggtgctgacaacgcgtttcaattccgcgctgtcagacagtctcggtgaatggcaggcctcacataacgccatcattctggtgaaaccggcggtgatgagcgaccagcgggatatcacgaatgagatccgtgccgacattgcgcgccgcactcaggggggccagtga

SEQ ID NO: 397300 - DNA, 636 bp, Salmonella enterica
gtgaaaagacgactaaagctgatggggatgttgctgatgatgctctccgccggcagcggggcgaaagatctcggtacctggggtaacgtttttgaaccaaccgagcaggacatgctggcgttcatccagaatcgcctgaaaggaatggagcagacgggcgaacttgaccgcctgcgcagggaggcaacggacagggtgaaggagcatgcggttcgtccgacgccggtggaaggcctcacaaaagcgaaggaataccgcagctttgcctggggcccgacatttactgtgaaggagacgatcactgacatgcagggcaacgtgatcgcccgtaagggcgacacggtcaatcctctggataaggtgcctttcagtcaggtgctctttttcatcgatggcgatgatgaagagcaggtgaactggacccggcagcagcttgccggccagacgaacctgaaggtgatcctggtgaacggcaacattaaggaaaccagcgatgcgctgaacgaacgtatctacttcgaccaggcaggcgtactgacgcgtaaatttggttttgagcacgtccccgcgcgtatctcacgcgacggccgcgtgatgaaagtagaagaaattccggtttcaggagcaaaaaaatga

SEQ ID NO: 397301 - DNA, 393 bp, Salmonella enterica; identical to SEQ ID NO: 134020

SEQ ID NO: 397302 - DNA, 279 bp, Salmonella enterica; identical to SEQ ID NO: 134021

SEQ ID NO: 397303 - DNA, 546 bp, Salmonella enterica; identical to SEQ ID NO: 134022

SEQ ID NO: 397304 - DNA, 222 bp, Salmonella enterica
atgaaaaaagaccctgatactgaaaagggccggaatgtcaccatctcgtcagtacgtcacgatgagggttcggcccgacagctggatgaaatcctcaacgataacccgctgtacaaaccttcgcacgtgctgcgcggagccattcttgccctgtacgaaatgagccaggaacaacgtctggccatcatcatgaaagcggctgataaagccaaaaaccactga

SEQ ID NO: 397305 - DNA, 324 bp, Salmonella enterica
atgactcaccctgatcctgtcaggccggtgacggttacccgtgaccgcaacggcttctggacgcacccacgctattttacccccgccagtgatgaggccgggcagtcagaattcggcgactggatgcgtctgcacaacctgacctgtgccacccgctggatggaaaatgatgcgcctccgcaggtgatcgccgcctgggaaaatggcgtagccgacatcagcgactggcagccctcggcgccagcgggtgaaggctggttcattggctccattcatgacactgatgacggcccggtttgtgtctggctgcgggaggtgaaatga

SEQ ID NO: 397306 - DNA, 996 bp, Salmonella enterica
atgaagcgtctttcatggcttgctggcctgatgcttgttttcatgtcttggtcgccggttcaggccactgctgccagcaacgcaggcgacgggcgctgggtgaatcccatcactgacgtctgctggaaatgcctgtttccgatgacgctcggtaatatccagctggcttccggtcctcagaaagacacaaccaacccgtcctcgcctatccagatttgtccggtgggtattctgtatcgcatcgggctggccatcgggttctgggagccgatggcgatggtggatgtgacacgtgagccgggggtgatggtcaacatgggcggctttaagatcgacctggggcgtactggcacaggcacagccgggcagagtgacaggcccgccgccggcgcgttctaccatgttcactggtacaaatacccgttgattttctggcttaacatcatcaccagcctgggatgtctgcagaccggagacatggacattgcctatctgtctgaggtcgatcctctctggaatgacagcacgctctcgatgctgattaaccccgaagcggcactcttcggtaacctggttgcccagggcgcatgcgcggctgatgccgccgccgcgtcagctggcctgccgttgtcaccgctgttctggtgtgcgggaagtcaggggtcaatgtacccgctgacgggctataccagtggtgaattttccccgctggaggcctcattgctcgtcggtgagcgtatggcctttaagatgcaccgtgaaggactggtctggaactccatcggcgcggataccgccgtctgcaaccagtatccttcacccatcattcccaaggaacggtggcggtaccagatggtgaacatgtaccccgaaacgaacaactgccaccctttcggtgccagtacgcagttgtggggcaccacacacaactcaccttcatcgaaaaagaacttcggctacctcttctggcgcaaacgtaactgcgtcttcctttaa

SEQ ID NO: 397307 - DNA, 624 bp, Salmonella enterica
atgaaaaacgcttatctccgggcgctgacgttcagcgtcatggttgctttcgcaccaatggtcgtggcgagcgcccagactgatatctccgtcactgaccatagctggatcaaaagccagcaggacgcactggcggctatgaaggacgatctgcaaagccagtctgccggttcatacgtgttaccgcaggcgcagcaggatcttattacccgactacagggaaatatagtggctcagaccaccacgatgggggaaaaagacaccttccaggcgatttactttgtaagcctcggcatacctcgcgaaggcctgctgccgatgctgaaggaggcccgccgttacaacataccgccaacgctgcgtggcctcgtcaataacgacatgcgccagactgcggcagctatgtttgagctgagtaaggaggacagggacgccggcgtacaaatcgatccgacgctgttcactcagtacaacatcaccacggtacctgccctggtggtgacctgtcctggccaccatgacgttatccggggaagcctgcccctgaaacaggcccttgagaaagtggctgaaagcggcgagtgcgcggcaacggcacgccatctcctggaggccgcccaatga

SEQ ID NO: 397308 - DNA, 1836 bp, Salmonella enterica
atgataaaaatgctttccactgcgctgttgctgttcccgcttttcgctgtcgccgctgatcctgcctttgaggcgggtgcgagttttggtaaggggaacgctgccgcaggaaccggtgctctgaaaaatcccggcgcggtcaccggagcgataccgggctatacggcgaacccaccggaaaaggggtattacggtggtgtaaaggggggcgatggcggtctggcgggaaaaggacaggctgccctgccgggaaatgacgcggcacagtcggtgatcagttccggcaccaaaaatccgaccccaacgattgatccgaatgcgccctttatcactattggtaaaaatgcggagggtacggcagacgggatcatagatggcagcagccagcagtgtaaagagacaacggtttcaaaatcgacctttgagaattttacctgcgaccgggatgtggccgtgatccagacgtgcggaagaacagccagtatcatcggacattatgaggataattacagctataagactattaccattgattccgacaatctggacgtcagtagcccggaagtgtcgtacagcatgccagaaggaacggtgtattcggcgacaatgaactacacgtttaagaaaaatttggcatacagtaacgatctctggtttctgaacattacggcgctcggtacgctgatgacgatgtacgaaacgtctggttcgtatgacctgcctccgggtaagagttttaccgaaggagagaaactgaccatcacgtttaataacaaacaaaacgtacccgaaagagtggccagcatttgggatctgggtaaaaccaaccacatgtaccattttgtcatcactatcgtttaccgtaccggtacaaaggtatgggttccacagacaacctggactgaaagctgtggttttgacaaaaaaacggctctgtccagcgcaggcagtatctgtaccgaaccaggcggcacgcgtaccatcactgtcgacgggaaggagtacagccagacaaacagttgctgggcatattcagattcctatgtgacgggtaccagttctcgcgggaactgcggttcgctgatggataatcccgcctgcacgctctcttcccattcctgtacaacaactgagtcgggcatctgtacccatcagtcagaaacgtatcagtgtcagaaaacctggtcatccagcggcctggtctgcggcggggagtatatatgtaagtcgggtgcctgcgatgagacaaacggtaccggtgataacgggtttgatacggctgtggccaaactcgcgggtctggcctctgcggcagaagatgtcagggatcagaacagcactatagatgtcagggccttcacgggtaaagccatgagctgccgtaaggcgtttgccggcttctccaactgctgcaaggattctggctggggacaggacacaggtcttgccgcctgtaacgatgatgaactggctctcggtaaggccaaagccaagaaaatcaccgtcagtgtgggagagcgctgtgaccataaggtcctgggggcctgtatccagaagagtaaggtgtactgtgttttcgacggcaaacttgcccgtatcattcaggagcaggggcgtcgtgatcaactgggcgtgaagttcggcagcggcgacagcccggactgccggggcattacggtaccggagttgcagagtatcgacttcgataaaatcaacttctcggatttctatgaggatttgatgaagaaccagaaaatcccggataccagtgcgcaggttcagcagattaaggatcgcatcgcagcgcaggtgaaccagcagggaggtggcaaatga

SEQ ID NO: 397309 - DNA, 783 bp, Salmonella enterica
atgaagcgtaccctctgtggcctgcttatggcgctggcgagccatacggcactgggcgaggagattgtgacgccggcagagccgttcaccggctggtcctggtacaacgaaccgaaaaagccccctgagcagccccgaaaaccgcagcagccagcaccgcaggccatcccggatctcagcaaaatgtccccgatggagcaggccagggtgctgaaagggtatacacaggaggcgcttaaccgcgccatcctgtacccctcgcgggaaaatacggcgacgttcctgcgctggcagaagttctggacggatcgggcatcgatgttcagccagtcctttgcggcagcgcagctgagccatcctgacctcgattacaaccttgaatacccgcactacaacagcatggcgccgtttacccagacacgtgaccagcagagccggcagaatgcggtggaacaactggcgcaacaatacgggctgttttacttctaccggggcagcgacccgatcgacgtgcagatggcgggggtggtggctgacttcgcgaaaaccaacgggatttcgcttatcccggtctcggtcgacggccaggtggcaccaggcctgccgcagagtcgtccggataccggtcagtcccgctcgatgaacatcacacatttcccggcgcttttcctggttgatccccgcaaccagaactaccgtgccctgtcctacggcttcatgacactggatgacctgtcaaagcgattcctgaatgtggccaccggttttaaacccaattcctga

SEQ ID NO: 397310 - DNA, 489 bp, Salmonella enterica
atgacaaaaatatttttcaccctcatccgtgatgcagggcggttttccctgtacgcccttgtcctcggcccggccctggtgctgtatgtccttgtgatgttagcggcgtatgatggctcactgtcccgtcagttcctgacgacctttcatgacctgactgacggcgtacctgccggcaatgtgatggcgtgtgttaatgaacacgagatggtcagtcgcttttcaccgccagagcccggagagaagttaaagcccgctcctgcgttagagaaagccactcctgaagtgttgtgtcagcgtggctacgtggacagcgattcatgggcgcgttctgtggatgcaacgttgagaaacttctgggggatggcggtaatgtttggtgccggattgtggtttgtttcccgtcgtctctctcttgctgcccaaaagcgtatttcacctgacacacattcggttctggtacggaagaacagggagacacaggaatga

SEQ ID NO: 397311 - DNA, 219 bp, Salmonella enterica
atgaaaccagctattctcgcaggactgattttctggggcacgatggcacgcgtactgagcgaactgatgacctggtccgtggagcatacacagcaggggctgctgtggctgtgcaatggtatgtgggccggtgcagccggcatggcgatatatgccggctaccgctggttcaggtttgagagagggcaagcgcataaggaagccgatcatgaacattaa

SEQ ID NO: 397312 - DNA, 606 bp, Salmonella enterica
atgaacattaaaaccggactcactgcgctcctgttatctctgcccctgctggcgagcgccggtgcgcgtgaggaattaatggcgcttgaagcaacaaaaacggcgcaatccgcagacgctgcggccatcaccgcttctcctgctccggcaccggccagcttgatggcattgccggatggacgaagggctaacatgaaagattatgctgtggtgctctttatgcaggctcactgtgaattcagcgcgaagttcgatccgctgctgaagggctgggctgatgagcatgcaattaaggtctatccgtacaccctggacggtggcggcgatgtctcctttccgacgccgatggtaccgcgcaagagcgatcttaaatcgcccattgcagacgagattgtgaccttcttcggaaacggtctgccgattgcgacaccgacggcttttgtggtcaacgtcaacaccctgaaagcgtatccgctgacccagggcgtgatggatattcccgcacttgaaagccgtatggccagcctgattcaggcggatatggataacgtcgatccgaaagcgctgccgcccatgcctgcaagtacgcaggtcacccctcagtaa

SEQ ID NO: 397313 - DNA, 264 bp, Salmonella enterica
atgactacaaattcgtatgcgctctcgcgtaccgaacgcgtgtggctgttattcagcgtaacgctgctcgtgtccgctgcattctatggcgggctggcctgtcgggtggtcagcgtcatgaaccgccctgagctgacgacctgcctgctggactttccggtacttcttctcatctcgctgagtatcggttttttttccatcgccgccgggctgtacgtttgccgtcagagcctggtacagaaacgcagggaggaaattgcatga

SEQ ID NO: 397314 - DNA, 3324 bp, Salmonella enterica
atgcttgagatatacactatctatggcggggggatgtggaaaacggcgctggacgccgttgtcacccttgtcggtcagaatactttccacactttactgcgcattgccggcaccttcggggtgctggccgtgttgtttactttcattaaacaacgcaacccgatggttttcgttcagtggctggccatctttatggtcatcacatccatcctgctggtaccgaaacgttccgtacaaatcattgacctgtctgatccggccgcagtgtggaaaacggataatgtaccggtcgggctggcagccatcgcgtcgctgacgaccagtgtcgggtacaagatggcgtcagtgtacgacatgctgatggccagacccgactcggtgacctacagcaaaaccgggatgctgttcggttcgcaaattgtggcggaaaccagcgacttctccacgcaaaatccggagctggcacagatgctgccggactatgtggaaaactgtgttatcggcgatattctgctgaacgggaaatatacgattaaccagttactgaactccaccgatccgctcacgctgataaccagtaatcccagcccgctgcgtggcatatttaaaatgacctcgaccactcgccagttcctgacctgtcagcaggccgcaacagagattaaatccctggcgaataccgatgtgaacccgggtagtgcaacgttcacctggctgacgcgtaaagtctttggcaacaaactgaacggtgcagccttactgtctaacgcgatgggggagagttacggttacttctactccggtggcatgacagccgcgcagatcatgaagaataacattaccaacagcgcagtccggcaggggataaaagggtttgcggcgcgctcatccgataccgccaacctgctgaacctcgccacagagaacgcggcaacgaaacaacgcctgagctgggcagcaggtaacgaactggccacccgtacactgccgtttgcgcagtccctgctgatgctgattctggtgtgcctgttcccgcttatgattgcgctggccgcatcgaaccataccctcttcggtcttaacacgctgaagatttatgtctgcggttttatttacttccagatgtggccggtgatgttcgcgattctgaactatgcctcaaactactggctacagagccagaccggaggcacgcccctggttctggccaacaaggatatagttgcgctgcaacattctgatgtggcgaatctggcaggctacctggcactgtccattccggtgctctcgttctatctgacccgaggggcggcggcaattggctctcaggttaccggcagcatactcagttcaggtgcattcacctctgccggtgtggcagcgaccactgcggacggaaactggtcgtttaacaatatgtcgatggacaatgtcagccagaacaagatggacacgaacctggtgcagcgccaggggcagcagacgtggcaggcggataatggttcaacccagacccagacggccggtggccacacggttatcgacggttccggtgcaatgtcgaatctgccggtgaacatgaagctcagccagctggcaagcagtggtttccaggagtcagcccgtcagtcgcaggttcaggcgcagacggcgctcgatggctacaaccacagcgtcaccagtggctggtcacagctctcccagctgtctaaccagaccggtaccagtgacagcctgaccagaggcagtgaaaacagccaggccactaatgcgacgcgcggcgccagcatgatgatgtcggccgcagagagctacgcaaaggcgaacaatatttcgacgcaggaagcttataatcaactgatgtcaaaatctgttgaaggaagtgtcaatgctggtgcaagcggtaaatttaacactggcgatcaggcatttggcaaagtagggaagtgggctaccggggtgagttttgaagcgcatgctggtgcagaagttaaaggttcaagtggaagttctcatggaacccaggaaacacactccagcaaccaggatatgcgacaggaccagaacagccaggcggttaatgacttccgccagggtatggatatggttaaaagtagccgaattaccgagggcgcgaaccattccgagaatgcagcaagcagcaatgttcagcagtttgccgcaacgctcaatgatgctgaaagccagtaccatcagtacaccaccagttcgacgcagagtaacgagttcagccgtatggccaccgttgcgcagaaccagagtgcaagcctcgatacgaactatacgcaggagtttgtggactgggcagctaataaatacggtgataaggctcagtccatgctgacaagtgcgccgtcagcgcgcgaagcagcaatggaattcgttaatgagcgtcttaaacctgaaattatgggggactatcagcaggggcgttctgatcttgccagcggccaggagcatgcagcattcagcggtgagcatatcgttcagccagcgcatggcagtcagcaggtctcaggtacatttggtaatgatggcggagtaagttacagcattctggatggcaacgctcataacccgggaggtgttggcaatgtccagagttcaggaacaactcaggtcgctgcatatggaggccaggagagtgggcaggtaacatctacaggtgaacatactcctggcagaacagacgaatctgtttcgagggggattgagcagccaaatgttcatcaggggcaaacagccgagcaaagaagcagttcgggtaatatcacctcgtcagcaagcatggttgatgccggtagacattcagtggcagatgaaaggagtggccacattgcagaaccacatccggaatcacgtcattcaggtgttgttagggagcaagggaccacgcatgggcaggagagtgaagttgttcatagccgttctggtattaatgtcggcggcgaaaaagtacgtggtgatgctatgcaggaggcgttcaaagaaaatcaggcaaaactgcatgaacagtcaggtcagggttttggtccgcaaaatgatatccagcgacgtgtagcggaaaaaagatctgaaaatgagcataaaatcaacgaatctgctggtgaaattgataaaaaagaatccactgttcaggcatccagtgatattcttaaggggcaacatgacaattttaaagctcaatttattgaaggcaaaaaggcagaagatttaaggcaaaaaacattacctatactacacaacgatgaaattgagatgcacaagcaaaatcttgaagatttgagaaaaagaacggggtga

SEQ ID NO: 397315 - DNA, 558 bp, Salmonella enterica
atgctaactttcaacgatgtaaatcgtgattttaaagtaatcttagatggagtgtcggatacaaaccgacctgtaccatcaatagctaaagctctgagggtttcgttaactctacctctaataggtattattctttcaacaattaccttcggagccgtatgtgcgatctcgaatcatcgcgattttagtattggtctattaattagctatatcctcactggtgaagccatacctgtttatatggctatggtcgtaggagcctttcaaggaattatgttgttgccatatgtgagtctcttccactcaattcctcaaaatataagggaaaacacgccactcatagctcatatgaagagagctatatttaaagggatggcgttgtatgtaagtgtattattcattacgtgcattatgtccttctacaatgcgatgtatttatttgccacaccagttgtaatgatcatcgcaatttttgtcacatcgttcactgtcaaccttcaggtaagtaaatttggcgttggtgtattaatcaataagctgaagaaaaaccttaagtag

SEQ ID NO: 397316 - DNA, 732 bp, Salmonella enterica
atgaaattaaaacaattagccgttgtaggtctgatcgcttctactcttgcactgtcaggttgtggtgccatgtccaccgcggtgaagaagcgtaatctagatgtcaaaactcagatgagtgagaccatctggctggagccgtcatcagagaaaacggtttatctacagatccgtaatacttccgacaaggacatgtctgggctacaggcacaaattacaaatgaactggccgcgaaaggctaccgtgtctccagctctccggacaccgcctactactggattcaggcaaacgtgctgaaagctgaaaagatggacctgcgtgaagctcagggcttcctgaaaacaggctatgagggcgcagccatgggcgcagctctgggagcaggcatcaccgcgtacaactccagttcagcaggtgcgacactgggagtagggctggccacgggactgattggtatggctgccgatgcaatggttgaagacgtcaactatacgatggtaaccgacctgcaaatctccgagcgcagcaaagcgaccgttactaccgacaacattgctgccctgaaacaaggtacttccggcgtgaaggttcagaccagctcagagcagggcaaccgtgccaaataccagacccgtgtggtatctaatgccaacaaggtaaacctcaagttcgaagaggcgaaacctgtcctggaagcgcagctggccaaatccatcgccggcatcatgtaa

SEQ ID NO: 397317 - DNA, 315 bp, Salmonella enterica
atgatgcgtcagagaaatgaacgtgcagattactcagctgaattctggtcgcttatccatctggaaagtgaactgatggcagcaagggcctggatgaatgtatttggttcacttcctgaggggctgggtatgaccattgttgctttctgggctggctatgaatttaccctttatgatctggaaccccgggagtggcattcagcgttttataaggatgtggcctcttcagtccgttctgtggctgcatacattaataaacaggactgggatgacggatgtcagcaggccaggtatgaactgagtcagatggagtaa

SEQ ID NO: 397318 - DNA, 2598 bp, Salmonella enterica
atgagcttcgcaggaaaaaaccttacccagggcgggcagatgaccgcctaccgctggcgcatgttcattcaggtgaacaactggataggattctggatcttcatcctgttcgccgtgctgactaccgccatctttctctggcgaattccccaggaagccctggataacggctccctgtggtggttcgccagtatcaacagcagttttatcgatctaatgccggcaacggggacgccaaagatatacgacgttcactactggtatgctccgaccgcgacggcaatggtgctgaaaatgacgttaccacagatttataccgacccgtacatgcaggcaatgggcgatcagtgtctgcgtgaattgcaatgggcggccggtgccagtggcatcttcagcctggtggtgttcctggcggtgacctggtttatcgcggatatcgggcggaaagaaagcgaagatgaatacatttccggcatggagctgacggacaagccggtagaagtcaataaactgctgcgtaaaaacggtgaactgtccgaccttcgggtgggtgatctgcatatggtcaggatggcagaagtgctgaacttcctgatgcatggcaccatcggggtggggaagtcgacgctgatacgctggcttctggatcacatccgtaagcgcggtgacagagccattatttacgactccggctgtacctttaccgaaacccattacaaccccgacaccgatttcattctaaacgctcacgatgaacgctgtgccaactggcagatgtggggagagtgtgttgatgcagtcgactatgacaacctggccgccagccttatcccggtcgaaggggattcagacccattctgggtatccagctcgcgcactatctacgctgacctggccatacgtatgtctgtagacccggaacgcagcattgagaagtttctcaaaacacttctctcactcagcatgaaaaatctgcgtacctatctggccaacacgccctcagccaacctggttgaagagaagatcgagaaaacagccatttccattcgctcggtagtgactaactacgccaaagcccttcgctatctacagggactggatgacggaacccggcccccttttactatccgcgattggatgacgcaggcgcgctatgacaacagctggttgtttatctccactcaggcccgtcatcgtaagagcgtgaggccgttaatctccttgtgggtatcgctggccacgctgatgctccagagcatgggtgagaacagtgatcgccgggtgtggttcattatcgacgaagccccgagccttcagcgaatcccggagctggccgaaacactggctgaagcgcgtaagttcgggggatgttttgtgctgggcatgcagaacatggcgcagctggttcacgtctacggccgtgagctggccaaaagcatcttcgacctgatgaacacccgcatgtacggtcgttcaccgagtgctgagatggccaaggtggtggaagaagagctgggcaaccagcgtaagcgaaaaatccgcgagcagaacagctacggtctggaccaggtgcgtgacggtgtgtccctcggcaaggatgaggtcaataatcccatcgtcgactacgagcaaatcatgcgtctgccaaacctcaacttctacgtgcgtctcccgggtgaatacccggttgttcgcctgaagctgaagtaccgcgccatgaaaaaacgccatgcaggcctgatagaacgcaacattcgtgatgcgctcagcccggagctggaaaaaatcattcaggagaacgaacgcgctgctgctgccgcaggacttacattcccgagcggtgatgaagcgctggagaaggggagggagtccatatttgtgactggcgccgccgcatcagtagcgtctgccggcaccacggctgcgacgcaaatcgctgtaccgcgtcaggacaagccggtggaaggaaagtcccctgtcagtaccgggttggttgtacctgctgtacggccggccgtggctcccgtccccacccagtctaaggtgccggatactgaaccagcccctgaaaagcacagcacggtgaaaccccccgtcactgaagagaaaaaagataacgtcgtttcgatccgaccttccgcgccggtgcagaaaacagatgacgtatccgaaaggccacacccctccacacaggtggtcgctcatgagtctgccaccggctcagctccagcagtacccgaggccatcaaagctctgcgcaatcgtcacaacttaccagaacagcccgttgcctcgcccctgagcatgctgcacagggcacgccagcgaccggccgcttcggaaagcgagcagcagacggaagataacggtggtggtgagtccatgaatctcgaaatgaaggtaacagaactgcctgacggcggcctgagtgtgacgacagcgggtaagccggtcgcgccggtaaaaacggaagaagcgtaccgggcgaaccggcagctggcgcaggaagaagagaacattttacttcaccgtgacgcggacgacccgggttacgacgaaaacgatcagcattattacgacagagagcatgatatatga

SEQ ID NO: 397319 - DNA, 5424 bp, Salmonella enterica
atgatgtcagtcgcacccgtagcgtcagccggcgaggcagcaggctactacagtaattccgataactactattttctgggcagtcttcagagtctgtggatgggagaaggtgcaaaagcgctgggccttgagggcaatgtccgtggcgatgacctgacggccgtgcttgagggccgtctgccggacggctcacggcttggcaaggaggttaacggtaagcacattcaccgtcccggccatgacctgaccttttctgcccccaaaagtgtctcgatattggccctgatcggcaacgataaagaaatggtggaagcgcacaaccatgccgtccgtgtggcagccggctatgtggagaagcttatttctgcgcgcgacacgaaagacggcgtcacgtccatcgtgcacaccggcaggatggtggccgccgcctatacgcatgacacatcccgcaaccttgatccgcagctgcacacccacctgctcatcgccaacatgacggagtatgcgggcaaatggaaagccctggccactgattacattcataatgccgggtttatcgagaccgtcatgaagcaccaggtcacgctcggtaaaatttaccgcagtgccctgcgtgaacgggttgaagcgctcggtcatgaggtagaagaagtcggtaaacatggcatgtgggagatcaagggcgttccggaagacgtcagggacgaatattcctcccggggccgggaaattcagggggccgtgggggctgaagccacgctgcgcagccgggatgtggccgcgaaagacacccgcagggcgaaagttgacccttcgcgtatgcgcctgatggagcgctggctgggacaaatgaaggagaagggatttgacctgaaagcatatcaggagagcgtcgttccgcgtgatgcaggtcttcgtgacacaccgcctcagccggagcgaggtcttcaggcgacgccggttcctgccgggcctgaacaggttaccccgcaggcgtcgttgagggcagaaaaacgtcccgacacacctgctcagaccgcagaacgggagagtctgtcccgtcagcctgtagcacagccggctgacgcagtgagtcagccggcacaggccggacccggaaaaacgccggtggccaggagctttcccgcagcgcagccggacatggaaatggcccgcccggaactggctgaggcagtccggctggccatctcgcagttaagcgacagtaaaacacgttttacgtttggtgaactaatgctgaccacggcggagctgagcgaacggctgccggagattcaggatatccgtgtggccatcgatgcggcgctgaaggacggcatgattgtgccgctggacagtgagaaaggggtcttcacctcccgtattcacctcctggatgaactctcgatccaggcgctgagtcaggagcatctcaaatccacaaaggtcgtcagtttcacccgcccggcgcagtacgcaccggcggcgctggaggtcgtggagaaagacgccctggttctgatgaatgccccgtcaggcgtggcgggcatccgtgacctgaccgcgcagctggccggtattgccggcgcgaacggtcgtgacgtgcaggtgctggccagctctgccgaacgcgccatttcgctggcaaaatccgacgatttgcgggaacggatcatcagccggcagcatgttctgagcggtgattttcacctgaaaccccagagcacgctgattatcgaaggggcggagcgccttgggctaaaggagacgctggttctgctgggcgaagcgcgcgcgcaggatgcgcagctggtctttctcgacagcgccgggcgtcaggcgaacggtaacgccatgtccgtgctggagtccgccggtgtggcccgctcccgccgcacggagccgtctccggggcttgaggccgaagtggtcagtattccggacaaacgcgaccgttacgaagcgctggccagccggtttgccgagctgagcggcggccatgaaaacgtcaccgccgtcgtggtcggcaggcgtgaacaggcgcagctgacgggtctggtgcgtgaggcgttgcagaacgcaggacagctggggcgcgacggtgtggagatagaggcccggcagccggtctggcttgacagcaaaacacgccgcatgccgggttcataccgtcccggcatggtgcttgaagatcgcacggacgcaaaagaccgtaaatcgtatgtgattgaccgggtgcatgaggacacgcgggttctctcgctaatcgacggtgacggcgtgctgacacggatgaaaatcggggatatcagcgctgactggcgtctcttcagccgtgaaaccctcagcgtggccaccggcgaaaaactgctggccgtggcgggggatcgtgagcacagcctgaaggcaaaagaccgtcttgaggtgaccgggataagtgaaaaggggattgaggttaaacggggggaagacaccctgacgctgccaaaagaccagccgctctatctgtcacatgcttacgtgaccgcgccgggcggccgggataacgataccggtgtggtgctggccgcactgaacagccgcgacatctcatcccggaccatgaactcgctggcacagagtggccaccgggcggaagtgttcaccgctgaagtgcaggaccgggctgaagcccggatgcagcgtatgaagaccagtgtctctcccgtgcagctggtcagaaacctgagtggccatgatgacgtcagtcaggcggttgattcactgcatgacagcgtccggacggacgccgggctggccgtctggcgtgccatcaatgaccagcgcaccgtggtgttcagcgaacttaagcttgcgacagaagcgcagaaatatcatcccgaccttgaggccatcgggaatgaaatcggggcgatggtcaaaaacggcgagttgctctgcgtgtcagcaggcggagagccggtgctggtttcccgggcgacctgggagatggaaaaagccattctgcgcgtggtggaggaagggaaaggtacgcagcagccattgctggaacaggtacccgaggccgtgctgaatggcctgactgaggggcagaaaaaggcgaccaccctggtgctgggcaccacggatcagtttatcgggattcagggctatgccggcgtggggaaaaccacgcagctgaaggcggtgatatctgcactggagaccataccggcggacgttcgtccggttatgacggggcttgctccaacccaccaggcggtgaaagagatgagcgacgtcggtgtccgggcgcagaccatcaaatcctttatcgttgagcatgatcaggccacggccgcaggcgggaagcctgactataaagggcaggtgtttcttatcgatgagtcctcaatggcaggcaaccaggatacggcggcactgttccaggccattgccagcggcggcggtcgcgctgtctcgatgggggatatcgatcagtttgaagcggtcgacgtgggcgcaccctttaagctgatgcaggagcgcagcccgatggatgtggccatcatgaagcaaatcgtccgccagaaggacatgcagctgcgcggtgccgttcacgacatcattgataaccggatcgatgcggcccttcagcggattgaaactcagccggcagaccgtgtggcgcgtggcgcttcggccacgctccccgtgagtgccattcaggaaacggagacgcccgttaccgacatcgtggccgactggacggaccgcacaccggaggcacggtcccgcacgctaatcattgcgcagctgaacgccgaccgtaaggcgataaatgccggtattcatgccgcgctggctgcgcggggtgaactgggagagaaagccattacggtgcccgtgctcgataaaatcacccacacccgccatgagttcaataaaaccgaggcctggcagccgggaatggtggttaaacgcggcgatcgctaccaggatgtactggccgttgaccgtaacggcagaacggtgacggtacgtgatgaggaggggaagattggtctgtattccccgaaggagctgatcaccggcgacgtgcagctgtttcgccgcagcgagatggaagtccgcacaggcgatctgcttaagttcacggcgaccgatcgcgaacaggggcagatggccaaccagcgctatacggtggagtcggtcagcgagaaggggaatattcgtctgaagggggagaacggtcgcgtcaccatcaatccggagaacgtccgggcgcagcagcatatcgactacggctgggccgtcaccggttacggtgctcagggggccagtaccgattatgtcattgcgcttgagggcacggaaggcgggcgtaaggcgcttgcctcccgtcgtgccttctacatcacggcctcgcgcgtgaaggagcacgtccagatttataccgacgggaaagcggactgggttaaggcggtaaaaacgccggagcgggatatcaaaacggcgcacgatgcgctggcacccgaaacgcagcggaaacaggcgaaagccatctgggcaatggggcagccggtgaataaaacggccattggccgcgcctgggtgcgccatcagggcatgcaggacgcgtcactgacggcaaaaattatcccggccacccggcgctttcccgaaccggctctggcgctgccggtgtatgacaacaatggccggagtgcgggcctggccctggtttccctggtcgccagcccggaaggccggatgacgcagggggagacccggatggttatgacagagcgtgcacgtggtgccgtgctgcagcggagtcagtccggaaacacgattgtggccagtgacctgactgccgcactcgatgctgtacgacatcacccgaaggacggcgtggtctggcagaccggcgatgagccgccttcagcatggctgcttaaggtgagcggcgggacaaaacaggatgtgtcaccgggtattgtctccacgcagacggacgagcagaacgtacagcagctgcgcgagcagatgctggcagatcaggttcgcaatgaagacgccggacggaacaggcagccagagtcgttgctgacggaaattccacaggaagaggtgatcagactgaaaccggaagatattaacccgcgtaaaccggaaccattcaacccggatgctgatgtgatcgtcagggtgagaggtgaggaaaacaccggtggacaggaaatgaaagccgcagcagaagtcagaaatgagctggaaggtgctgacaggacatccggtgaactgtcgcgggcatcgcgggtgattgcagatctggcaaacgctgaacgcgacatgctcagggcggcagaaaatgctgaacgcggccgcatgccggagcgtgaagaacagaccctcacccgtaccattcagaaagaacgctaa

SEQ ID NO: 397320 - DNA, 789 bp, Salmonella enterica
atgaaagcaaacaaattagcagcatttatagttacaacatacatcggctttatttcaacaacacacgcttcggccccgcagccggtattcagcccggaacaagaggcccgtatcggggaaatcgcagcagactatctggtgtcccacccggagatactggtgacggtcagtaaaaacctacaggaacagcagcaggcgcgtaagcagaagatgtttgcactcagcgtgatggagaatcaggcgagccttcttcatgacccggacacaccggctgtcggacctgcaaatgcagaggtcgcggtgattgaattctttgattaccagtgcgtgttctgtagccgcttcgcgccggaactggaaaaggtcatgaaagcgcatccggacgtccgctacctctttaaggagtggccaatttttggtggtcgctgggaagcttcacttcaggccgcgcatcaggggctgacggtctggcaaaagaaagggcctcaggcctatgtcacctatcacaatgcgatctacgccaccggccataatgaaggcaaactgacggcagatgatattcacggggctgcgttaaaagcaggactggcaacgccggctccgggcgagcatacagcgtccctggagaaaaacagcaatctggcggaggtgctggggctcaccggaacgccggggatcatcgtgatgcccgtcactggcgccacaccggaaaccatcacggttttcccggaagccgttaccgctgacagactacaggccgctataaggaaggcctcgcagggtcaatag

SEQ ID NO: 397321 - DNA, 804 bp, Salmonella enterica
atggacacgttgcttttccccggccagaacccgcgcgcatgggcagaaactatgatcaatcttgaggcccggaagctggtgaacacggctaatacgttggcggcgatgcaccttcaggatggcttgatccggattcagtttgtggatgagatccgggcattcatcatggcgcagtttgaagcggcgcgccgggcaacctcggatgaagactgtatggcctgtctgcgggccttacaggctgaaaataccagcctcctggagcagtcccgatcgctcaaaaccggctatgcgaaactgtatgctgaagtgaaggttgtccgggatgagaacaggattgtgggctacatcatttcagcggtcgacgtcgtggtggccggtgcggccatctttggtgggatcgtcatgatgtcctcgatgacgccggtgggagtggtggccggcgcggtgattgtcgttaatggtttcaatacgatttcacgggaagccgcgcacagtctcctgggcgataaacagaccgaggggatatttgctgacggatcgatggagttcgcggagtttctgggtttcagccggcagcaggggctgggcacgtataaagcggtcacgctgttcagcgaaatgtacggcgcatacgggctgaggctcaggcctgaagctcagcgtctgtggtactggacccgctctgatttcttccggaaagcctccgcaacatcccgaccggcgatggcgctcaggattgcgggatggggtgttaaagccaaagtggcgctggatttactgtctatcgatccgggcgcgaaatag

SEQ ID NO: 397322 - DNA, 324 bp, Salmonella enterica
atggctgtcagtgaaaaagacctgctcagtgcaggcttcagcaaacgcgaagtgaaaaacttacaggcccggcttgcagcgaccggaggcaccatgcatggcctgatcgacgcgctttcacgccgcttcagggtgtcggtatggatcacggttgcgctggctctggttatgctggccacccttatcgccggcagcaggacacacatcctttccggcgtcatcagttcccttgttgtcctggtcatcgcctgggtgaccttcccgccagcgcttggctggaaagctagcaggttacagaaaactatttcgcgcccggatcgatag

SEQ ID NO: 397323 - DNA, 771 bp, Salmonella enterica
atgaatcattcagtacccaacgttctttccggcatccggaacggcagccagctcagtccagcggctctcgatatggtaaaacttctcgcacttctggtcatggttatcgaccacgccaatacggtgtttatgacgccagcacagccgtggatgtatgcgcttggccggatggccttccccctgttcacgcttatatgggcgacgaacgtacagcgcaatccggaacgactacagaagagagccaatcgtctgtggatctgggcagtcatcactcagccggtgttcagcctgacctttctgcatcaccagccctggtgggccctgaacattctgttcgtgttcgcaggcgtcacgcagctgcttgccctgcggcaccgacacggcctgaaaggaatgcttgccggatatctgctcctggccctcatgatttggccactccagccggcaagctacggactggcagggatcacgctggccgtcagtatggcaaccgtttctggcagcggcacacccgaagtgaagcgaatggcggtcgctggcgccgtgctgtcactgatttgtttaaacgggttgtcgcatatcctgaacctgcccgcagaaacattattactggccacgctgcctactctggtattccccctgatggtggtctctttcagcagccagttctgcccggaaggccgtcagcgtttcatgccgcgtaatttcttttatattgcttacgcggggcatctgggaataatagccctgatacattacgccgtgagttaa

SEQ ID NO: 397324 - DNA, 360 bp, Salmonella enterica
atgcagattaaacctatcaaaactgaacaggactatgaagcagcgttacgcgccgtggagcctatgtttgataatgaacctcctatagataccccggagggagacttttttgaaatcatgtgtgtgttgatcaatgaatacgaaaacaaacacttccctattgaagcccctgacccggtagaagctattaagttcaggatggaacagcaggggctgacggtaaaagatcttgagccagcaataggaaaatctaaccgggtctatgaagtgcttaaccgcaaacgtaatctgacactgcccatgatcaggaaattacattcaatgttcggtattcctttaaaaagcctcgttggaggataa

SEQ ID NO: 397325 - DNA, 303 bp, Salmonella enterica
atgaagataatcgctattaagacactgagggatttctggacggcgaatcctgatgcagagcagccgttaaaagcctggatagatgaagccaataaagctgaatggaaaactccggcagaaatcaaagaacaataccgcagtgccagtattcttaaaaacaggcgcgtggtttttaatattaagggaaatgactatcggttaattgttgcgattgcatacaagcgaggatggatgtttatcaaattcattggtacgcacaaagaatatgacaaaatagatgctgaaactgtcagcctggagtaa

SEQ ID NO: 397326 - DNA, 459 bp, Salmonella enterica
atggagctcgatcaggccagcaatcctatatcgtttccaaagttgagatgggtacgctaccgtaatagacgtgaagtcactggcgaagtgaaaaacgtcacggtcagccattcatgcagtaaatgctacgtcagtatccagatggaatacgaagtagctgaccctgcacacaacgcagagtcaatagtcggactggatgccggagtcacgaaactcgccacgctttcggatggcacgatctatcagcccgttaacagctataaaaaaagccagcgcaagctggcagtgctccagaaacaattaagtcgcaaagaaaaattcagtgcaaactggcagaaacagaagcgcaaaattcagcctcttcactcgcatattgacaatatctggtgcgtctaccttcacaaagtcaccagtgaaatcagcaaaaaccgcgcgattgtaggaatctccgtcttttag

SEQ ID NO: 397327 - DNA, 198 bp, Salmonella enterica
atgacctgggaagccgggcggcaggagccggaatccgtcagggatgagctgaaggacgttcaagcattacagaaggcactgactgatgttactcaaattgcaatcaatgggcgcaagctgtatttgtatccattgtatccagtactagctctcttcaacaacgaagttatttttacagcctatcggaagtaccggtga

SEQ ID NO: 397328 - DNA, 1584 bp, Salmonella enterica
atgaaactcaacgatctctctatcggacaaagggtcggaatgctcgcaaccttgctgttaataaccaccttaattatgggggggtgtgggttggcgattaatgcagatgcccttgaaaaaaacgaacaaatcatgaccacagagagcgccattacagagagcattgatacagcccgtaaggcgcaggtgcagtttaaaattcaggtgcaggagtggaaaaacattctccttcgtggtacgcaaaaccaggaaacatacgataaatataaaagcgcttttatcgagcaaagccagaaaacacagatgctattaaaaaaactgagtgagttactaccgcaaatcggaatggcaaacagtgaagcgctcaaagccattaatttacacgctgctttggaaagtaaatatctggctgcgctgcggcgttatgacattcaaaacatcgccagtgctcaaaatatcgatcgcttggtgactgggatggatcgagaaccgacacgaatgatcgacgaaatagtctccaatacccttaaacaagcagtacagctccgtcatcaaaccgaagcccataataattatttgttccatcaaatacgtcagatgttgatagtttcgatagtattcatcctgagcgtcggaatgttggtcacttggtggttggtacgcagcattacccggccactggctttagctgtttcggttgcccggtctgcagccgcaggtgatttgcaatcttcttttgttatttccggtcgcgatgaaaccgctgtactaatgcgcgcactggacgagatgaattccaacctgacgtgcattgtcaccggcatacgttccggtacagaaactattgccgaggtgtcgcagaaaatcgctggaggcagcagcgaactctcggtgcgcaatgaagcacaggcaagcgcaattgtgcaaaccgcggcatcaatggaagaattaacatccgtagtgaaaaataatgctgaaaattcgctgctcgccagctctatcacccatgaggcaactcaaattgctaatcaaggagggagcgtagttgaagatgttgttacgacgatggacgagataagccaactctcaactgaaatgagtagcattattggtataatcgacagtattgcttttcaaacaaacatacttgccctgaatgctgcagttgaagccgcacgcgccggatcggaggggcgtggttttgcggtggtggcttcggaagtgcgttcgcttgctcagcggtccgcgacggcggcaaaggagatcagcgaactgattcagcgctcggttagctgtattgataaaggcaacaagctggtaaaaaatgccggaagtgccatgagtgaaattatgcaaagtgtcgggcgagttaaccaacttgtcgaaagcatttcactgaccagtaacgagcagcgcgtggggatcgagcaggtgaacgttgcgattacgcatctcgaggcagcaacacagcaaaacgccacactctcgcaggaaacttcagcagtagcacagacaatgcaacagcaggcagaacagttattagagatggtgagaattttcaaactaaatcagcacgcggtttaa

SEQ ID NO: 397329 - DNA, 270 bp, Salmonella enterica
atgagaatactgatcgcgaatttagtagagaaaatgaaagaagaccagcaaaccaagcgccacctttctgcccaagctgacgcgctgacgatagtggtaagtggccttttggctcggatggattgtatacaaagagaaaaaatacgagaaagtattggaggggcctttgacgcccagcagacggtaaaggcgggggcttcaatggaattaaatatgctgcgagaagttacggagagtctcttaagaggcgaaaaggatcctcctttataa

SEQ ID NO: 397330 - DNA, 453 bp, Salmonella enterica
atggttaggttaatcactgctgttttatccctgctagctgcaactgctgtgctcgctcaaaatgagattaccgtcagagctcttgccgttgatagtgcaacaggcaataagtttcacgaatgggcaaaagagcataatttaccagaatgggttatggaaggtggtacaggctcaccttcaaggcaggtcaccatcgataacaaaagtttccaagttatgtctgcatgtaaaccacatgcttgtgctaaagaacaaattgctatgctctacttaccagaacagagaaaaatatcgggtgttttctctacacaaactgaaactggagataatcaaacactgatctggctgaactccgataacgaaaatgaaatatctctggatggcaaagcagttctttttaccgccctgagtggaagcctggaaaaccataccgcctcatttaacctgagatga

SEQ ID NO: 397331 - DNA, 498 bp, Salmonella enterica
atgcctaccattatactttggtctatgacaaaagaaactgatattcgccgaggaagacactgcgttttcctgatgcatgttcacttggtattcgtcgccaaatatcgacgaaagatatttgatcttgatgccatcgaaaagctacgcaactactttgtcagcgtatgcgctgattttgatgttgaactggttgaaatggacggcgaatacgaccacgtgcatttgctgatcaattatccgccaaaactggcaatatcaaatctggtcaatagtcttaaaggcgtatccagcagactgcttcgccgtgaccggccagatatcgccctacgctattactacaaaggcgttctgtggacaccgagttattttgcaagcagttgcggtggtgcgccgatttcgatcatccggcaatacatcagcagcagcaaacaccaagttagttggaaaaccgcgccttatatccccgccctgaaggacggggttttacggcgcacctga

SEQ ID NO: 397332 - DNA, 1149 bp, Salmonella enterica
atgcggcgcttcgcgggggcttgtcgcttcgttttcaatcgtgcgttagcgcttcagaatgagaatcatgaagtggggaataagtatattccttacaccaaaatggcttcatggctcattgagtggaaatcacaccctgatacccaatggctaaaagacgctccatcacagccgttgcagcagtcactgaaagatctggagcgcggttacaaaaatttcttccagaagcgtgctgcattccctcgtttcaaaaaaagcggccaaaacgatgcattccgctacccgcaaggcgtgaagctcgatcaggtcaacaatcgtatatcgcttccaaagttgggatgggtacgctatcgcaatagccgtgaagtcatcggcgaagtgaaaaacgtcacggtcagccagtcatgcggcaaatggtacgtcagtatccagacggaatacgaagtggttgatcccgttcacaatgcagagtcgatggtcggtctggatgctgggatcacaaaacttgccacgctttctgatggcacggtataccatccggtcaacagttttaaagcaaaccagcgcaagctggcaatgctccagcgccagttaagccgcaaagttaaattcagtgccaactggcagaaacagaaacgaaaaatccagcatcatcactcgcatattgccaatatccggcgcgactaccttcacaaagtcaccagtgaaatcagcaaaaaccacgcgatgatcgtcattgaggacttgaaggtcagtaacatgtcaaaatcggcaaaaggtacggcagagcagcacggacgaaacgtcaaagccaaatcaggcttgaaccgctcgatactggatcagggctggtatgaaatgcgtcgccagcttgagtacaagcaggtctggcgtggaggtcaggttttggcgatacctccggcatataccagccagcgttgcgcctgttgtggtcatacagcaaaagagaaccgtttgtcacaaagtaaatttgagtgccttgagtgcggatataccgagaacgccgatatcaactgtgctcgtaacattttagcggcagggcatgccgtgcttgcctgtggagggatggtgcattcaggccgcccgttgaagcaggaacccgccgaggtgagtcaggcttcggtctga

SEQ ID NO: 397333 - DNA, 285 bp, Salmonella enterica
atgaccgtttacgattgcagacagactaggatcggcctgtcagccatatggacttcacttctggcgctggggcatgaaaagctgtggctgcgggatgatggagccttcgtccagatcgtcacttgggatggcttcattgcggctgagctggattttaacctgccgggctggataatcggcccggaagccattttcatttacaataacccggcaggttacgcccctgatgatgcacaggagctcacagatgaatgcgtagcccggcttaccgcagcctattcctag

SEQ ID NO: 397334 - DNA, 333 bp, Salmonella enterica
atgcgtagcccggcttaccgcagcctattcctagaggcacgagctgatttttacggtttgtacaaagcggagtcggctggcgttcacctggtcaaactggaacagtggttcgccagctcgaaaacctgtcattgttgcggtcacaagatgccagaaatgccgctcgaggtgcgcgaatggacgtgtcccggctgtaatgccgagcacgaccgcaatatcaacgcggcgatcaacatacagcacaaggacataacagaattaatggcggcaggacttgtcgtcaaagcccatcaaggcttgcgtaagtcttgctctacgccagttgcagcctaa

SEQ ID NO: 397335 - DNA, 228 bp, Salmonella enterica
atgaagaagatgtttatttcaatgtttgcagcagctgttgcgctttcagcactgacaggttgcacacgcacaagttatgccatccacaccaatgatgggcgtacgattatcagtgatggtaagcctaaagaatcagatacaggcctcttgggttatacagatgcaaatggtgtcaaacagcagataaacaaagccgatgtgaaagaagtctctgaagtcccgcactga

SEQ ID NO: 397336 - DNA, 198 bp, Salmonella enterica
atgcaacgggtgtttggtaaatgttgttacctgtcggggggtactgttgagtcagaggaagaaaaaggccgaataagcggccttttcgaagagcgtagagtctcagtgcgggacttcagagacttctttcacatcggctttgtttatctgctgtttgacaccatttgcatctgtataacccaagaggcctgtatctga

SEQ ID NO: 397337 - DNA, 417 bp, Salmonella enterica
atgaacaagacttatatgctcgacacctgtacctgctcgttcatcatacgcgagcagccggaagccgttcggaaacgcctggcacaggcagtgctgcgtggtcaccgcatcgtgatttcggccatcacctaccaggagatgcgcttcggcgccaccggcccgaaggcctcgctccgccatgtgcaactggtcgatgaattctgcacccgcctcgatgccgtcctgccctgggaccgcaccgcggtggacgccaccacgaagattagggtggccttgcgtcaggccgggacgccgattggtccgaacgatacggcgattgcggggcacgccaccgccgccggcgccgtgctggtgaccaataatgtgagggtatttgagcgggtaccgggcctgatggtggaagactgggttaaatag

SEQ ID NO: 397338 - DNA, 1287 bp, Salmonella enterica
atgttgaccgcttttttaatttttatcgccaccatcgtactggtcatctggcagccgaaaggtttgggtgtgggctggagtgccctgctgggcgccgcactggcactgctagccggcgtggtgcatctgggtgatattccaacggtttggggtatcgtctggaatgccaccatcaccttcatcgccgtcatcatcatcagcctgctgcttgatgaagccggtttttttgagtgggcggcgctacatgtggcacgctggggtaacggtaacggacgcaggctgttcgcctttttcgtgctgctgggcgcggccgtggcggcactgttcgccaacgacggcgcggcgctgatcctgacaccgatcgtaatggcgatgctgctggcgctcaggttcagtccagcggcgacgctggccttcgtgatggcggctggctttattgccgataccgccagcctgccactggtcgtctccaacctggtcaacatcgtctcagccgatttcttcaagatcggcttcaccgagtatgccgccatcatggtgccggtcaacatcgtcgccgtcgctgccaccctggcgatgttgatgtggttctttcgccgcgacatcccgaaagactacgatgttatgcaactaaaaaacccgcgtgaggcgattcttgacagcgccaccttcaaggccggttggtgggtattggcgctgctgctggttggctttttcgggctggaacatgtcggcgtgccgatcagcgctgtagcgtcagccggagcgctgattctactgggtgtggcggcgcgcggccatgtgatctccacccgcaaggtgctcaaagaagcgccttggcagattgtgattttttcacttggcatgtacctggtggtctacggcctgcgcaacgagggtctcaccgaacatatcgccggactgctcgattacttcgcacaaggaggcgtatggggcgcagctttcgggacgggcattctcaccgcgctgctatcgtcggtcatgaacaacatgcctacggtgctggtgggtgcactctccattgatgccacgagtgcaaccggtgtggtcaaggacgcgatgatctacgccaatgtgatcggcagtgacctcgggccgaagatcacccccatcggatcgctggcgacgctgctctggttgcatgtgctggcgcgcaagggcatgacgatcacttggggttattacttcaaggtgggtgttgtactaactgttcctgtactggcagtgacactagctgcgctagctcttcgcctgagtctcacttga

SEQ ID NO: 397339 - DNA, 486 bp, Salmonella enterica
atgaaagttcgcgacctgatgaccccaaacccgatacaaatcgcgcccgagacggctgtggcggaaatcgcccgcatcttgattgaacaccgcatcaacggcgttccggtcaccgatactgagggacgtctgctcggcatcgtgaccgagggtgatttggtccatcgcgccgccgacgagcggttggagccgcgcgaatcggtctggaaggagaacttctaccgctctgtgtttcgccggcgcacacccgagacggacaagaccgagggccgcacggccgcgcaggtcatgacgcgggaagtccttaccgtggcgcccgaagaccatgtcaccgtggccgcgcgtctgctcgcggatcacaacatcaagtctctgcccgtcatcgaaaacgagcggctgatcggcatcatctcgcgcttcgatttgatcaagcgactggccagcaaccgcggatatcttcaaccccatgagcaaggactgagctaa

SEQ ID NO: 397340 - DNA, 1413 bp, Salmonella enterica
atgacgcgtctgctcatcatcggcggcagcgatgcgggcatcagcgcggcgctgcgggctcacgagctcgatccccaaaccgaggtatcggttctactggccgacgagtacccgaattacagcatctgcggcctgcccttttacctcagcggcgagacgccggatcaccggcagcttgcccatcgcaccgcgttcgacggaatcgaaatcctgacgaaccatcgggccgtatcggttcatccagcggccaagacggtcgatgtcgtgcgcggggcgaacggcagtgtgaagacgttgcgctatgaccacctggtcatcgcgaccggtgccgtcccagtccgtccccaagggttgcccggcctcgatctccccggcgtttatctcctgcacaccatgggagatggcttcgctgtccatagccgtctcatgggcggcgagacacgctcggccatcattattggcgctggctacatcggcgtggagatggccgacgcgctgcggcatcgagggatcgatgtcacactcgtaagccataccgatcccgtgttcccaagcgtcgatccgtcgttcggtaggctgatcggggaggagctgtcacggcatggcgtgcgcgtcgtggtcggttgcaccgtggaacgaatcgaagccgccgataaccggcgtggtctcacggtatcgggttcgggcgggtttaccgcctctgccgatctggtgctggtcgccaccggcgcgcgacccgacaccaccctagccgccgctgcggggattgcgctggggccctctggcgccatccgcgtcacgcagcgcatggaaaccacgctacccggcatttgggccgccggcgactgcgccgagacctggcatcggatactccagcggccagcgtacctgccactcgggacgaccgcgcacaaacagggccgtgtggccggcgagaacgcggtaggcggggagcgtctgttcgcgggctcggtcggcacccaaaccgtgaaagtgttcgagttggcaatcgcacggacgggcttgcgcgaagccgaggcgcgcacggccgactttgatcccgtcaccatcgagactgaaacctgggatcacaaggcctactaccctggagcgcagaagctccgcgtccgggtgaccggtgatcgccggactggccggctcctgggcgcgcagatcctcggcccctggcgctcggaggtgtcgaaacgcatcgacgtgttcgcaacggcactgttccacggcatgggcgtcgaagacttgaacgatctcgatctcagctacacaccgcccttcggcagcccgtgggacgcggtgcagatgggcgcgcaggcctggacgagcgtgatgaaaaacgaagtggcaagttgttcaccgcccatcgacccacaaattttaggaaggagcacaccatga

SEQ ID NO: 397341 - DNA, 1803 bp, Salmonella enterica
atgctttttctacaaaacccacccgctttcctgttttttactggcaaaggcggcgtcggcaagacctcgctgtcctgcgccaccgccattcatctggccgggcagggcaagaaaatactgctggtcagcactgatccggcgtccaacgtcggtcaggtattcagccaggaaatcggcaacaaaatcaccaccatttccaccgtagcggggctatcagccctggaaatcgacccacagcaggcagcgcagcaataccgcgaacgcatcgttggcccggtgcgcggcgctctgccagacgacgtggtcaaaggtatcgaagaacagctctccggagcctgcaccaccgaaatcgcggccttcgacgagttcaccgcgttgctgaccgatgcgacactgattgccgactacgatcacatcatcttcgacacggcgccgaccggtcataccatccgtctgctgcaacttccgggcgcgtggagcggcttcatcgagaagaatccggaaggagcgtcctgcctgggaccgctggcaggtcttgaaaagcaacgccagcgttacgctgaagcggtcaaggcgctgtccgaccctgagcgcacgcgcctgatattggtcgcccgcgcgcagaaaaccacgctggacgaggtcgcacgcacgcacgaggaactggccgccatcggcctgtccaggcagaacctggtcatcaacggtgtgctgccggaaagcgaagccgttcacgacgcgctggccgctgccatccatcgccgtgaacaggaggccatcgccaacatgcccgccgtgctgcgcgacctgcccctcgatcaactgccgctcaaggcattcaacctggtcggtgtcgaggcgctgagcagcctcttctccgatcgagacgaggctgcgcccgtcgtcgccggtgcgcctgccaaacccgttgaccttccgccgttgtcgacgctggttgatgagatcgctgaaacgggccatggcctgatcatgatgatgggcaagggcggcgtcggcaaaaccaccctggcggctgcggtggcggtggcgctggccgaacgcggcctgcccgtgcatctgacaacctctgaccccgccgcacacctgaccgacacgctggccggttcgctggacaacctggaagtcagccgcatcgacccccaggcggagaccgaacgttatcgccagcatgtgctggtcaccaaaggcaaggatctcgatgccgaaggccgtgccatgctggaagaagacttgcgctcgccctgcaccgaagaaatcgcggtgttccaggcgttctcgcgcgtcatccgcgaggccggtaaaaagttcgtggtgatggacaccgcaccaaccggccacaccctgctactgctcgacgccaccggggcttatcaccgcgaagtggcccgtcacgccgagtcgaacgtgcgctacaccacgccgatgatgcagttgcaggacccggcgcgcaccaaggtgatgattgtgaccttggcggaaaccacgccggtgctggaagcagccaatttacaggaagacctgcgccgcgctggcattgagccgtgggcctggctgatcaacaacagcctgtccgccgcaccaaccgcgtcacccttgctgaagcggcgggccgcgtttgagctgacccagatcgaggcggttcgcacccgctacaccaaacgcgtcgccctggtgccgatgcaggcggaagaaccgattggcatcgaacccttgctagccttggtcgagccgcggaacgggttcggccttggcggcgcgaaacatcaaaaggtggcgctatga

SEQ ID NO: 397342 - DNA, 366 bp, Salmonella enterica
atgaagaagatcgaagtgtttgacccatcgctgtgttgcagcaccggcgtctgcggcgtggaggttgaccaagccttggtgacttttgctgctgatgttgattgggcgaagcagaacggcgcgcacatcgaacgctacaacctggcgcagcagccacagatgtttgccgaaaatgcgaccgtaaaaggttttttgcagcgctccggtcaggatgcgctgccactgatcctggtcgatggtgaagtggccctcgcagggcgttaccccacccgcgatgagctggtccgctgggctgggttggcggctgcgccgtccatgaaaaccccgtctggcggctgctgcggtggcggcagccgcacctgctga

SEQ ID NO: 397343 - DNA, 480 bp, Salmonella enterica
atgaatatcctgtttctttgtaccggtaactcctgccgttctatattggcggaagcgacctttaaccacttggctccgacaggatggaaagcgatgagtgcgggaagtcagccgaccgggaccgtccatccgcgttccctggcgctcttggcgcgtgaaggtatcgacacgaacggactgcacagtaaatcgtgggacaacctgccgctggctccggatgtggtcatcaccgtgtgctcgaatgctgctggggaaacctgtccggcgtatcttggctcggtactgcgtgcgcattggggtgttgacgatcccgctcatgccacagggaccgaagcggaaatcgaagccgcgttcacgacggcctaccgtatcttgcggcgtcgcatcgaagccttccacgcgctgccgttggcgcaacttgcgcacgaccggacacgcttgaaggcggaactggatcggattggggtgctttcggcgtag

SEQ ID NO: 397344 - DNA, 378 bp, Salmonella enterica
atggaaaagcaagccgcaacatcaattttcgaatccctctcatcgggcctgcgcttggacgtgttcaggctgttggtcaagaaggggccggacggcatggtggcaggcgcgattgctaacgcgctggatataccgccggccaacctctcctttcacctgaaggcgttgtcacaagctcgcctggtgacggttgagcaagagggccgtttccagcgttaccgagcggacatcccgttgatgttggatctgatcgcgtacctcacggatgagtgttgcactggcagtcccgctaaatgcgtagaaatggttgctgcctcgaactgcgccaaggaactgttgcccgccctgtcacccactccaacgaaagcgataacatga

SEQ ID NO: 397345 - DNA, 564 bp, Salmonella enterica
ttgcaaggtcaacgtatcggctacgtccgggtcagcagcttcgaccaaaacccggagcggcaactggaacaggtcgaagtcggaaaggtattcaccgacaaggcatcgggcaaggacacccagcgcccggaacttgactcgctgctggccttcgtgcgcgaaggagatacggtggtggtgcacagcatggatcgcttggcccgcaacctcgatgacctgcgccgccttgtgcaaaagctgaccaggcgcggtgtgcgcatcgagttcgtcaaagaatgcctgaccttcaccggtgaggattcgccgatggcgaacttgatgttgtcggtcatgggcgcgttcgccgagttcgagcgagcattgatccgcgaacggcagagggaaggcatcgcgctcgccaaacagcgcggagcttacaggggccgcaagaaagcgctttcgcccgaacgcgccgctgaacttctgcaacgcgtcaaggccggcgaacaaaaggcaaagctggcccgtgaatttggcatcagccgcgaaacgttgtaccagtacctgcgcgaaattggagcttaa

SEQ ID NO: 397346 - DNA, 252 bp, Salmonella enterica
atgtatatggccatcaagagctgtggctttactctggccttaatgaggactgccccgtcgagacagcccgccggcgtcaggaatggcgatctccaaaaattctcaaacgaaacggcagaacaatcaggccagcctgatttctgggtgctcaccggtgattaccatctgccgcagtatgaacacagctgtccgccgtggaaagcctgcttcatcgataagatttttaaaacgaatggtttactgttctggtga

SEQ ID NO: 397347 - DNA, 330 bp, Salmonella enterica
atgtgtgatttgtgcagggcggacgggaattacttccatacgccggaatgtgtgtatgaccagctggtcagtgagtaccccgtgatgtggctgcgggactcgacccggatcggcgcctgctacaccctccgtgagctgctgtcgccggaagggatggtgctggccatacagaacgcgcctcccgtgacgggatggcggctgcgcatgcggtataacgaggccactgacgaagagattaacccgcattgcggggactgtatcgaactgccctccaggacggatgccctgcttgccttccggtcgttgcaggatgacacggcgtcagcttag

SEQ ID NO: 397348 - DNA, 399 bp, Salmonella enterica
atgaacagaactgatgatgaaccacagacagaaacggacgtgatggccaccgctttcagcaccatgcgaaagtacggcagtaatatcatcaacgttacgcagtttatggatacgaatgcttacgtgaaatccgatccacggatgccgagaacgcggctgcgtcgttacctgggacagtatggcctgcgcgatgaggcgctgagcgcggaggtcagacgtatcgtcgctggcccagggcgaccgaataacacgctgaaagccgggatcttctatacgtggtcctatggctgggagcctgcggatttcacgccaatgatgaggcgcatgttcaagggaaagcgcacccgccatgtgatgttgtttgatgaactgcctcagctgtttggcaaatcaggataa

SEQ ID NO: 397349 - DNA, 336 bp, Salmonella enterica
atgaaccatgaccaggtggctgcccgtgcggcagaagagattattgaactgctgacgctgtgccagcagttgcagtcagaaaaggatggccgggaacggccggcgcccggggcatattcccgcgatgaggatgattttgccgatcgcatccgttccgcatgcgggcacgccctgcagctgcgccggctgctgccgttagcgacgaccctcagcgccatcggcgccgagatggaacgccgggaagaaattaatgtgctcccgggcgaagattacgcgcagaaagcaatggtacgacttacagaacaatacctgttcggtagggacaacaagcaatga

SEQ ID NO: 397350 - DNA, 1284 bp, Salmonella enterica
atgaaacagtacacattgaaaatctactttggagataaatctgagcctgcttattttggtggcgacaggcaggatgattcatcgaatacgacaccgttccaggtggcgcttaaaaagtcgcgagactgtaattcatatgccgcttgcttatgtacgggtaaagaattgccactctctgtgaggctcagagtggagaaacatcatttagctcgattcccactcacgggcataaaacacagagaggactgcagattctatagtagcctcagtcctgaagggccgcaggggtgttatacacaggatgcattgaaagagaagccggatggaacaatcaatattaagcttgattatccattgcaggtcaccggtccgtcagttcctatagatagttctctgcgttctggtgatgcttcacggaacaataaacgcgacacagtttctattcttggtcttctgcattttctatgggagacaaccagctataacacgtgggtacctaaaatggacggtatgcgttcatccaccaaactgggttatcacttgtttaagcaagcagaaaagatagaagcaggcaaaacaaagttatctgatgttctgctcactccggcctacacgaactccagcgatagcagaagaaacagcatgactgtcgaacgagcgaaagttaataaacaacgtcttatagttattgctgagcttgctaagttctctgaaagttacatggatggattaaatcgacttcctgtacgtgacttttctggcatgccttttctagggcttgatgatgccagatggaagtctgcgttaagcagattcccaattgctgtgaatggctggatgaaagggatgaaagtatttgtaatcgctgttacagatgttcctggtgcaaaatcagcccaggtgagacagctggccctaatgatggtaagtgatcgctacatcccacttgattcattgaatgaaggggcgtttgaacaaaagctattcgagctggagcgatcgttttacaaacccctacgttatgattcatccactcatgaatatctcgccgatttttgcctcactgatgtttctacagataaccatttacctatccctgtggaaatatgggggatgaatactcctgattatcaagagcatcggatggtaaaggaaagatggtacaacgcaaattatggcgaaactaattggttatcatgggatgcaactcgaacatctgtagacagtatcgaatcgcttttgccaaagaaaatgaaaccattatatcatgatataattaaataa

SEQ ID NO: 397351 - DNA, 627 bp, Salmonella enterica
atgggaaaagttatatcgatcgttggtcagaaaggcggaggttcaaaaagtaccaaagccagaacacttgctgttgggtttactgaagctggatggaagacgcatctggcggacatagacacgaagcaacaaacctctctgaagtggacagaacgacgcgagaacaatggtctaagccaaattgactgcgctctttaccgccgggtagatacagctgtcaaaatgaaagatagctgccatttgcttatcattgatggtcgtcctgcagcagagacaacatcactggatgtggctgatgaatctgatctcgttatcataaccactgggaccacaattgatgatctggaaccttctctggaacttgcccgcgaattgattaaaaagggcattgagaaaaacaaaatcgtattcattgtcgctaagtcaccatctcagtcgcagggcgaaaaagctcaggagactatcaaagcgtggggcttcaaagttctaaatacaatcattccattcaaaaccagttacggtgaggctctggatgcggggcgtgccctccatgaaactcctttcaaatccttaaacgaaacggcaaaacaaatgattgaagagattcatgatatcattaactcatga

SEQ ID NO: 397352 - DNA, 228 bp, Salmonella enterica
atgaaagccccaggaaaatcaataaaacttgcacctcctaaggaggatgagccaactctggatgttaccggaaagggagctgcgccggattcatcggttaaacctatccaaatcaaagtgccggtatctaagcataaagagatgaaagcttacgcggcagaacagggaatatcgatgacagatatgctccttgcagggtatgaaatgtatcgcaataaaatgaaatga

SEQ ID NO: 397353 - DNA, 729 bp, Salmonella enterica
atggatactcaagcactcttgccagctactaaaacgtttaaaaaacgcgccagtataaagcaatctaacgaattgaccgaagccgcatattacttgcctcttcaggcaaaacgtgtgctgtggttatgccttatgcaggcctatttcaacgacagtcaggatgatgattctgacgtattacctctcttcaaaattagcgtttccgattacgtcaaatacttcaatgtcgctacgtctgtcgccagtcgtgatgtaaaggctggggtaaatgctttgggcgaatcaacggttaccttctatccaaaagaaggtgagtttgaagaagttaaacgtccttggcttgctgaagcaggaatgaagagaggccggggttcctggcagattgagtttaactacaaggtcatgccattccttgttggcttaacctcccagttcactacctattctctgtatgactgcggccagctcaatagtgttcgtgtcatccggctttatgaaagcctgtgtcagttccggagcacaggtgtctggatcaccacacatgactggttatgtgaacggtttatgcttccaacctcgcagaagaacaatattgcggaaatgaagcgtaccttcctggaacctgcgctgaagaaaattaatgagaagacgcccttaaaggtaagttatacaaccgaagaagatggtcgcttactgtttaattttcttgataaaaaaacaataatctga

SEQ ID NO: 397354 - DNA, 246 bp, Salmonella enterica
atggccgacggcagcctctacaatggcgatctgctggttgtggacagtgccgagaagccccggcatggcgatattgttgtggtcagcgtgcagggggaatttacggttaaacggctgctgctgacgccacgactgacgctacagcccatgaacgcggcctggtcgccgatttatcccgacccggacgatctggatatctttggcgtcgtcacgcacatcattcaccgtccccgggagatgtactga

SEQ ID NO: 397355 - DNA, 972 bp, Salmonella enterica
atgaatatttactgcgatgatggttcaactaatgttaagctggcatggtttgaaggaaacgaaatgcagacccgggtttctgccaactccttccggcatggctggaaagtggcggaattcagtgccgcaacgttcaactatcaggtgggcacgctgaaatacacctgggacagcgtcagccgggatgccatcccgacgacaaacgtggaataccagtacggtgatctcaacctgctggccgtgcatcatgccctgctgaacagcggacttgagccgcagccggtgagcctgaccgtgacgctgcccctgagcgagtattatgacggggactgccagcggaacgaggagaacatacgacgcaaacgggaaaacctgatgcgtgagctggttctgaataagggcagggcatttaccgtaacggatgtgaaggtgatgccggaatcactgccggcggcgttctcccgtctcgcggagctgaagcccggacccgcagagaccaccctgatcatcgatctcggcggaaccacgctcgatgccggcgtgattgtcggacagtttgatgatatcagtgcggtacacggcaatccgtctgtcggcgtgtcacaggtcacccgcgcagccgcaggcgcactgcgggcggcagacagcgaaaccagtgcgctcattgctgacacggtcatccgtaaccgcaatgatcgccagtatctacagcgtgtggtcaacgatgccggaaaaatcgacgatgtactgaacaaaattacagaggccatcacttccctgggcgcgcgtgtcaccagtgagctgacggccttcaggaacgttaaccgggtattcctggtcgggggaggggcatccctcattgaagaggctgtccgtcaggcctggcctctggctcctgaccgtatcgaggttataggcgatccgcagctggcgctggccagagagattgccctttacaataaagaggactaa

SEQ ID NO: 397356 - DNA, 663 bp, Salmonella enterica
gtgccggacggccagtattctttctatctgcacagcgacgatcgcaccgacatcgcggcgatggcgaccatcagcaccatctcacagccccttcgcggtgacttcatccggaccgccgccaccgccggggcggtgatgtaccagacggatgcccgtttaccggcgctgatcccggtgttctttgacgggcatctgagcgccatccggctttgtgccgtgatggcgctggtatccggcacctggtcttcactctcaggacttcctgatgagcctgatggtggcgtggcggctctggccatgtcaccggagacggaataccagcgccggcgttacaccctgacgcttcaggatgaccggagcagtgaacgggttgagcgtgtgctgacgggcgtgtcatcccgcctgcgcggagagctgctgagaaacctgattatcaccggtctggccctgcatacgaccgcaccggagctgccgcgtctgctggccagtatgccggtaccgcccggcacggtcagcgagctgcacgtggtggttcagcagatggccggtacggctggcgtgagtaacgcagcaatgccggagaaaccagcagagtctgccgcgcaggtttccggtgaagcgaccagaataaagaaaaatatgcgacgggcattcggagactaa

SEQ ID NO: 397357 - DNA, 264 bp, Salmonella enterica
atgtcagtgattaaacaaaaggcagaacagtgcattcatacctttctgcgcgcccggaacgtgcccgaatcccagtggccggaacgggtcaaaaagaccggcaggggaatgatactggcaggcgtggccgtcgtggttcccggcgttctggttgataacatttccctgccggtgacaatcgcgatgcaggtctgctacgcctcgctgatcggcatcggggttctcctggcgtttgacgagaaaaaacctgaggggcggggatga

SEQ ID NO: 397358 - DNA, 204 bp, Salmonella enterica
atgcagcttgaagaactgacaggagaagaacgcacgctggtagttgtggcattgcaggcgctgcaccgtgagagattaaccgcatcaaatgccgtctttacggcctgtagtctggccggaaaagagcagccgccggaagagatttttgggctgcgtgaagttcaggatgcgctgagacgtatgggtgctgcacctgcgcgttaa

SEQ ID NO: 397359 - DNA, 381 bp, Salmonella enterica; identical to SEQ ID NO: 134014

SEQ ID NO: 397360 - DNA, 693 bp, Salmonella enterica
atgtcccgttttattctgggtgactgcgtgcaggtgatgtcccgttttccggcgcgtgccgtcgattttattcttaccgatccgccttatctggttggctataaggaccgtaccggccgcaccctggccggggacaactctgccgaatggctccagcccgcatgtcatgaaatgtaccgcgtgctgaaaaacgacagccttatggtgagcttctatgcctggaaccgcgcggatctgtttctgaatgcgtggaaagcggctggcttccgggtggttggccatatcgtctttgccaagagctacgcctcaaaatcgacgttcgtgggttacacccatgagagcgcctacctgctggcgaaggggaggccgcaaaccccggaccgtcccatcccggacgtgatcccctggaaatacacgggcaaccgacaccatccgacggagaagccggtgcagagcctgcggccactgattgaatcgttcacgcgtccgggggccattgtccttgacccgttcgccggcagcggctccacctgcgtggccgccgccgaagccagccgccgctatatcgggatcgagatgcttgagcagtaccacgccgccggcgtccgccgtctggcacaggttgaacgggcgagaaggatgccggcggccaatgacggcgcgttttaccctgactggccggaggccgcatga

SEQ ID NO: 397361 - DNA, 222 bp, Salmonella enterica
atgaattacccgggccttgaacacctgcgcgcggacgtggccgcgctcagcaatgccatgtgtgatgtgcggatgctgctgaaccgcctcgaatcgcagcaccggcacgacgcggcaacgcttactgaacgtatggcagcgcagaccctgcgccggatcaacaccctgcttctggaagcctaccgcgaagccctggtgctggacgagacttttcaggactga

SEQ ID NO: 397362 - DNA, 423 bp, Salmonella enterica
atgtacggaacccgtgaagaactttgtgaagatcttgaaaacatgttcacgtctgacgaactcctggtcctgctggtctggacggaagaggggattagcgtggcctgccgtgaagcccagccagaaccggacggggctgaaatccgggaagtgatgaaggcgctcggcgaaatgaaaatgacgcaataccgtcaggagggggtaaataatctgactatcagcgatcttctgacccgtcagcgcgaagcggcaaaccgtcaggtgagcgttccggcggtactcctgtcccgcgtcctgcgtaactatgaatgcgagctggaaaaccggatcggtatggcctgggaagccgggcggcaggagccggaatctgtcagggatgagctgaataacgttcgcgccttacaggaggcgctggccgcctga

SEQ ID NO: 397363 - DNA, 429 bp, Salmonella enterica
atgaaccagaccgtgacctgtgatgctgttcgtcttgagggtgcgcagcgcctgactttcctgcctgatttgtttggcggcgattttatgacgtccgaggcgtccgtgtacgcctacgcccagcgctactgccccgagtatcagggaggattctggcagttttaccggctgccggacgggggcggatttatggctccggatgtggagagcctgaccctgtgcaatccggataactggtttgagcagactgtcagcggggaagtagcggggatcatcctcacggcattggtactgaatcaccgtagctggcaccacagcaaccatgaccatgaagaactgtgccgccacttctgccgccgttatgagcagcttatggcatttgccgacacccatccggaaagagccaccatctggcgtgcccttgattga

SEQ ID NO: 397364 - DNA, 411 bp, Salmonella enterica
atgattggtacagcaagagaaattgcccttgaaatgttcagacattccgacctcgatggcgagaaatacgttttcgcctgctggaatcgaaatgacattcgttgcgtctgccttgactgggatttaaccgatgaggaactggttgaagtcttgcgtcggctaagttcctgccttgaaagtggcgcggatatcggccagatacgggcgatagtcgaaaccatgctcgatgagcgacgcgagaagcgaaccgtgactattcccgcgaaatcgctggccttagtcatgcagcttgcaggacgggagatgcagcgtatcgccgtgtgcgcggaggatggcggcggatcagcagaagaaaccctggaagaagaaaacgacgtcatgatgagcctgcgcgctgcgcttgaggcctga

SEQ ID NO: 397365 - DNA, 198 bp, Salmonella enterica
atgcaactgtcaccggaaacccgcagtatcctgcgccagtataaaacgctcatcaacgagcgacgtcgtgaatccggactcagccccgtaaccaccgcgaaagtacttgatgagatctgcgaatcggctacccgtcagtgtgccgtctatctttgcggccacttcattctccagggcggtcagggcgacggacaataa

SEQ ID NO: 397366 - DNA, 273 bp, Salmonella enterica
atgcacacacgaaacgtcaacgtcaaaaccgccgctcaagaatcttccaggaagatgggggaagaacaaaaccctgtttctgtcgcgcgggaatgggtggctcaggccactgcgctgaaaacgggggtcaccgtcaccgtatccgatgtgtcccgatacggcgacgtgcaggtggagatccgcaccaacagaacgcttaactggcgcgcctggtcttttgagccagattttctgtttgaactgaaacgcaacctgcaatacgtgcagttttaa

SEQ ID NO: 397367 - DNA, 366 bp, Salmonella enterica
atgcagaaccttaacacccgtccggcaacccgtaaggtcgggcagagcaccgaaatcgtgaagctgctccgtattcaggccagcgacactcacgtggtcgagtttgacaacgtggacacccgttttaacgactgcaacaactggcaggtgatggcaggaggcaaacgtgtcctgttcagcaaccgcatgtatgagcgtttttcagatgtgaaatcggggatcgtggcaacgatcaacgtgtgtgaaaacagcggcagcgtaacggataaagcgatgctggaaggggcaaaagtcatgatgcaggttcttgatggctatccgtcctttgcagctctggcagcacaccctaaacgcattaccggttaa

SEQ ID NO: 397368 - DNA, 2019 bp, Salmonella enterica
atggtcgccaccaatactacggcaaaaaaaaccgttaaatccacccgcactaaaaagtctgcggaaaaaatcgcgcagtctaccgagcagaagctcgtccagctgctcgctgatacgcccgtacaaatcttcccgtactcacgcctgtcacgcactgacttaaacacgcgcatcattccgcataccgatcaggaagtggaagagatggcagacagcattcaggcaatgggcatcctgcaaaacctgatcggtgcagaactgccggacggtacgatcggcattgtcggcggggaaggtcgtcgcagaggcacaggcattctggtgatgcgcggtgtacttgatgcagacacgccgtttgttccggtgaaagtcctgcccgtggagatggctgtggcggcctcgatgatcgagaacggccgacgtaaaaacatgcatcccgccgagcagattatcggttttcgtacccttcagcaggaaggtaaaacggcctctcagatcggcgcactgatgggctaccacccgcgccacgttcagcgctgcctgaagctggcgaatcttgccccctccctgcttgatgcgctggcgcgggatgaaatcacccttgagcattgtgaagtgatgacccttgccgacactcatgaacggcagctacaggtctgggaagaagcgaaggcacagtggaacggcagtatgccaatgccccatacacttcgcaaaatggtgactgacgacaagatggccatcagccacccgatgtttgagtatgtgggcgaggaagcctataccgccgctggcggtacgctgaccgccgatctgttcagcgacagggacagtacctttgccgatgcggcgctggtgagatccctgctggctggcaagcttaccgtgctcgccgcccgcgttaagcaggagcagggctggggctgggctgagttccgcatgacggaactgcgcgccagcggtgaggacggtgaactgtaccgttttgccatgccgaaagctgtcctgacggaagaagaacagaagcgtgtcagtgagctggaagaacaaatggaagctactgaaacctacgatgacgaatacgagcttcagcagcagatcgatgacatttactgcgaggcggagtatcgcgaagccacgccggaatttcgcgccgcgcacggtatctgggtgtcatgggatggtgacagttttcaggttcagcctggtatccgcaggctgaccgacgaagaccgggcagcagaagaacaggcgcgtcaggaacgtgaaagtaaagtgatcacatacaccacgcctgaaatccccgctgatgcctatccggcaacgctggttaaggccatgtctgcggagcgcactcttgccgttcaggccgaactggcgggtcgtcccgacgtgtcggtggcgctgctgacgtggacactgtgcctcagtatgtttgaccgcagctacggtaaacgcagcgaaccgctgaaagcatatgtgacctcgaatcagcaccaccttgcatcactggctccatccggagaagaagggaaggcgccgacggcgctcaatgcacagaaaaaagcgcttcaggcaacgctgccagaaaactggcatctcgatttcacctggctgctgtcatggtcagcagagcaggtgaacaccctgctgggattctgtgcggcgcatggtattaacggcattcaggaacgcctgtataaccgcacggacaccagtgagctggacgcgctggaagcagcgctggactttgacctgcgcaagtggtggcaaccgggtgcagagagctacttcggcaagctcaccatcgcccagattggcaaagcctatgaagaagccggactcagtgcccgcgccggagagattgtgaagctcaggcgccgcgatgcggcgaaggccgccgaacaggatctgaatgctcagggctggctgcctgactggatggtgcgccctgcgccagccgctgaggctgaagaagccactgaatccgacgctgataccactgaccacgctgcttaa

SEQ ID NO: 397369 - DNA, 435 bp, Salmonella enterica
atgaccatgcaatatgacctgaaccgaatcaactccctgaccgcatccgacatggagtttatccgtcagcagggcgaggatgcgcgtcgcgccctcagcgatgccgtgaccggcctcctgtcgacacctgaaggatggcgcgtctgcgccgagttccgcagcgagtttggcggcttcttccccgtccagtgccgcttcagcgcggacggcagtgatgactggcatctgtgcgtgtgcagtcccggcgaagtctcgccgtactggcttctggtgctgctatcttccggcggtgaagtggtgcgtaccctttaccagagcgacacgctccagcccgaccggatcagccaactgatcgcgcagctggcaggtatgcgccgctttaactgcactgccagcaccgtggcgaacctgatgagcggggaggtgacagcatga

SEQ ID NO: 397370 - DNA, 732 bp, Salmonella enterica
atgatcccgtcctcacacgcgctcgtttccctgaagccagcccgtcaggctgcaatacaggctatcagccatgttgagtctgcccgcgaacgcggtgcacggctgcccgccatgccgtatgtgcgtacctttctgcgcctgttcacgggaagcggacgcctcaacgccacggtggctaataaaatacctggcctgcactgggtgccaaataaccgacattcgaacctgaaacaggtcgaggaggcacttaacacgatgattgcaaccagtggtgaagcttgcccgctgccgctcacaattgacgtacaggccgaactgtttcctgaagtcatgcacacccgcacggggcgacggctgcacaggtccggcatcaagaccacacgccagttgcgccgtcagtcacgcgagtttgaacagcgctggaagctgcgccagaacctgctggagcaggcgaaaatcgacctgaattttcagtcgcctgaaaccgtctgcacctggtacacccggtggagcgacgagtttgacgcggcagagcttgccggatcgttctggcgctggcagtcgcggttcgcgtcgctgaaggaacttgactggcttcgcatcagtggcgagccgctgtatgcagtgatgtacgaaatcccgtttatcgtgcgggagactccggaatctgtccgtactgctgagcgctggcaggtaccgaacaagttgcggtatcagcagggggcggaatga

SEQ ID NO: 397371 - DNA, 231 bp, Salmonella enterica
atgagaaataacccctgcaagacggagctgaaagtcgcccgcagccagcgtaacaagctccgtaccatgtcggcaaagctgaaagagatgtgctgcgagtgggacggactcagtggctggctggaaaccgaaagtgagcagctggctgagagtatagacaggcatcttgaggcgctcgaagaccagatccgcgagtggtcagaaggtacggataaccgggagggatattga

SEQ ID NO: 397372 - DNA, 225 bp, Salmonella enterica
ttgagcattatcagccgcaggttcgacaaaaaagagacaggaaccgtgttccggcatgctgaaagcgggaagatactgtaccgtcttgatgcccggctggaacgggatgactgggaaatgttgcaggcgttgatcggccttgtctataacgccggcgtggccgccggaagcgaacagcgagccgccgagattcgtgaggcactggggatttcaggagctgaatga

SEQ ID NO: 397373 - DNA, 216 bp, Salmonella enterica
atgtctagtcaacaccagtatggcctcttaccgtgcaatttgcaaggaggagtaaaccatgaaactgccgcgaaacgcccttatctggtgcgtattaatcgtgtgtataacgctcttaatattcacatgcctgacccggaaccgcttatgcgaactccggctaaaggacggggacagggaggtcgcggcaagcctggcttacgaatccaacggtaa

SEQ ID NO: 397374 - DNA, 486 bp, Salmonella enterica; identical to SEQ ID NO: 134015

SEQ ID NO: 397375 - DNA, 399 bp, Salmonella enterica; identical to SEQ ID NO: 374198

SEQ ID NO: 397376 - DNA, 1188 bp, Salmonella enterica
gtggccgtattcccctttcagtatcccggcggtttccttcgcgatggtcttgtagcgttcgccggtcaggacgttgagcaccgcctgggtgccgacaatctgcgaggtgggggtcaccagcgggataaagccaaggtcctcgcgcacgcgggggatttccgccagcacctggtccagcttgtccgccgcattctgctgcttcagctggctttcgaggttggtcagcattccgcccggcacctgcgccaccagaatgcggctgtcgtagcctttcagctggccttcaaaggcgtggtattttttgcgcacctcgcggaagtacgccgcgatgctttccagcttcaggatatccagcccggtgtcatattttgtgccggcaagcgtggcgaccagcgcctcggtggccgggtggccgtaggtggcgctcatggaggaaatcgccgtgtccacgccgtcaacgcccgcctcgatagccttcagcagggccatctccgccatcccggtggtggcgtgacagtgcaggtgcaggcgcacctcaaaacgttttttgatttcactgaccagctcaaaggcggccatcggcgtcaggatgccggacatatccttgatggcaatcgagtcaacgccggtttccagcagctgttcggtcaggtccagccaggtctgcagggtgtgcgccggactggtggtgtaggagagcgtgccctgggcgtgcgcgccgtggctgcgcaccgcctgcagggcggctttcatattgcgcgggtcgttcatggcatcgaagacgcggaacacgtccataccgtttttcaccgcgcgctcgacgaagcgttccaccacgtcatcggcgtagtggcggtagccgagcaggttctgcccgcgcagcagcatctgcagcggggttttcggcatggcttttttcagctcgcgcaggcgcagccacgggtcttcgccaagaaagcggatgcaggcgtcaaaggtggcgccgccccagcattcgagggagccgtagcccacgtcgtcgagctgagcggcaatcggcagcatatcgtcaagacgcagacgggtggcaaacagggactggtgggcgtcgcgcaggacgacatcggtaatggcaatagtcatggatccctccgggaattaagcgttaaggcggtgatggtgaatggcggcggcaatcaccggctttaa

SEQ ID NO: 397377 - DNA, 1326 bp, Salmonella enterica
atgtcgacaaaaaaatacgagcacattaaggagtattcttttcatggagagtttttccaatgtccagatgatagcaaaggaagattttccgctaagatagaatactcatcatatcatggtttaatcttagactattgtatttctgacagtgatgggcccgataagtgtgaaaggctctatggttatttgaacactggcgagcaatgtacgttaattggaccctttgacttttcgcaaggtggctttcatcttggaaaaggatttaccagaactggtcggcatggattcgctatcattttattcaatggcttttatgatgaaaatcataaaatagaatattgtgatctatctctacatgggttgcaggaattcattcatcctcaaggttttatcactcaactaaaacacaaaaatgccccaattttttctgcgtccgcagaagattggaagattgaactcattaataatgctacatttagcgtagtcggcgacggcttgttaaatattatatattgccaagatgcagatgcgctcacgaagctgtccgatgagtttttaaaaataaaagagttacacccatccgctcgattttcaattagaaaagatctaaccttctattttagatttaaaaatcataactctaaaaatataaaagaacacatgcttaatatttggaaggtgtcagggctaatttcaatattaaccgacaaacctaccttaccagatgaattatatataaaatttgaaggtggtcataccagaacaccatgcttattaacaaccagatttgagcaaagaacaatagatcttgcactgaaaaaattcgatcatcgttctttgccaataaactggaaaagcatagatatcgaaaaagccttcgagaaatggtttgagatttctgacagatatattcctttaactataacctatcagtatgaaacaggctacaggacactacaccaagcacattctgatattatccttttcgcaactcaaatcgaagcaataaactccacgctaggcggagagaaaagggagaagtatattaaaccgattgatgaatatgcatcaacctttctcagaaaaaaaatgaacaatttttttattagatttaataataattctttaggagcaaatattgcaacacttagaaatgaattagcacatgttgatcgcgataaagaattgatgacacaaatgacactagatgaatacatcaggattggtctgtatctaaggttaatcatcacctctcacttgctgtcaaatttgggcatcgaaaaagagcatatacaacgataccaaaaccgagttgcccaagattaa

SEQ ID NO: 397378 - DNA, 549 bp, Salmonella enterica
atgtcaaagtttacagagctgtgcagtgcatataccgagtttcggaacaaactttctgatactcgatttgatgcgtataacttttctggtcacgtgattaaaaattatttagattatcttgggattgataatgaaaaagcatataaaataatcccgttagataaagatgaaaaaccaaatacgaaatatactcccactggagctactcatttgggggatgatgggttctggcatttaggatttatattgaccgtctataaagactctaatacttacccacagtcgcctttccaaatagatttcaaattcagaaaaaatgatgatgactcatatacatttggtgttgatagcataggtttcgcaacaaaaatcacctctctcatcaactcaaatgaattcacacctgtatttgacaaaattcaagagtgtattctagggcactttcaggaatttgaagactttcttgttggtaagcatgacaagatgtcatctattggattcattcaagaaggtatttttgcgaaaattaacagcgaaaaaaatgagtaa

SEQ ID NO: 397379 - DNA, 138 bp, Salmonella enterica
atgggatggatatttcaacgtcaggctattttttgtgaggctgcgcaaaatatatggaggaaaagagtagaagcattgaacctttatttacataaagagggacttattgatgatcgcaacgagccagagagtcgataa

SEQ ID NO: 397380 - DNA, 336 bp, Salmonella enterica
atgccgcagccggctgcaatgttgggggattctctacagcaacaacacgtggttttggcggcacagcaggtggattttgcggagaaggcgtacctgatgccgcaatgggttgtaatgccgcagctggctgtaatgttggcggattctctgcagcgacactatgtggttttggcggtagagcaggtggaattcacggagaaggcgtacctgatgccgcaatgggttgtaatgccgcagctggctgcaatgttggcggattctctgcagcgacaacacgtggctttagcggtacagcaggtggatttcgcggagaaggcgaacctgatgccgcaatag

SEQ ID NO: 397381 - DNA, 423 bp, Salmonella enterica
ttgaataatactgttattactcaaaaaaatagcattatgacatcagtaactccttgtgagtttaacgttgatgatagagagaagcatttccatgaaatgcttaacaagtgtaagtggtatgaaccagatgttgtttttttgaaactagtcgagttatggaaaaacaaattttacagcccgtatttactcagacgttttatgttacagaaacagcgttcatttagtctcattaatggtcgactgcatggtatcatattgagaatagacactgatggtaataatattttattatctctaatattaaaccccaataatatctatcattccttgttatattatagggaaagagagatctctgaacgtttgaatcagttatttccactcgacaacattattttttcggtaacatatgaaactaaataa

SEQ ID NO: 397382 - DNA, 2607 bp, Salmonella enterica
atgaaatttaaaacagcgaaactgtccagcattagtctggctatagcctattcgctttatagttataatgtatttgccgatgccagtaatcatatcagcacaaaaggcgatcaggttataaatatgcctggcatagacattactgacgattactactcttattatactgacggcagtattgatatgaccgtcacagatagtaatatcaatacgggcagcgcaaccggtagtccgtactatcaagcgctcatcgctgactcatccagaagtaccgttaattttacagccaataacctgactaccgaaggcggcgaagttgaactcagcggcagcggagatatcacagcaaacgttacgaatagccatttagggtcagcagccgctctgcaatctgactccttatggctgaaatctaattacggcaacgcgactgctgacgtttcaaattcgattctcacgggccgactggatgttgatgcggctcagaatgcaaccacgaccgtcaattattctgacattgatcagggcgtacggacgatggccgagggagaagacgcgcaggatactctcgtcatcaagaacagtaccgttaccgctacggataccagtaattcgagcgctagcgtggtttatgccgacgccggcagcggcggcgcaagcgttgaaatagataacagcgctatcggcttaaatgctgactccacaccagcccgtagtcaggatgttcaggtatatgctgacaatggcggcaatgcgagcgtgatagttaacgattctaccgtacaaaacggcgttactgcctatacagaagggagtgatgcgcagatccaaattaataacagccacattggcaccgaagcaacggctaacaatgtcaattatatgctgcttgcacaatcatctcgtaaggctatcagccagggaaccgcgtcattgtccgttaataatagtcaggtcgacggcaatatttcggcccagtcacagggggatggtaatgccgagatatcactaaccaacggtacaacagtcaatggtaaagtgcgccttgtcggtagcaatatgattctgaatattgatgatgcgacattaaatggcaatatagaggccagcagttattctgaatcggatattggcgatgccggaacccatatgacagtgaatctgagcaatacggcctatcgcggtaatattgattcgaatgatggagatattagtgaaaatctgacaatcaatattaataatggcgcaataatcggcggtgaatcgctggatagcgctatgcagattaccggttatgacacggtgaatttcaatgtaaattatctcgccccttcactgattgatacgggcgtcgtctcttatttttatctgaataatgaagagcaggccgaggtaaacagtagccttgcgacaggtacgctggcgccgattcgcagtggcgcttacattatggacgatgtgaaatatcaggcaacggatgtaagctctcaaaccacatctgcggatgaaggcaaaacatggggtgtcaccttttataccgacgacccgacgcctccagacccaaccccacccgacccgacaccgccggatccgacgcccccagagccgacaccgccaaatccagcgcccccagaacccacgccgccaaacccggcaccgccggcacccgttccggatgccagtaacgtcgcggcggatattcaggccgctcaggcaggtttattagccagtgacgatatgattcatcggattgctgatggtgttacccatcagctcgatagcgcgaaaaccgatcataatagtcatttatggttgcagggagtttacgccagtggcgatcgtactgctggtattacgcactacagcaatgatatctccggcttccagatcggtagcgatatcgctcgccaaattcgtggcgataatgtgattggcgttggcctggcgcttggctacctgcataacgatctggatttgaataatcatctggatggccataataagatagacggcaattactacagcgtctatgccaactggaaacagttactgtctgatacgaagcattggggctggttcgcggatgcggtacttacttacggtgatatgtcttatagcagcgatgggtgtgacggacatctttccgctggcggagattacgacggacgtagttggttagttcagagccgcgtcggcgcgcagattaacgctacccgccagacctggctgcggccttatttaactatgggttatatcaacacccataccgatagttataacgatggctacagcgatgttagcagcggtaaacaagacggcggctttgccggggctggtatgcaggcaggcgtaagctacccgttacataacgtagaagtgaaaccgtacgtggagctggcttacgttgggcaatttggcgcagagacggatttccataccgacgattatcgttttgccggtcaaaatcttaacggtggtaacgccggactgggaatggatgtgaagttttcagaaaagtggagcgcaaatacccgtatcaatacgcagtttggtcacgatgttaacaacgaagtaaatgcttatatcagcgcaaaatatcagttttga

SEQ ID NO: 397383 - DNA, 225 bp, Salmonella enterica
atgagcggaaaaccagcggcacggcagggtgacatgacccaggtgggcggtccgatagtccaggggtcggcgggcgtgctgattggcgcgccgacgggcgtggcctgttcggtgtgcccgggcggcatcaccttgacggaagtgagccacctcagcgaagggctgcgggtggcggtacatcacgcaggacccggtggggctggcggggggatggaatttatataa

SEQ ID NO: 397384 - DNA, 429 bp, Salmonella enterica
atgagaagtaaattatttattttattggtgataataatctatggtctgcgatatttttttacccatggtgagttgggtggcaaaccaatatatgcgaatttacaggctattagtgaagaatcaagatacaatccaccttatactatgaataaccccgcccctcccgtgtttataagaaaagcttttaaatatttttattctggatatgatgtattaggtatccctacaggggattctttatctccgtatttttggatagtgacaaatacacatgctaataatgatccttcttctccagaagatgtatattatgtaacatctggtaggggatttaaattgtcatgtggttatcttaatgccctaattgaaaaagataatattgatttggttgttgaggagtttcttaaaaatagatgtgtgcttccatga

SEQ ID NO: 397385 - DNA, 1338 bp, Salmonella enterica
  misc_feature (400)..(409): n is a, c, g, or t
atgatcctattcttttatccctacataatgctttgctacagcgcaggatacgctttattgcaaacactggatgggatgggagtgattagtaccaactttgtagagatgaacgcacagggtgctcttttgagcagttactggtctcccaataaagttgctgtagtcttaggaggatgttttcttgagctctttattttattattaccctttgttttcttgagctcatggatacttgccagaaaaaagggactcatcatttgttttgttcttcttataacccctggcctattatcgctctgtcaccttcttcctgctattcagtggttgccattgacctatgaaataggaggtacaggtgcaacaggtaacgcagctggactcggaagtcttagcctcatannnnnnnnnntcatagggctattgtgtggttggattttggcagtaattattagtgatatttttgctacaggagagaaattcagacagtggatagatatttttctcatcctgacagcagttggtaacggtatgttctgggtatcagacagagaggtagctgtcggtaaaacagcatatgaggaaacaattacggatattaatgatgcagccaaataccttcttgttcaggtgaaagactacagccgcatgtgtgacaataacgggctttctgaaatgtcatcttgtcagtgggcatcgtacattcaagaaacgctagagaatattgccagtacaaaatcatctgttattgaatatgtaatacctaaaaatcttgacaccttctataaaattcctgagtactatagcaatcaagtatctccggataaaattagacaggaatttcaagacttcaataaaaaattatgcccaaataaatctctttccaaaacaataacacaattgccgtcaccttctcgatggtgccagaccccacccccagcttactgcaatgccattcaagagggaaaatataaaacaggtatgtcagaccgtttcgctgtcgccaatgagtgtgtaactacatcattattaaggtaccgccaaattttattaaaagaacaagctcgtttatccttaagtaaaaatgccccccattatagatggatgtggtttattgccatgtctttctttattggtgggaaaattgccaatgtaatgacaaaaataggcaatttagagaatcgtctcataactgaaaaatatagagtgaaatttatccttttaaaaatatttggttttattgtgcgtacattaataagatgtaccatcttatgtcggaaagtgtttttttcaacgttcaattttatcaaacgattgaaggaaataaagcatgatacttaa

SEQ ID NO: 397386 - DNA, 3300 bp, Salmonella enterica
  misc_feature (3083)..(3092): n is a, c, g, or t
atggacttatttgacctgttaacaattaagtttaccttgcccgcgaaagctgcccctgtaagaaaagtgggtgggaattatgttcataaattactttgccgatcaacaacagtatcggctcaagtcagaaatgcacgtttccaaggatattttgaacttgttacgggtctaaagcctcctctagactatatctatctgaaagatccaaattccagagggaaatgcgcagatggtgtagcttctcttaaagctaaggaaccatttacattcgaaaaatggcgagaagatacggagttaagctgggagcaatttccagagcaagcatttagcacttcacctgatgaaattaatgaacaatggtatcatcaatttcagtttagagaggacgatccagagcaccattctccaggtcttagaaaaccccaactgggtgcacttcatgcaattgcaggctatttcgctactgatttacaggtagaacctgctaccgtcgtactgcccactggaacgggaaaaacggaaacaatgctcgctaccatgatataccagcgatgcgagcgaattttgctcatagttccatctgattctctccgaacacagatatcaaaaaagttcatagatttaggatatttgccagagctaacaatcgttccacccaacattgcaccccctaatgtcgccattattaagaagggaattcaggtagcggaagaagctaagcaattaacttgtgaatcaaatgtcttggttgctacgaccagcgttttgtctgcctgctccgaaacagcattaaatgcactttgcgagtcatgtagccatctttttgttgatgaggctcatcatatctcagcctcatcatggcaaacaattcgcgaacgatttaaagacaaacgtgttgtgcagtttacagctaccccctttaggaatgataagaagtcccttggtgggaaaattatctataactacacgatgggggaagcccaacgagcaggctattttacaaatgtaaatttgctgcctgtagaagagtattactctgaccttatggatcatgcaatcgcagatacagctattggtcaactgcgtaaagacttaaataatggccttgatcatttgcttatggcccgtactagcaataagcagcgagcagaagaaatactgactatttatcagaaaactgcaccgaacttgaatccaatcgttgttcattctgattatcctaaaacggaaataaaaaaacgtcttgataaattattatcaagacaatcaagaatcgttatttgcgtagacatgttgggagaaggctatgatctacccaacctgaaaattgccgctttgcatgatcatcataaatctcttgcagttactttgcagttcattggccgttttactcgtgtcaataaagcacagaaaatcggtcaagccagtgtaatcatgaatgttgcagaccctaatgttgaaggtgaattacagcatctatattcaacagatgccgattgggataatgtattaaggcgactctctgaaggacgaattgctagagagattagattgcaagaagtcgtggatgccttaaaaaggaaaggtgatttacacgatcagatttcgctctggaatcttgagccaagctgttctgtcatgttatttcaaacatactgtgacaattgggagcctgaaagatacaaggaaaaactgcccagatttgacgaatcctggcatgcaatagcagaagatgagaatttgcttgttgtgctagctatccaggcaacttcagtccggtggggaaactacaaagatcttaaagataccaattataaaattctaattgctcattgggatcaagacagagccgccttgtttgtattctcaaatgactataaagcatttcgagttgagaatctagtcagtactatttgtgatgataaatttgaagttgtcagtggtgaaaaagtctttaatgtatttaatggcattgaatatcctttggcaagaaatttaggcgcatctcaaattggggcaatcagctttactcaatattttggcccaaatgtcactgaggggctatcactaattgaagcgtctcaatcaagcttaagcaatattgctgcattaggttatgaatccggaaaccgtgtaatctggggatgctcgcaacgcagaggtaaagtctggtcaccacaaaaaggtggcagcattgctgattggtgcaactgggttaagaaagcctgggacaagatctttagttctgaaccggatccaaacaatcttacgcgtaactttttgcgtcctgtcccattacttgaaccctataatgaatatccaatatcagctcaatggggtgagtatttgcttactgcgtttgaagataaagttatttttcattttgatactatatctgctcatttatatttagtagaggttaggactgctgggaagtttgaagatggtaatgtgcggctcattttttctacagatgaaacgtcatctgaatataaattatgtctcacgggaagtgctacagcaaaaggttattcctatcaattgatatctggccctgaagtttttatacagcgtggtgaatctgaaccggtatcactatcagagtatatggaaattgatccagtaatgattcattactccgatggctcattttcatacaacgctcatatagtccatgtaagccaaaatattggcctttatgacaaagacgaaattgtagcttttgattggaagggaactgatgttcgagtggaatcaatgggctatactcgtgatccattatccatccaatggcgttggtacagtgaaattaaagataattacgatgtcattattaatgatgatggtaaaggtgagtcagcagatttagtggggttgagaatagttgatgactgtattgttctctctttaatccattgcaagtattcaggctcagaagaagctggagcaagacttaaagatctttacgaagtatgtgggcaggcacagagatgcattcgttggaagcacctgaatctttcctatttataccatcacattaagcgtcgcgaggaacagtggcgatcgcgtggtcattctcgctnnnnnnnnnnttctcgctttctgaaaggcactataaaagaccttgctgctatgaaagagcgctccagaatcacacctcttaaattccaagttgttattgttcaaccaggacttagagtaagcaaaattaatgaagaaggccttaagctacttggcagcacggccttatttatcaagaaaacaacgatggcagatttagttgttattggttctaaatag

SEQ ID NO: 397387 - DNA, 1194 bp, Salmonella enterica
gtgagttggccgaaggtgaagttaggcgaaatttttactatatctcgaggggggtctccaagacctattcaagattatattaccgactcctgtaatggagtaaattggataatgattggtgatactgaaccaaattcaaaatacattagacatacagcaaaaaaaataaagtttgaaggagtgaaaaaatccagaaaggtctaccctggagatttattacttacaaactctatgagttttgggcgtccatatatacttgatgttgaaggatgtatacatgatggatggttggttctaagtcctaaaaataatcaaatacatattgattatttttatcattatttaaattctccagctgcaaaaatcatcatatcaaacaaggctgctggtgcagttgtaaaaaatttgaactcagatatcgtgagaaacttggaaattccgttccctccatttgcggaacaggtaaggatagcttcaactctcgataaagtcgatggcatacgtcaaaaacgtgaccaagccatcaaactggctgatgattttttgcgtgctacatttttggagatgtttggtgaccctgttgaaaatccaaaaaaattaaaaaaatcccccattactgaattggcagatgtcattacaggttttgcattcaaaagtaatgagtacattaatgattcgtctgaagcggtacggctttgcagaggggcaaatacgcttacgggatatttagattgggctgacacaaaattctggccaaaaaacaaactggaaaaactagataattatttaattaaggcaggtgatattatccttgctatggaccgtccgtggatatcaagcgggttaaaagtatgcatattccctgaaaatcagcgagaaacgtacttagttcagcgtgtagctaggttacgacctcgttgcgaatcttacacaaactatatttacagttgtattaaatcaccagctttcgaaaaacattgctgcccaacagaaacaacggtgccacatatatctcctgttgaacttaaaaattttgaagttctaattccgcccgacgaacttatggttaatttccattcgattgtatcaataatcaacaatagcttaaataaaatggcgtcaggcgatattgatagcgacgccctcttctctaagttaagtcagcaggctttttcaggacatcttaagaggtaa

SEQ ID NO: 397388 - DNA, 147 bp, Salmonella enterica
ttgcatgaactgaccggacatctttcctgtgcagaggtcaaggtaaagtcaatgcaggcaaataacttaaaccgtgtttctactaaaacagtgaaagagcgtctacaccctatgctggaagaaatgtttgaagtggctggtaaatga

SEQ ID NO: 397389 - DNA, 219 bp, Salmonella enterica; identical to SEQ ID NO: 393640

SEQ ID NO: 397390 - DNA, 333 bp, Salmonella enterica
atgaatgttggggaccattatatggtattaacagtgaataaaagaggaagcattgaactgatagatgttcctggtgatggggactgcttatttcgtgctgccgttaaaggtcagcagatagctaaaacacccacagttaattacagctatcaacagacaggaaatcataatgatgaacatattattttaaaggaatcgataaaaactcatttccagaataattttgatacatttattgatgatatgaaaatgattctcaccacagaaaaatcaaaagcagccaacaacattttacatgacattaacacatacataaaactaataaatctctga

SEQ ID NO: 397391 - DNA, 765 bp, Salmonella enterica
atggatttttttaataattcagtctcattacctaatggaatctggtcatcaaggactcaaacattacaatcactttctgatgaccagctttatgccattcgtgaacaatcccgcgccagtctgcataatccatcaccacaaagttacagcaaagtgactattaatggtcgtgaatattccataacctatcatcctcaggatgaccttttcgctgttgaaagaattaatggatgccagggaaggtttgttcaggggctttataacatggcaggccatccccggggtcagattacctggcaattaacctaccagctcaactcaccgaacagccaaagaaattacagagtggcaggagcagctctgctccccggtggagtctctgtatcagccaataacaggccgactgtttctgagggaaaaatagcgcctccgctccctcctaaacccacgactgtcgctatgcctgcatttgctaatcagaaacaagctgtttctgagggaaaaatagcgcctccggtccctcctaaacccacggctgtcgctatgcctaaatttggtaaggctgcagaaatattatcagtaggattaaaaagcaaaattattaaagatctaaatcttgataactggatgggcttaggcggagaaataaccccattggttatgattgacttttataaaaaacaaaacattgacttaattatacatgcacatataaaaaagaagccattaaaacagatccaattaaaaataattcaattaatttaa

SEQ ID NO: 397392 - DNA, 672 bp, Salmonella enterica
atgtgtggacgctttgcacaagcacagacccgtgaagaatatctggtatatctagccgacgaagccgatcgtaatattgcttatgatcctcagcctataggccggtataacgtggcacccgggactaaagtcctgctattgagcgaacgcgacgcgcaattacatctcgacccggtattttggggttacgcccccggatggtgggataaagctccgctgattaacgcccgcgtcgagacagcggcctccagcagaatgtttaagccactatggcagcatggccgggctatctgttttgccgatggatggttcgagtggaagaaggaaggcgacaaaaaacagccgtatttcattcacagaaaggacgggaagccgatattcatgactgccattggcagtacgccgtttgagcgtagtgatgaagcagagggattcctgattgttacctccgcagccgataaaggtctggtagacattcacgaccgtcgtcctctcgttctgtcacctgacgccgcgcgagaatggatgcgccagggcataagcgggaaggaggtagaggagataattactgatggtgtcgtgccgacagataaatttacctggcacgccgtgaagtgcgccgttggcaatgtgaaaaatcaaggggaagagctgatcaaacccgttatctga

SEQ ID NO: 397393 - DNA, 1221 bp, Salmonella enterica
atgaaaaaaaatataattttttctatccttagtacaggaacaaactatgtactaccattattagtcataccttattgtatatctagttatggtttggatggttatggtgtaatatcattaaccctagcattaacatcaatcgttgcattattaactcaattgaatttggagaatacatttgcatctttatctatttccaaggatgggactaccgtaagcaacataataattataaaatttattatgtatatttctgttgtcgcaattatttatttattttcgctgttatttattagcgaaaactcttttttatttatattaggcgttttgccattgtttttttgtattacaaatgtaaattattattttatagcacaacaaaacttcaaggcgatattttatttaaacgttttatcaaaattattttttacattggttgtcttcataattatatctttaaaactgccactgtcattggtggttatgagtatgaatggctggtatacgacatcttctttggttggtttattccttctcagaaaggttataaaagatagaccaataaaagattgcaaggaaagaataaatttaaaagagattttatcgctttttaaaattatcatacccggttttagttcatcactcgccagtttatttttgacaatgctagtacagccatttatggcaatcgtcactagtaataattataatataatcgcaatttattctatttgcgataaatgtatccgagccgccacggggtttttagactcaataaataatgtcttatattccaaaatatctagtttagaacagttaagtgaaaagaaaaaaatagtttttaaaactatagttttttatttattaattgagttttgtggcttattattactatatttattattcccatatctaatctcctatgttgaaaactttaagaaataccaagacctgttagatttggtattcttaatcacaccaattgttatggttattacattggggaatatattttcatcattagttctatttactagcggtatatttaaagaagttacttatactattgttttatcatctgctatctttatgacaataatatttatcccatgtaattcaaaagatatagagtattttttgtttgccttactattatctgaaggaatttcaactattttaaaaggaatgttagtatggaaaaaaacaaaattcttcaaatag

SEQ ID NO: 397394 - DNA, 1068 bp, Salmonella enterica
atggaaaaaaacaaaattcttcaaatagttccattttccaataaagggggggtagaatcggtggctaccaacctgtttatcaatccgcctgctgacagtattatgacatatggctatattaaagattttcagacgtcatgcccagaaaaaatattctttaaaagtttcttttcattatttaaatatttaaagggtaataaaatcaatgtcatacatagtcatgttttttcaataagatggatggtatttattagactttgttcattgttttttaaaataaaaatggtcactactttacatagtgatttcggtattatagatagtaatgttccattattgaggaaaggccgtcgattattttttataaaattattacattttttttcgaaaaaggctttatctgataaatgggttgcaatatccgattccgtggaaaatctacttgttaatgtattaaaaatagaagagaaaagggttataaaaatatataatcctgttaataatacaaatgttgatgttaatgaatcatcaaatcgtgaatatatagtttttgttgggagggatagcaaagaaaaaaatctgaaagatttattatatgtatgggaggaaatatacagcaaatatgattttatcagcttagctctaataggaattgagcctgattctgagtgtttgaattgttacggagacctgaaaagtaaaagagtactagcacttggttggcttgataatgctagtaaagacatttacttaaaagatgcgcttattcaagtgataccatcatattttgaagggttttgcttggcggcagttgaagctcttgaaaaaaatattcctatcataacgtatgatttacccgtatttaattattttaaaaaacagttcaatggagttcacattgtcccatcttttgaacgaaataaattgttaatagaaacttatgttactattaataacgtactggtcgggtatgaaataaataataaaaaaaatatcagtacttatttttcacaggatagttttatagatatacatcataaattatataaggagttaattgatagatga

SEQ ID NO: 397395 - DNA, 1002 bp, Salmonella enterica
atgagcagctcgccgcaattatcgctggtaagtaagcaagaagcggcagcagaattactcaagcgacgtaatgcgcgggccagccttcacgactttattcagtacatcaaccccgaatatataaccagtgagttctcgcagacggtttgcaacgctctggatcagtttctgctggatatgatgaacgggttacgcccgatactgattctcggtgcgccgccgcagcatggtaaatcggatattgtctcgcgctacctgccagcgtattttttcggaaaatattctgaaatgcgtgtaggtgcgctgtcgtactctgctgaccttgccggggacatgaacgccgacgttcagcgtattatgtcctcgcctgaataccgaaacatcttcccgggcgcatggctgggtaataagcctgctgatggtgtggcagtaaagcgcaatactgatgaattcggcatagccaaccataaggggacatatgtttgcgcgggcgtgggcggtccgttgacgggtaagaaaatcgatctcggtatcatcgatgatccgataaaaaacgccaaagaagcactcagcccgacgactaagaaatctatctggaactggtacgtttccacgtttaaaacccgcctgtcgaaaaacagcggcgaaatcatcatggcgacccgctgggcaacggatgatttgtctggtcgcgttatcgccaatagttcaaaagctaaagtgttagcgttccctgcgattaacgaacggggcgaagcgctggtaccggagctgcacccgctcgataagctactggagaccaaagctatcctgggtgattacttctggtctgcgatgtatcagcagtcaccaaaacaggctggtggttccatcttcaaagacgaatggatcaagtactacctaccgaaagacttgccgaccaacttcgacatagtcatccacagctgggatatgacgtttaaagacagtgaaggcaccgactatgttgtcggtcaggtatga

SEQ ID NO: 397396 - DNA, 396 bp, Salmonella enterica
atgggcagaaattacacactggcgcagaaagctgaaatacagaagcgcctgacggagctggtgcgaacacatggtcggatgacgtttggagagctgcggaagataacggggttaactatttttacagtccgtcactacctggaaaaggcggaaagttgtggggatctgtatcaggccgggagaaacggtattttcccttcggaacaggctttccggctttggaagcagaaacgtgaagatgccaggattaaccgctttctgaaaacaccggagggtgtggtgcgttcctacgaccggaccagaaacgttatctgtacggagtgccggaacagcgtgacgatgcaaagggtactggcattttatcggggaaattaccgggaggcgaaatctgaatga

SEQ ID NO: 397397 - DNA, 753 bp, Salmonella enterica
atgaaaaatatcgcagatagcgggattctggcccgtatcaggaaactggcgccacagtctgccgaacgcgcagcgccgttccggacgccggaggagtggcgggaatggcaactcgccgaagggcgcaggagttgcgaggaaattgaccgtcagaaccgtcaggcgagggcagaaaaaatcttcggtcgggccgggattcaacggctgcatcgcggatgctcgttcgcaaattaccggatacagaacgacggccagcgccatgcgctcagtcaggctaaatccattgccggtgaactggatactggctgcacgaacttcgtgttcagcgggaatcccggtaccggaaaaaatcatctggccgccgccattggcaatcgtctgatgaatgccggacgcagtgtgattgttatcaccgtagccgatgtgatgagtgcgcttcatgccagctacgatgacgggaaatccggtgagaaattcctgcgggaattgtgcggggttgatctgctgatcctcgatgaggttggcgtgcaacgtgagaccagaaacgaacaggtaacgctgaaccagattatcgatcgtcggacggcatccctgcgcagcgtcggaatgctgacaaaccttaaccatgaagcactgttgaagctggctggtcagcgtgtaatggacagaatgaccatgaatggcgggcggtgggtgaattttgactgggggagctggcgcccgaacgtcagctatctcagggcggtgaaataa

SEQ ID NO: 397398 - DNA, 243 bp, Salmonella enterica
atgcaaacaattatctatcaaatagcccccaatgattgggtcactgaaaaattattgattgcggctaccggattaaagcccggaacaatactacgcgcccgtaaagaatcgtggtttgtaggacgtgagtataagcacattacgcttgatggtgaaccaaagccaaacggtgaatgcctgtatcacctgccaacaataaatcggtggattggaaacatgccagatccggatgtcgatctttga

SEQ ID NO: 397399 - DNA, 1326 bp, Salmonella enterica
atgacgctcttggacgcaggaggaattatggctaaaccagcctatccaaccggcgttgaaaaacacggagacaaactccgcatctgcttccactacaaggggaggcgtgttcgtgaaaatctgggggtgcctgatacccccaaaaaccgcaaggtggccggagaactcagggcttcggtctgctttgcaatcaaggtaggtactttcgactatgcggcgcaattccctgactcaccgaacctgaaactattcgggattgtgaataaggaaatcacagtggcggaactggcggataagtggctaaagcttaaagagatggagatatccaaaaacaccatgcttcgttatgagtcgatcataaaaatcagcgtttctttattaggaggccgggttctcgcttcttctgtaacccaggaagatttactctttttcagaaaggagttaatgaccggccatcatattaccaggccaggccgcgagttagcgccaaaaggaagaagtgtggcaactgtaaactcctatctgggggttgtttctggattatttcagtttgctgcccgtaacggttacattccacaaaacccattcaatggaataactatgttgaagcgtgccaaagctgaaccagatccactttcacgtgaagaatttgcacgtcttattgacgcctgccatcaccagcaaattaaaaacctttggtcactggctgtttatactggtatgcggcatggggaattatgcgcgctggcatgggaagatatcgatctcaaagcggggactttgattgtcaggagaaactatacccaggcgaaagagttcaccctgccgaaaacccaggcaggaaccaacagggtgatacatcttgtgcagccagcaattgatgctttaaaaagtcaggcctctttcacgaagctgagcaaacagcacaaaattgaagtaaagctgcgcgaatacggtcgtacaaaaactcattcctgcacctttgtcttcaatccgcaaattaccgatcgctcaggtaaatccaaagcacattatgccgcaacttccctgaacaggatatgggaatctgcattgagacgcgccgggctgcgacacaggaaagcataccagtcccgacatacctatgcatgctgggcgcttgccgctggcgcgaacccgaactttattgcttcacaaatggggcactcaaacgctcagatggtctatacagtatatggagcatggatggctgataataaccagtcacaagtagatatactgaatcaacaactggcatctactgccccaggagtgccccaaaaagataacatgcttaattttatttag

SEQ ID NO: 397400 - DNA, 177 bp, Salmonella enterica
gtgcaaaaaacactgctggcaaaagcaatcctccgcacgctggcggagaaattccagcaggaagcgaacgtgaccttcccaccggaactggtggcgatggtggatagtctggaatcggagcttcagcgcgaggaactcagcgcacaaaccggacgtggctggcgcagtgcgggctga

SEQ ID NO: 397401 - DNA, 918 bp, Salmonella enterica
  misc_feature (361)..(370): n is a, c, g, or t
atgattagtagttcatctctttctgaaaccatagaaggtttaagcttgggctatcgcaaaggtagcgcgcgaaaagaggatgaaggtggtactattgatgacaaacttaatgatatactcgatttaattaaattgagcgacacagataaactaaatgaattatcgttacaaaacagtaacttaatggatcgacatgatccgcagttagccatgtttggcagtatgcctaaaggtgagattatcgcattaatctcttctttattacaatccacaataattaaaaatgaattaaaaaggaaatacgcaaaacttttattagagcttttaggagaggagcaatgggaactcgctcttcttgccnnnnnnnnnnggctaggtatcggggagcttaactacgaaaaaattcagaaaattaaaaaactgtacgaaaaggcgaaagatgaagatttacaaagcgatacttctttattaacatggtttcttgaagttaaagattaccctgatagagaacgatatctcaaggtgattatgcgggcactgtcttttgatttgtcttatatgacagagcttgaagataaaattagaacttcagcaatcgtaagtgatatctgccgggtgattctttttatttctctggacaattacgctgatttaatagcaatatcaattaagaatgataaaaatctcattcttactgaggttttatctattatagaacaagtctggctaacagaagagtggttgattgatagcccatccagggtctttgtagtggaggaaaaacaaatttattattttcatcttttaaataatttttttcagacattacctgatgcctgttttattgatggcgatcaaaaagaaaatataatttcaattattattaaaataatagatgataaggaggatgttaattaa

SEQ ID NO: 397402 - DNA, 321 bp, Salmonella enterica
atgaacaaaatcactgcattacccgtagagcgcgatcattacggttactggacttacccgctgtacgaacagttttgcgatggtcgtgaggttatctctccggacgagtttaatacctggctggaggctaacggtctggaatggaaaatctcttaccgggatgatgaggaaattgatcctgacgttgacggatacgacatttctgcctggcaaccagaagcccctgaaggtgaaggatggtttgtcggttccattcacgacaccgaagacggcgaggtctgtatctggttacgcaacgtgcaggacggtcattatgagtaa

SEQ ID NO: 397403 - DNA, 1095 bp, Salmonella enterica
atgtccacttcaatagctacaactgataaccagacacagaaaatagacaatgtttctatcctgacaaatggtgaactgtttaaccgcctgcgtacgctttcagaggtcatggctaacagcggtaattttgtccctgctcactttcgcggtaaaccagactcctgcatggctgtcgtgatgcaggctgcgcgctggggcatggacccgttcgctgtcgcacagaaaacctttatcgtgggagattccggtgtcctgggttatgaggctcaactggttaacgccgttgttaacagcatggcccctactaaagatcgcattcacttcgaatggtttggtacatgggaaaatattgttgggcgtttcgtggagaaaaccagcaccaaaggaaataaatatattgttcctggctggagcctggccgatgaaaaaggagttggcgtacgcgcatatgccacgttgaaaggtgaaagtgaaccacgggagcttattctgatgctctctcaggctcaggtacgaaattcaacactatgggcatcagatccacgtcagcaactggcctaccttgcggtgaaacgctgggctcgtctgtactgcccagacgttattcttggcgtttacacaccagatgaactggaagagcggaatgagaaaattatcaatcctgccccacaggaaaacatcaccatgcgtgatatcaacaatagcgcccaggaaacaaccaccaccgggcaggagccgacaacaaacgttgatgctgtggctgatgaattccgtactcgtatcaattctgctgaaacgctggaagatgcaaccgcagtcggaaacgatatcaattcggcgaaacccacgttaggcacagcactttttactgagttgaaaaataaggccacacgccgctatcacctggttaaacatcgcaatctggttgagacagccattaatgctattccgcgtccaggagaaccagaatccgtggcgggttttgaagcagccgaaaaggtactcactgcggcaaaacggcatattggcgacgagttgtacgacaagtaccgcatcaatcttaacgatatgaagccggaatacataaccgcataa

SEQ ID NO: 397404 - DNA, 6384 bp, Salmonella enterica
atggacgggaaattgcataacaagatagaccgttttttactggcattgctgttggtggcaggcgtttgcgttactcctgcatccgcgaatcttaagcggggcgcctggcaggaactcagtacctccaccgatgcgataaatggcactgtcccccaggccgacggcgcaacgacgccggtttatcagggcagcgtgttattaacgccggataccacacattccgtggcgtttaccgccatgccgcgagattttagcgttaccgccgacagcaataagatgcaggccgttaacccgagagataccgaaggcgatattttttcgacgccgcctctgcgctgggaaaaccaacagtcgccaacggtggggctggtatgggccgatgccgccacgccggatgaaccgcttaatccgcagcctgtacaaaaccaaaccttctgcgcccagaatttggccggacgccatttggtggtctggccggaaattgaaagcgatgatacatcgcctattcctacgctctatctttggaccacaactggtatacctaacagcaataccgtctcgctactgcagcaaaagatcgctattgatatcgccgccgcgacgggcgaaccggtgacagtgagcgctaaccactataacgaatcgctggctgcctcaaaagtgaaagcgggtgaaagcatcaccctgaccattacgacgaaagactgcgctggcaatcctgtcggtaatgcgccgtttgtgattcgccgtgatgacgcgctcaaccgtaaaggtgtagtgaataatgacaaaccggtacatgttggtgatacggaactgacgaccacgacgacattttatcgtggcaccaccagcgctgacggtacggcctctgtggtggtgactcagccagacggccccggcgtaaaaacgccgcttatcatcagttctgaaagctttccggagctgaaaacgcaaaccgatgtgattttcactacgctgaccagcccggatagcgagttggcggcgatgtacggccacatgcaggagagcgctaccgccgagcttaacggcgtgacctatacgtttacccgcccgaaactggcggcggaaaccagcaataccagcggtacggttgttgataagaacgaaacttgggcgcagtttaactgggctggcgcggataaccattgcgacattttgccggatgcggaacagatagtggccatgagaaacgcccatgatactgaggcgacttataccggctggccggtgacgaatgatgcggaatactggtcctccaccaaagaccagcttgaggaatatcactatgctgtccatatcaactccggtcgcgtgattcgcgaaagcaaccgttccgcttttttggtcagctgcgtcgataaagccctgccggcggcgcatccgcagattacgctttcgccttccgcgccgtataaagcagaagtcggcgactccattgaactcaccgcaaccgtcgtcgaccgggatacgcaacagcctttgccttaccgctatatggagcttttcatcgattcggcctcgaaccgacaaggcgtgcataaggctgagtgggacaatttgcccgtgaccattaacagtgatgatatgcgcgcgtcttcgccggagcattacactggcgtcaccgacgccaacggccagattcatctggacttgaaacatgacaatggcgttggcgtagaaacgccgattcgtatcgtgatggaggatgatgacggcaatgatgtcgaattgccgtttagcgtgattttcaccgtggtaaccagcccggacgttgagggggcgaacatgtacggccatatgcgcggcgtcgtggatgcgggtaacctgtataaacgtccgctgctggcggttgaagccagccacaaaaccggtcagcagagtgaaaataacgaagactgggcaacgttcagttcggtggaggccgccaccgctcagtgcggtacgggacaggtgccgaatagcggttcgcttgagcatctgtatagcgaacatcccgataatcaaatgctcaccgaacacggctggccgacgaacagccacccttatatcgcggcggaaaccagcgactcgcagacggcatacgtcaatctggcaaatggcaaccagggctatggtagccagccgaactacctcacctgctcggccaacgaaatggtggcgacgctcgatgtttactttaacgatgatgtcgccgtgcgtaacgccgaggccaaagtcggcgagcagataaaaatgaacgtccattcgacgaatgccctgaatggcgaggtgataccgtacaccaactttacggtcacgttatcccctggtaaacagcgtgatggccttaccaccggtttcaccgaccccagcaatggggagctcattattgacggcgcagcctacagcgctgcgcaagcggcggtttatcatggtattaccgacgcccagggcaatgcggaagtgcttatcgaacagccaaggggagtggggcttttgacgcagttgagcatcgcgccggaggagtccttgctgaatatttccgccacccgcagcgtgaaatttaccgttgccaccagcccgaataccccggatgcgaatatgtggggtcatatgcccgataccattaccgtaggcgatatgacctttgaacggccaaaactggcgcatgaggtgtcggcgacacgcgtacagaatgaagctaacgagagctgggcgcgcgttacccacgctgacgccgaaggtaatcctgacgcaggcggttgcccggcgaaccgcctgccgcgtatcgatcagcttgaagcgctctacaacgccaacagcggcggcgcgatgcacagtgttcagggatggccggtggcgatgcaatactggtcttcttcacccaccagcccaaccacctggaaaatgatggcgctggataccggcgctgaaagtccgggcggcaacgtcactctctttaccagttgcctcactcacgataacccggtggcggcgtctatcaccatcgaaccagtagatgcttcgctatggtatgacgccaccaatgttcatgcggtgaaagtgaaaaaaggcgatacgctacagttgaaagttacggtcaaagacgccagcggcatgccgttgccgaatgcgccattcgtgctctctcgcggcgatggttacaatcgccaggggaataaatacatcgcggctaaagggaacagtgacgcgattgtcacgccggtggtgattgatggcgaagcgctgaacgataccgcgacgaaaaagggcgcagtgaccggctccgatgggagtaaaatcattaacgttacccgcccggatacgcacggcacccgcaccgccattaccgccgcgttgtatgataatgcaggcgtaaacgccagcattgacaccatttttaccgttatcaccagcccggatagcaagaaagccgaaatgtgggggcatatggcggagtcgctcacggcggaggacggtaccgtgtatcagcggccgctactctatacggagctgagcagcaccagcaataccgcgcaatatacagaagataacgaatactgggcgggcttttacgggccgggcagcagcaaaaacaacgcggccaactgccccacaggctattacccatccgttacggcgctggactcgctctataacacctatccaggccgcacgataaaaacggaacagggctggccgattgaccactcttactggagtggaacgccttcccagccgctgtcgttaaatacgcccaactcttactatatcgtcgatttggatgacggcagccgtcgtgcgatcattaataattccgccaataatatgcagtatcaggtttgcgcctcgaagagggtagcgaaagcggcgcagattgtactctcttcttcgctggcgttggatggcgcatcgcagtccgtgaaggttaaaaacagcgatccgattccggtgacggtcaccacaacggatgccgccggtaatccggtcggcaacacgccttttgccataaaacatgatgcgggtacggcgcgcaataccagttattcaggctgggaatcgtttcaactgacgattgatggcacgtcgcaagtttggtcgaaggacgatacgtattatggaacgaccggggatgatggcaccctgacctttgaggtctatggcgaacgtgcgcctggcgtcaaaaatatactgaccgccagcctgtacgagacgccaacggtgacatcgacgctgccggtgatattcaccgttgtcaccagcccggacagcgatcaggccaatatgtggggccatatggcggagacctttagcgccagcaacggggtggagtttatgcgtcctcgactgcggtatgaagaaggctccagttccaatacctcctatattgcggctaacaatgaggcatggctctcactaaaagcgagtcttatcgcgtcgaaaggcattggcgcctgtggtttgaaccaaatgccgctgctggccgacctgacttcactgtataacgatcatcctaatggcaagctggaaacggatttagggatgccgttaacgacgacgtcatccacccgctggtggtcaggcgacccgatactaattaatcaaagcgttaattatcagtactataatatgaagtccggcggcggcggctataacgccgggaatgaaaactatctgcaaatatgcctgacgcaaccacggcaggcgcacgttgcgctctctttaacgtcatgggacgaggcgaaagcggcggcggtagtgaaaaaaggcgagtcgattaacgcaaccgtagctgtgaccgacggcagcggccaacccatgagtcatgcgttagtcaaacttactcgcagcgatgcgctgactcgcgccgggagtgtttataccactaacaatgcggacgatatcacgttaagcaatgtccagccatcgggcacatcaagcttcgtgatggatacaagtagccgatatctgtacatagagaccgatgcgcagggccgggcgacgtttacggtgtcgcagaatgcgagcgcggggcttaaaaccacccttagcgccgcgatgatgacggacagcgcaacggtagacagtaaagacgtaattttcacggtcattaccagtccagacagcgccagcgcggcaatgtggggtcatatgccggagaccgtgacaggacccgataatcttctttatcagcgcccgcgtttgcaagctgaggggccgtcgggcattggttattacgcctggaatagtgaaaaatgggcagtattgactggcgaccaaacgtatatagcaagcaagtctgtttgcgatgttgcgtatatgccgctgatggaggatttggaggcactgtatcaacgctatcctgatggtacgctggaagagcaatttggctggcctgtgaaatcaggtaaagtgtggtggtctgccgatttaaatacgtcgaaagcacaccaggggataaacttgaaaaccggtcagaagtctgtacctggcgcatcaacaaccagtctgcaagcctgtctggtgaatgctcgtaatgttcctggtaccattacgctgacttcgacagcgatggacacggggaaagacgcagcggtggcgaagaaaggcgaggctatcccgttgctggtgacggtgaaagatcgctcgggtaatcctatgccgaatgcgccgtttaccctgcgccggggcgatgcgaaaggacgctcaggcagtacatatacgtcgaatggcgcagatgacctgtcgttacaggcgttgtcgccttcagtgtcgacgacatcaatgacgacgaccggcattgtgtttagtggtgcaacgggagctgacgggacggcaacgtttgcgattcgtcaggacgccagcgtgggtttaaacacgcctctgacggtaagcgcgactgatgatgtcacgctctcaaccaacgcaacgcttaacgtgatatttaccgtcattaccagtccggactccagttatgcgggctactggggtcacatgccagacaccctggttgttgatggtgtgacgttgcatcgaccattattggttaaagaatccccccctggggggacggacagcaagaaagaaaataatgaattgtgggctactgtttattcaaaaacggacggtattacctatgatatgagcaagaactgtggcggggcggcgaatttcccggagaaaagcgtactggagaagatacgggatgaacagacagcatcagctaacgggtggccggtattggcggtgccttatataagtggtacacctggggcatataattattgcgaagtctcgttaaaagcagggggggcaacacattgtccgacaactgccaatgatttctcgataggctatgctgcttgcctcgtacagccatag

SEQ ID NO: 397405 - DNA, 1563 bp, Salmonella enterica
atgtctcaggcaatgcagcagcacccagctatcgcaatgacccgccatcccttattcctggcgcgagccaacgcattaaaaccccatctttattcacaccctgtcgcgccgacaggaaaaattcagatcaccggcacgccgaatcactggcaggcaacgccatgcggtaatctcgaggcggtgtatgaacaagctctggatacgggcgactcgctggttctggattttggcacccattgtgttggttatctgcgttttatctgccgcgcagtaggtagtccgccggacgccccggtccatcttacgctgacgtttggcgaaacgttgggcgaagtcgtagagcctttcagcgattatcagggctggctatgtagtagctggctgcaacagcaccaccactatcttgatgttttgcctgcgcacgttcagttaccacgccgttattgcttcagatatctgaaaatcgatgttaaggcggtgtcgcgcaagtttcatttgcagttcgacgacatcacactcatgaccgtaacctcggcgccgccgacctgcccgccgtgtatgaccgacgatccgctattgcagaaaattgatgatgtctcggtactgacgttacgtaactgtatgcaggatgtttttgaagacggtccgaagcgcgatcgccgtctctggctgggcgatcttcgtcttcaggcgctggtgaacgatgttacctttcgccatcatgcgctggtacaacgctgcctgtatctttttgccggcaacacgcgtgaagacggaatggtgtcagccaatatatttgtccaaccggatgtgatcgcggatgacacctttctttttgattattcattattttttgtggatgtgctgtatcaatatgtacaaagtacaaacgatagcgagaccctgaacgcactatggccagtcgctaaaagacagatagacctcgcgcttgaacgctgtgatgcgcgttatattgtgcgcgatagcgatgactggtggtcatttatcgactggaacgatgcgctaaataaacaggccgcgtcgcaaggcgttctgatttactgtctgcaacgcgctatctggttggcgcaatggtgcgggccggattgtctcccctcattaaaacagtcgctgactatgctaaaaaacgcggcgctgcacgaattctggagtaaacaggacggtttctataccagcggcgctggcaaacaaatttcctgtgcgtcgcaaatctggctcgtactggctgatgtggggacaccagaacatcagaccgccataatgaaaaaactactccgccattcacccaaaatagccatgaataccccctatatgcgtcaccattttatcgctgcgctgctccatgttggattacgcgaagaagcgacgacggaaattaaaaattattggggcgcaatgatccgccacggcgcagacactttctgggagatattcgatccggcgcatcctgattattccccatatggcagtacattaattaacagctattgccatgcgtggagttgcaccccggcctggtttatccgccagttcggactttaa

SEQ ID NO: 397406 - DNA, 615 bp, Salmonella enterica
atgtttaacgtaaaacgcaatggcgcaagtgttgaaataaccgatataccgcaaagcgtaccgttcagtgtgtttaaaaacatcgctgatgaaaccggggctaatgaatgcctgtttgcctatgttaaggacaagaacacctacgaagtggttattcaccatgacagcgtaaatatggccggtgcggttgcatggctggcactggaagcccgcgaaccagcaaccagagacgcggatatttccaccatcggtgagcacgtgggtaacatgcgtgtaaatcaatacacgaacactcaggaacttgaggatgtgaatgaaatgtctgaaagttggtacagtaaaccgactgtacattttgttatcaacaatgatgaaattaaaattaatggaaaagaactgcacgacgtatcagggggatttttaggaatttcaaaaagttcggatatcttggttcgctttaactgtgagacattaggttttagaaggacagaaataaccataaaacccaggttaacagaaaccactttagaggaagtactggttagagttggaatgattatagggaaaaggtttataaaggtagttgatgagaggacgaaatccatttcatcctga

SEQ ID NO: 397407 - DNA, 330 bp, Salmonella enterica
atgacatttgataaacttcgttcttaccaggataactcccttccttacccgagaaatattattctctctgaaatggttgacgtacttcttcgcatgcctcaaaaagaattactttaccctctggaaagaataattaaagaatccgcacctggggcgacctatgctgacatcattgatttcattaacaataaaatgccaccaaatatccgtgtaaaattctatgaaataatgacatcatttgctaaaaacaaagattatttagatacctctgatgaagatgcacttttattttctcaagaaatgtatcgcgccttcagaattagagtgtag

SEQ ID NO: 397408 - DNA, 195 bp, Salmonella enterica
atgaaagcagaagaactgaagcatttccgaaaaggactcaaggatgttaagcgtatgctgagtattgtcgaaaggagattgaatgacggacggtatgaggcagcagaagaattcatgcgaggggaagcggcactgcttcataatctggctaacgaacttagggatgttatagaaattcaacaggcggaaaagtaa

SEQ ID NO: 397409 - DNA, 192 bp, Salmonella enterica
atgaacagcatactgatcggctttgttcttttatttagtccatgtggtaaagatgcctgcgagtgggtgccggtaactgaaagaatctacccgacccggcatagctgccagcaggtagctgacgaactgaaaaagcgccgtccgcattacgaatttagctgcggtgaggtccatcgcggggaagaggattaa

SEQ ID NO: 397410 - DNA, 129 bp, Salmonella enterica
atgtttttccgggtaaatgatttttggatcttatttttcggcgacagcatggcgtttttcgattgtaaggatgcggctgttaatggcttgtcacgttacgcagatagggtgattaaggagtgcaaataa

SEQ ID NO: 397411 - DNA, 573 bp, Salmonella enterica
atgaatcacgtaatgattgatatcgaaacaacaggaacaggacaccattcagcgatcgcatctgccgctgccgcagtatttaatccgttaaccggagaaatctttgcagaagaatatgtgaaatttaactggaaagaagactgcagaatcagtggagggaaaatagacgctgacaccgtggaatggtggctgaaaaagtcagcagaagcgcgggaggagttaattaccagtgatgaccagttgccttctgatgatgcgttgatgcggatttttgaatttatccagaaacactgcgacgaagagccggtttatgtgtgggcaaaatcaccgtcgtttgatttatccctgattaaggatgccgcggagcgtttctgtataccgaggggaatgattccgtggaaattctggaatgaacgtgacgtcaggacaatagaggcgcttgctgcacaatttaattttccattgccttacggaaaagcggatgtgtcacatcacgccctgcaggatgtgcgcggacaaataagaaatgtcagtgctgttattggggcaatggacggggcggtggaggcgtga

SEQ ID NO: 397412 - DNA, 225 bp, Salmonella enterica
atgtggcggaaaatttatcaggacgcgctcaccgccagtcagaagccagcaacgccagaacagagattagtgatgctggcagatctggagaataccgtaaacatagcggaccgtaatacacgccacaaccagaaagcagagtttaaaagggcaataacaggctggattgcagcacagaaagggcaggcaatgagtgaaataaaacagcgggagaaaggcgaatga

SEQ ID NO: 397413 - DNA, 2127 bp, Salmonella enterica
atgaaaaatatcaggcaattgtattttaaagccaaaaaatcaactcagaaactgtacggcattaacgcaggaactattcatcgacctgtaggtgacgatcctgacgaggatgatgcactggatacgttagccattaaagaagctggcttcaaaagaagcgacttctttaaacccgtcagagtggattatctggttgttgatgatatgcccgctgagggggtttttgatactgcgttctgtgaccgctacaaactcgcagaagacggtaaaagctggctgctgcctgctgcacaacctgagtctaccgacagcgatacgactgatgccgatattcaggaacagggtaatgaagacgctaccaacatcaccgattccggcgacacagccaacgccagcactgaatcggtaagtgccgaaacggtcaaggacgcagttcccgcgtacgaatttaacgttaacggtgagccaatggcggatgttgaaaaagagatgttgcaaccggtcgtcagaatggatgatcgccatcgcatactctctcagttcatccttgaggataagttctcacacaacatcacgccggaacagcttgctgaggtaagccgactggaactggatgtaagcgacaactatatccaggatatgttgctcgccaccaggaacgctccagccatacttaaactcaatacgcctgacctgtggaaatataccgacagttttaaaaaggtttttgcgcgggataagcgccaccccctcagcaggatgattaattttaatcaggcatacgctgacgcacatcctatcgatcgcggcctgctggtccaggaatggataaaaggcaattacatatcgcgcgttgagaactcaggagcaaccagcgccggtgtcagtgccagcgccgcaccagagccacagaaaaccagcgtaactaaagcagatgtagcggcatcaggcaagccagccacagccacaaaaacaacgtacaaggctattgatattcgtatcggatgcgcactaatcaaaggggatatcacgtatccgatcacggcaacggttgttaagcagggtaaggatattgttgaggctgacgacgaagaatttaaacgctggtcggccacctatcgcattactgaaaacattcaattctatgacgaaaaaacgcacatagagatgattcgccaggctccccgcgaggtggtcactggcagccctgagttgcgccgcgcgtatgtggataactatctggcagcctacggaacgttagatcctgaacaaatagtatttatgccgaagcgggcccctgtagatcatgaagaaaatatggagcgcgtacgtaaggctagtaaaaatctgcgagacatggcggcagggagatttaaatgtgatgaagaaaaaccgcaatcagaagacgtgctggcagataaaccagcaacggctgaaacagtggaaccggacgcaaatgaacatcatccggatacacggtcgatggcgactgaatcatctgtaactgctgacagcgataaaaccccgcgtgagcagttcagcgaacaactcgccgccgatcgtggtgattttgttcctggtatcagcgacccgaacgatccgaagtggatacataacgattacagcgccaacgccagcgcctcaaatgagggcgaaaaaacggaagttggcactgacagcgcggctgatactgctgattacgttgaccattcagaagaatttttgagccagcctgagccggaaaccgaaccaaaaaaccagaaaaccgaacctgtaaccaaagtcgccgatggtgtttttgatgtatctgcattcttcgcagatatatcaaatcagggtgaaaaaacagaagtcacaccgccgaataataatgcccgttcgcaggaactggcagaagaaaaagcgacggatgcacctgcgacaacggaatcattactgcacgaaatagtacgtttgcagtcaataaataaccagttactggaagcctgcgcagcttatcaggaacgtgcagaaaaccgacacgaaagacttctggaggcgcttttctgcgggataacgcgctttacatcctgctggttggagggtgagagagaggtgaaatttgaagaggggacgggggattcatga

SEQ ID NO: 397414 - DNA, 396 bp, Salmonella enterica
atgagcagaaattacacacacgaagaacgggaagaggtccagaagcgcttaacggagctggtaagaaagaacggtcgtatgacgtttggggaactgcggagggtaacaggattaaccatttttacggcccgtcattatctgagccaggcggaacgctgcggggatctgtatcaggcgggcagaagtggcattttcccatcggagcgagacttccgaatctggaagcgaaagcaggacgacgccagggtagagcgttttctgaatgccagactgattgccggagaaccttacgacaggagccggaattccatctgtgaggaatgtcggaacagttacgtaatgcagcgcatcctggccttttatcggggatatcaacagagagtgatcggcaaatga

SEQ ID NO: 397415 - DNA, 819 bp, Salmonella enterica
atgaaaaatatgattaacagtgaaccatcaatgaccagtagcgagattgctgatctggttggtagtcgtcacagcgatgttaaacgcagcatcgaaaggctggctgaacgcggagttatccagcttccgccaatggcgaattgtggaagaatcaacgggttaggtttatcacagtatagtacacgctatctttttgagggagaacagggaaggcgcgacagtattgttgtagttgctcagttaagccctgagtttactggacgcatggtagaccgctggcaagaacttgaaagaaaggttggactgttaagcgcagaagagagagcgatacagcatcatcccggggttgatgtagttgcgttggcgtgcgctgttgctgaaacaacggtgacaacagcgataaaagcagccattgaggcggcgacggcgcaacaggaaacgctggcatcacagaggcgtgatagtgatgatttagtggtgtttaactactcccgcactgatagcgatgttaataacgacattgatagcgataacggcaatttccagtcagtacatgaactatctgcgaaaacaggccttgcagattctgcatgtcgccgcctgatcacatttgcgcatgttccggccagaaaaatcgggcggtcaggcctgcacgccgatagcgaagcattcattgctgctgcctgtaaattgattggtgaatcagagccaccaaaaggaagaattaagcgctggcagcatccggagttcggcggctttatgcttcgccgcgcatcgtcagtgcaggctggtcaggaaacgctggaaaagcaggactga

SEQ ID NO: 397416 - DNA, 618 bp, Salmonella enterica
atggcgatggtcacgtacaaaaactgcttgcttgtctcattgctggtgagttacatttcccctgcacctcataaagcgggtgccgggaattccaccccgacagcaaccaaagcgcacaaccgcgcgagcggtttttttacgtgcatagcatcgttacacctacgtattatggtggggcgtatggggccgctttcgggcgggccggtttctttggttgccggtagtggaatccctgtacgtctcaccaccccaagcattccacctttgggcggtgagttaactttaccaaccaaaggatcgtcatcatggcaaaccgcaaacgcgctcacactcgcgctgacgttaagcgcatccatacccaaaccgaaatcgatcgccgcctgttccgcgcgcataccatcgccagagcaatgcatatcaacatcctgtgtgatgatgtgggcgatatctcaccgtattacatcgctgcggtattcagttacctggctgacgacttgcgcagtatgcaaaaactggcgggaacgccggaaaaataaccctcctgagaatctgatccaaaagcaacactccgcctgcaggcggggtgtttgcctgcatggcattcaggaggcgctatga

SEQ ID NO: 397417 - DNA, 1932 bp, Salmonella enterica
atgactgcaccggtaaacggcggactgcgcacaccttcaccggaagagcagcagcaattttttgatgatgtccgtcagacattcaaaagcctgccgcgtttcattgcggaaaaattcaatgcgagggtaagcagcgcataccgtctgaagggctttacgggggcacagacaaaattcagcgatatcattcgtcacgatctgcggctggtggaactgaccagccaggtgtacaccatcgcaccgggcgagttgccggggtatctgtttggcggtctggcatcagacgacgcctacggcgcaatccgctcgctgacgttccggtttaatgcgctggtagacggtgacgaaagcgatgccgcgttactggcgtatgacctggcggagtttctttgtgacgaggtggaacaccttaaccgcacactgagggatgaaagtgcgtcggaactgctgggtgtactctacagcatggcggcgggtatcacggaacatttcaaagccgaacccccggaatggaaccgcttcacgggtaaaacactcacgccggaacaactgaaaatcgccatcagcaaaatgatcagcgtgcggttctggtcccgtcatttccgcacctttacccgccgctggcgcgagcacctttatatcactgtgggggatgttcgccaccagcgatctgttatctgttcgccgcagtgggtacagcactggctggccagccgcaagcgcgggcgtgaaatcatggcggaaaccgaccttgaggacgaggagaccggagagacgttaccgctgttatccgccgtggacgccagcgtgtcaaataacgaaaagcgccgcgcagaaatgatgacgcgcgtcaaaggcatggaagaactggcggaactggacaacctggcgcaggacagcgattacatcgggttatttttcacctggacggctccgcgccagtatcacgcctggctggagaccggacgccgtaaccggaaatggaacggggccagtccgagagagacccagcactatttcacccgcgcatttaaaaatttcagtaccgcactgagccgccgcgacgttcacatcttcggaatgcacatcactgaatcccatcatgacggcacaccgcactggcacggcattctgtttgttcgcagggagcaggaggcgacattacgcgaggtattcgaatattacgccaacgcggagaacagtacttctcacaggccaggcaagccaccggcacagtctcaactgatgattaagcccatcaataagcgtcagggtagtgctacggcctatatcaccaagcacatctgccggaatatcgagggatgcgcccccggaggaagggataaggaaacaggaagaccctggacggagttggcccggcattcggcggcgtgggccagtctttgggggattaagcagtttcagtttattggcggtccgcctgtttcagtctggcgagagttgaggaaactcagcgatcagaaaaaagccgacagcgtaagccatgtctttggcgaactgcatcgggcggcaagcggcagtgactgggcggaatatacccgcctgcagggtggactgtcgacagtaagaaaaaatctcactatgcgcacctggtatcagatggccgacgaaccggacgagtgcggacagtacaccgctatcatcaaaggcgtttatctgcccgggacagacaaggccccggtagcgacgcgcacacgcaactggaaggtaaaaacgccacgccagaacgctaaaccgggcttcatgaaaaaccacaggaagccagctttaacgccctggactcgtatcaataactgcactatgcgcagaaaacaaccagaagatcggcctccagatttctacctgaaaatcccgattcaactggaactggattttggggggatgaaaaaagcgggaatgagtgaaaggtaa

SEQ ID NO: 397418 - DNA, 282 bp, Salmonella enterica
atgaagggaatagattttagccggatgactccggaaaagatgggagagctgattgcagcagcaaccagacaactggaagtgatgaaccagagcagcgtatcaagtgatgtcatgaaaaaaaatctgcttccggctatgcagcgcatgaagcaggccagacatgagttacagacagcggtggatcagatgatcgataaaacagcagatcttgaaaggagcatggagcagatggaaaaggcgatggacacgatgttaagtcaggatgcggataacgggatgtaa

SEQ ID NO: 397419 - DNA, 654 bp, Salmonella enterica
gtgataccgcagacaatcacctgggtaagaaataacgtgatattcgcgctgaactgcggggagaaaccgcagcggggacaactggccgcattcgaaggatttgcccgcgcaaccagtaaacgctatggacgtcaccgggagcgtacactaaaaataggcaatcgctggtactgtcgggacaccgatccggtttacgtactggaggcagccaggagcaaaaaacagccggatatgataacgccggaggagttcagtagcgcatcatggcgccgggcgatatacagcctggatgattacgaaaaagcgtggatactgtactgctacggcggaaaacaaacgtacatgaaccatatgctgatttgtgagtacatatggctgcggatgcacgaaagattgcggtcactgggaaagcgtattacggatgatatgacgggaaacctgatcaaattgaccgggattacggcttggaacgccggacagttgataagcgggaaagataatgcagaagtttttgcagcgacatacgcggcgcaggaaattggagttaaagccagcgcatggagtcagaactacaaaaaacactggcagtttatgtacaataaatgtgcagatctggattgccaggcactggaaaaattaatgcaaaaaatttag

SEQ ID NO: 397420 - DNA, 498 bp, Salmonella enterica
atgaccatgattgatcagcgagaacttaaaatattgttgagatataaccccgataccggggttttttattggctcaaggatatggggttatgttgcaaagcaggtgatattgcaggcggtgtgtgcaaagttaacggctacatacgtattggtataaaaggacggcaatataaggcccatcggctagcttttttgtatatgaccgggcgttggccaagaatgattgatcacatcaatcgtaaccgaaaagataatcgctggattaacttgagagaatgtgtactgcaacaaaataacttaaatatatccgtcaaaagcaataataccagtggtgtgccgggcgtaagctggaagccgcacaatgaaaaatggcgagttacgatgcaactgaatggtattcaatactcatttggctgctatcgagacctggagcttgctgagcttgttgctcgcgaatccagagtgaaatattttggtgatttttctccagcttattag

SEQ ID NO: 397421 - DNA, 222 bp, Salmonella enterica
atgaatagagataatattggtctaatttcatttttgagcgacaaactaaaatggcttgagggagaacgcattgcaattaaggctcaactttttgatctcggagtcgcagaacagaaacgccgcgatgaaaatgaggcggcgttatatggagaagttaaaaaagttattgatgaggtgctggtgaggaatcttcagaagttgaaatcaactcagcaaggttga

SEQ ID NO: 397422 - DNA, 3381 bp, Salmonella enterica
atgggtaagggtggtggcagcagtaagacaccgcatgaggctccggacgacctgaaatccagtcagatactgaccgttgtggatgctatcagcgaggggccgatcgaaggaccggtggacgggctgaaaagtgtcaggataaacaaaacgccggtcctcgacagcgacggtaacgcgatggttcacggtgtcactgtggtttaccgcgtgggggaggatgagcagtctgcgatggaggggtttgaagactccggcgcggagacgctgctgggtgtggaggtcaaaaagtcagagccggtgacccgcaccattaccaccaaaacggtggatcgtctgcgctttacctttggtgtgcagtcgctggtcagcaccagtaccaaaggcgaccgcaacccgaccagcgtacagatgctgatccagtttcgccgtgacggactgtggcgaacggagcgggatatcactattacgggtaaaacgaccacgcagtttctggcgtctgtggtgattgatgatttgccgccccggccgtttgaagtccgcatgctgcgcctcactgatgacagcacgacagaccagctgcagaacaaaacggtgtggtcgggttataccgaaatcatcgatgtgaaacaacgctacccgaatactgccgttatcggggtaaaagtggatgcggagcagtttggcagccagcaggtcacgcgaaactatctcctgcgcgggcgtattgtgccggtgccgtcgaattacgacccggtaaaacggacctgtacgggaatatgggacgggacgtttaaaccggcctggacagataatccggcctggtgtgtgctggatatgcttactcacccgcgctatggcatgggaagccgcattggtgttgccgatgtggacaagtgggcgctgtatgccattgcacaaaactgcgaccagctcgttccggatggcttcggcgggacagagccgcgtatcacctgcaatgcgtatctgacggaccagcgtaaagcctgggatgtgctggcggacttctgctccctgatgcgctgcatgcctgtatggaacggcagcaccctgacgtttgtgcaggaccggcccgccgataaagtctggacctatacgcagagtaatgtggtgatgcccgctgacggtgcgccgttcatctacagcttcagcgcactgaaagagcgccacaatgccgccgaggtccgttacaccgacccgaacaacggctgggaaacgtccaccgaactggtggaaaacgacgctgccatccggcgctacggtcgcaatgttctgaaaatggatgcatttgcctgtaccagtcgggggcaggcgcaccgcgcggggctatgggccatcaccaccgagctgctggaaacgcagacggtggatttctctgtaggggccgaagggctgcgccacgtccccggcgatatcattgaggtctgtgacagtgattatgccggcgtgaccgtgggtggtcgcgtcctgtcggtcgacagcctttcccgcacgcttacgctggaccgtgaggtggagataccgtcagtcggtaacgtggtgctgaatctggtgggcagcgacggtcagcctgttaccgtcgcggtcaccgcacatcctgctccggaccgcgtgacggtcagccagttacccgagggggtggcggcgtacagcgtgtggggactgaaactgccggacctgcgccagcgcctgtttcgctgtgtggctatacgggaaaacgatgacggcacgtatgccattaccgccgtgcagcatgttccggagaaaggatccatcgtggacaacggggcgacgtttgatccgttgccggacacaggtatcacgaacacgccgcctgccgtgcagcacctgaccacagagattctggcagaggaggggcagtatcaggcgcgggcgcgatgggataccccacgtgtggttaagggggtgaacttttccctgcgcctgacggtgaaagcggaagataacagcgaccggctggtcagcagcctgaccctgaccgaaacggagcatactttccgcaacctgacgccggggcgctacaccctgacggtgcgggcagtgaacagccagggccagcagggtgaccccgccagcacagttttcaacatcgccgcgcccgcagtaccgtcttatgttgagctgacacctggctatttccagataaccgccaccccgcgccaggcggtatatgaccccacggtgcagtatgagttctggtttacggatacgcagattgccgatatccgccaggtggaaaccgatgcgcgttatctcggcaccgcgctgtactggattgcggccagcagcagtatcaaacccggcaaggattattacttttatatccgggccgtgaaccaggtcgggaaatcggcgttcgtggaggctaaagggcaggccagcaacgatgcggcgggttacctggatttcttcaaaggagaaatcaccgaaagccacctggggaaagaactgctggagaaggtggagctgacggaagacaacgccagccggctggatgtgttttcgaaagaatggcaggacgtgaacggcaaatggaatgccatgtggggtgtgaagatagaacagaccgaagacggcaggcactacgtggctggtcttgggctgagtatggaagacaccgaagaagggaagataagccagtttctggtggcggctgaccgtatcgcgtttatcaatccggctaacggcaatgaaacacctgccttcgtgatgcagggtgaccagatatttatgaacgaggtgttcctcaaatatctgacggctccgagcatcaccagtggcgggaacccgccgacctttacgctgacgcctgacggcagactgaccgcccgtaatgcagatatcagcggtcatatcagcgcgaattccggcaccctcaataatgtgacgatagcggaaaactgcaccataaacgggacgatgcgggcagagaatattatcggcgatatcgttaaagccgtggggcgggcgttccccgggagtgctaattacccgaatggaaccctcacggttcagatacaggatgaccaccattttgaccggcagataatcattccccccatcacctttgcaggaggaaaggcaaaatcagggacaagcaacgatatatggacagactgtgggcttgtggtgacgcacaacggcagagagatatacaacgcagaacccgcgattacagcgagatcattcagtagggtacttgatatgccagccggaggtggaaatgtgacgctgagcttcacggtttcatccagggggtatggcggcggggcctgggctgatatcagcaacctgctggtcatggtggtgaagaagaacagcactggcatcagcatttactga

SEQ ID NO: 397423 - DNA, 600 bp, Salmonella enterica
atgcgtaaaaagtatgcaacttttttatccgtgatggtaattctggctgctgcaggtacacctgcaactgcggctgaacatcagactacgctgagtgcagggtatcttcaggcggagtcgggcattccgggcagcaatgacctgaaaggggttaatgtgaaataccgctatgaatttacggattcgctgggtgttatcacgtcgctaagttatgccggaggaaaagaccggaagatgacttattacagcgatacccgaaaacatgaagactcagttcgtgcccacaggttcaactttatggcaggaccttctctgcgtgtgaatgactggttcagtgcatacacgatgattggggcgtcctgggggcgagtatcgtccttttccggggattatacgaaagtgacggacgatcagggtgaggctcacgatgtgctgaccggaagcgatgcaagtcgtcgtagcaatacctctctggcctggagcacgggcgtgcagtttaacccggcagacgtggtgtctgttgacctggcgtatgaaggttccggcagcggagactggcgtaccagtgcctttatcgtggggctgggataccgtttctga

SEQ ID NO: 397424 - DNA, 450 bp, Salmonella enterica
atgcgcttatcaatagatactaaagaagtgctatttttattatttatgttatttgtatttttccctatttttaatattgcaatgtatttttgtggtgtcttacctttatattcccttatgaaaaataacactgaaatattttatgactggaagatggtaatattgttatttacatttatttccttcatctttttacactgcaatgcttttttacttatttttgtagaaaaaatcccattaataaagaacactatatttattaaaaaaataacagagttaacattaaaattatgtatgatttttttattgattgcttttggaattgcaccatttatatcctttttcatttcaggatatgttaactcacattatcatccatgcagcgataatacagggattttctcagcagcaacttatgttaaaaatggtacattatgtcaccgaagataa

SEQ ID NO: 397425 - DNA, 906 bp, Salmonella enterica
ttgcagggaacacaaccaataaatcagttagtacctcagcatccttatctaaaagatgttcagggtctggaagaatttcagactaaaaagacagtggatatcatcttgctgactattccggaggcaatgagactggtatatgataaaacagttaatacagtcagttccgcatactcatcctatgagtctcatagcatgaagcaaatggcagttggcatattagacataaataaatcattttccgataaaggcataaatgttattacactttacgacacatggaaatgggctaaaacctcatgggaaataatgagttattatgatcaagctaacaacttagcatggaatattagtcaagtctggaaagtaaaagctatcacttatattgctaatggcaaaacatatattaatataactggatatgcaggattgcgccatatactcaatggagttcgttatctttttgatcatccacaaatgataagattcggtatcggaaagatgggtatagtaaaaggaatagccagcggaacaagatataatataattcttagtggatgtactcttatactagaatttatatttaaatcagaatatgatattgtagatataactatggatattgcgaaaattatggttgcagaaattgtctttagagtaattgcgggtattatagtttccgccggagccccggttattttaaccgcacttgctattattgtgattggagtaatgatcgcatggagtttaaacgaacttgattctgatgacaatctgaatttgtcaaacattctaaaaaacgcgataaggcgaggtagtattgcacatgctgaaatacttatacatgattctaaaaatttatccccgtggaaatttgccttgtcccatatgcggtcttatccataa

SEQ ID NO: 397426 - DNA, 1089 bp, Salmonella enterica
atggcagttgtattatctcatcttactttaattttttacccacaactccatgatttttataaaagttcacttcctaaaaatgatattctctatataatacataattcaccttttgcctttttttattcagggacaggcgctgtgtttgtttttttctgcttgagtggttatgttttgagttctagtatcttaactgcaaaagataagactaagaagataataaattcaactgtaaaacgttatccaagactatcgctaccagcagtgtgttcgtgtatccttttttggatagtgactaatttatttaatgttaatcttgtgaatgtctcctcatggttttcagatataatatataaggactataatcttttggatggtatatattatggtggggttcagtcttttatttacggaacagctaagtacaatcctgttttgtggacaatgcaaattgaattgataggttcttttttattatttgcgtgttgttatttcaatatttttgatggtattattagagtaatatcaagcatcttacttttgaatctatttgaaatgaatgtatatttgtttttaggtctggtaagttttattatgggtgcggtaatttataaatatgatatgtatatgtctaagatttataactattttattctaatggttggcctatattgcgtgggtgttcacgaaggcagttatagttacagatggattttctatattgcaaactacattaattctaactatgctcaatatgtatatccatttgttaatttttgtggtggtataattattgttatatctatagttaagaatgatttgtttaaaacatttttttcgctttctttttttcttgtacttggcgagttatctttctcaatatatctaatacatttatgtatgatatatgtttttataatcccattttttaatttattgcttttacttacatttagtttttggcttgcttcttttttatctattttaatgacttttatcattttattgcccgcatcatttttattttttaagtggatagataaaacctcaataaaaatttccaataaaattattagctttctcaattaa

SEQ ID NO: 397427 - DNA, 180 bp, Salmonella enterica
atgggaagacatcaaagggatgtgatttatcggcctgaaaaaacggagtttatttcaggttttacttgtcgggtggtcatgttgtttgttatgaaacagttcaggagaacaattttttttaacagggaagccgacgatgccagggataaatttaacaccatatataaacccccggggtga

SEQ ID NO: 397428 - DNA, 564 bp, Salmonella enterica
atggatttatttaataattcagtttcattacctaatggagtctggtcatcaaggactcaaacattacaatcactttctgatgatcaactttcaactattcgtgaacagtctcgcgctagccagcataatccatcaccacaaagttacagcaaggtgaaaattaatggtcgtgaatattccgtaacctatcatccccaggatgaccttttcgctgttgaaagaattaatggatgccagggaaagtttattcagtggctttataacatggcaggccacccccggggtcagattacctggcaactgaccttccagttgaattcaccattctccctgccaaatccacctgtcagcaacaggagtcaccaggctacggacatatcccggcgccccggagaaacccctgatctcgctcatgagaaccaacccgtttctgacagaattacaccgcctcctgtccccctaaaaccctcagcccaggcgttgtcaacatttctcagtcagagacagtctgtttctgaaggaaaaatagcgcctccgctccctcctaaatttctgccgggatga

SEQ ID NO: 397429 - DNA, 705 bp, Salmonella enterica
atggcattttcgcggcattgtgcttttttaaaggctgttgatgatcatgcattgagtatagactcacttattggcacaagttcaggtgctatcgttggcgctatgtattgtgctggacatgatccagagtatatccttaaagaaatcgcaactgtgaagtttatggatgttatcagtatttttccttttgattgcaaaggggtgtttaatctattacctgctaaagattacttaaaaaggtatctgccacaaacatttgatgagctcccggttaaattctcatgtggtgtttccggcttaaagatgaatcatttacttattgacagtggtgaccttatatcagccgtttgtgcatcgtttgctatacctaaaatatttaaaccagtatatgtagatggtatttctggtggtccttacattgatggtggagtggttgatcggcttgggttatttaatgatatcaaaaaaagagcgctatcaaatcgaggaaggatattgattcataagattaataaaagtcacaaatttagtagtgacaataattatgaagaagagttaacaaagtacaaggacatcaaaataatcaaaagtgacgcagttaatgaaagtttatttaaacttaaatactttaataaacaatatgaatgctcacgtgctaaaatatacaatgagttgagagctatattagatgagcaaaatagttaa

SEQ ID NO: 397430 - DNA, 183 bp, Salmonella enterica
atgttcgtcgaactcgtttatgacaaacgcaatgttgtaggtctgcccagggaaaaagacatcatcctgaatgaactaaccaaacgcgtacaccggatttttcctgatgctgatgttagggttaagccaatacaggcgaactgcttgaaagcgatgccagcaaaagtgatcggggaaagctga

SEQ ID NO: 397431 - DNA, 237 bp, Salmonella enterica
atgaaaagtgattttagtgtggatttttttagcgactctcggtatgaagaattaaccgcagagatatcttataaaggacaaattgtctgtcagcttaataaggataaaggcgaaaacgcagttgaagttgagttttttactgatagccgattgttgtcagaatcagtagaaatgaaatttttattagatgagtttattgcagtcttgaatgaagcaaaattagatttaattgcctga

SEQ ID NO: 397432 - DNA, 882 bp, Salmonella enterica
atggagtcacacgatgagccggagaggaaagtgcatctttaccactgcgaccaccgcgggctgccgctggcgctgataagcccggccaacacggtggcgtggcgtgcggagtatgatgaatggggcaatcagctcagtgaagagaaccctgagcacctggagcagctgatacggctgccggggcagcagtatgatgaagaatcggggctgtattacaaccggcaccgctactacaatcccgggcagggacggtatatcacgcaggacccgattgggctggccgggggatggaatctgtataaataccccttcaatccggtgctgcgggtcgacccgctgggattatttgaagatttttctgcatttaccaatgcacctggaattcagtatgaattgacgaaagcgatgttcgatgattcatggtatacaccaaactcattagcattttctgatgtattgggagagggcgttacagggcgaataagaaatattactccatctatttctaatgtagaatacatggggctagatcctaacataaagcaaaaggggttatatgatcatattgctgatatgcaattcaatatatctggatcgttgaatgtagccctaacctgcaaagctgaggataagaatggggctatgaaagaatgggatacagggacaacggtacaagtacgaaatatgccagtgaagatcccactcaaagaaccatcgattccaatacctggtatgacgtgggttttatgggtggataagcttttgaatacagagaaatttatagaacaatggcataaagaaatgttagtttatggtaaaaaattattgattcaccagatgaaatttgtgctggtagccaattttaataagagaatattataa

SEQ ID NO: 397433 - DNA, 462 bp, Salmonella enterica
gtggaaaaattgctgttaaatacaccaggagtcgtaggttgggatattcgtcacgataataatatagcattagataatgtcattacaatgcttcgagataataatcttatcaattattttagcgttattaaaaaaaatgatgttattgttatctcaggttctgtatcaaaagaagttgagcgcaatattttatcactagtaaacgcttttaataataaagaaaaaaatgttcatgtattgtttcaaaatattcagacatatatacctaccgatctatttccagccaaaatattaagagtgagtggcacatcaaacaatcccgcgattgtactcgataatggtaccagtttgagcatcgggagtattttgaaaggcggctatgtgattgattcaattgatccagctagtggaatcaacctctcccgaccggatgagtacattcatataccgttgtcgtactag

SEQ ID NO: 397434 - DNA, 987 bp, Salmonella enterica
gtggtcgcagtggtaaaggtgcactttcctctccggctcagggcgcggctccagctgatttttcatctgctccgccgtcagcccgcactgcgtaagccatgcccggctcgcctcactcaccgcgtcacgcctcagctcatcctccagccggtccagcatcgcccgcagcgccgccgggaactgcaccgcctcgccgtccccgctcccttcctgctccagcttctccgccaggctgcggtggcgtgttttcgccagttccgtattttctgtttccacccggagaagcggcgtgaagcttcccggcgcatacaccgtctgaacgcggcgctgctgtgtctgcactgttgtcagcctgtccccctcccagccgtaccacgtctcatacggcctcgccgacagcgccgtccgcgtctcgctccagtggaccggctcgcgcttccatacccgcttacccacccggcggcccgtcgggtcgtagatataccgcccctccgcctgcgtctccccgtactgcgtgcgcacataacggaccagacggtgctggttatcgtagtcgtaccggtgcgtccgctcgtcgtgcatccggatgaccccctccgggatacggtccgtcttctccgtcagcctcccgtaacggtcataccggtaccggtactgcatatcctccgtgatgcggttatccggccataccgtgctgctgctctcaggataaaactccgggtccggcagccggttccccgccgggtccgtggcgtacggcagggtgatgtccaggttcgcggcggtggtgtgcaccccggtcaggcgcccggcctcgctgtagcggtactccctcgtctgctgcggcccgctgatgcgcaccagcctgccaccctcgtcgtaaccgtattcccggtcaagctgcggcagtgtcagatgctgttgctgaagctgaccgcccggcgtgtaagtggtcgtcagttcataactgtccgggaggctgtctga

SEQ ID NO: 397435 - DNA, 741 bp, Salmonella enterica
  misc_feature (618)..(627): n is a, c, g, or t
atggacatatataagcaacttatttcagaattagatattgagcaacggcagattgaaatctctgtatctattattgatgttgatgccaatgatttgcaacagcttggtgtaaactggtctggtacgttgaatatggggcagggctcagtatcatttaatagtgccgcgggtcaatctaacttaagttcatccgtgattagcaatgtcaacaattttatgattcgtgttaatgctcttcaacaaaactctaaagccaaaatattgtcacaaccgtcaattataacattaaataacatgcaggctattcttgacaaaaatgtcacattttatactaaagtatctggagagaaagttgcatcattagaaagtataaccagtggtacactattaagagtgactcctcgtattttagaggacaacaataatccaggcagaaaaagtaaagagagggtgcgattattactggatattcaggatggaaatcaatcattaaatcagataaattcccaggatccagcctcaattttgcctcaagttcaaaattcggagatgactactgaagcaacattaagtgcaggtgaaagtttattattaggtggttttattcaggataaagannnnnnnnnnataaagaaagtacaggcaaagaaggaattccgctgcttagcgatataccgcttattggtcatcttttttccagcactacatcacagaagcacagtgttgtcagattatttttaa

SEQ ID NO: 397436 - DNA, 453 bp, Salmonella enterica
atgaaaaaaaaatttaactcacttcaggatatttacgactattacaataatggtggtaccctcgcatcattaaccaatttaactcagagagaccttgatgatttacaggcttacgcttatacatgttatcagtctggtgatattatctcagcaagaaatatttaccatttactcgcttatcttgagcactggaattatgattatacattatcattgggactctgccatcagcggttatccaatcatgaagaagcccaattatgctttgctcgttgcgcgacattggtaatgcaagatccaagggcttcttactattccggtatcagttatatagtcactggagataaaaaaatggcaaaaaaggcgtttaaggcttgcttaatgtggtgcaacggtaatgaagattattcaatgtacgaagaaaatataaagaagattctggctcagaactga

SEQ ID NO: 397437 - DNA, 240 bp, Salmonella enterica
atgacaatattcaagaaaattaaacactgtttgtctgggggggataaatccgtcgaattgcggctggggccggcagaaatcctggtgtctgatgacaatggcgttattcctgaacagggtgtcagggttttgacacaggtgataattctggatgcaccgaagggacagattgagtgtgtttaccgtccgctgcaggtgaggcaggatggcggggaatgggaagacatcaaagggatgtga

SEQ ID NO: 397438 - DNA, 1593 bp, Salmonella enterica
atgccggtacttatatcaggcactctcagggatggtgcgggaaaaccagtacaggactgcaccattcagctcaaagcgaagaaaaccagcccgactgttgttgtggaggtgatttcatccactttcactgacgctgacggccactacagtattgaggctgaaccgggttattacagtgtgtcactgctgcgggaaggttgtcctccctcagtggccggagacatttacgtggccccgaccgatacgccggataccctgaatgcgtttctcgatacgccaaaggatgcggacctgcgtccggaggtgatgaaacgttttgaggaaatgataaaccgcgttgcagcattaactgttgagacagagaaggatcgggagcgcgcagaacaggccgcacagacagcggaacagagtaaggatgcggtagctttgtctgcaacggctgcagcagagtcacagcgtcaggcggcactctctgcggatgctgctgatgtttctgcccggtctgctgcagataatgcccgacagacagcgcaggatgttctggccagcagtgcgggtgcggacagtgcggcaaagtcggcacaggcagcgacggagcaggccgaactggcaaataccgccgctgatacggcacagaaagcgcagcaggcagcaggcgcttcggcacagtctgcagcaggaagtgccacccgcgcagaacaggccagagatgaggcactgacgtccaggaatgaggcgctaaaagccgctgaaaccgcagcgacagactcggcaacggaagcagcaggtaaagtatcggagcagctgaaagtgactgttgccgctgatgctcagcgcgcagaagctgcgatggctgacgctgaaagcgcggcagcagcctcccggggataccgtgatgaagcgagggatattgctgaaaatgtggcgccaggagatgccagtacaacgcaaaaggggcttgtacggttaagtagtgagacagacagcgaaagtgaagcgcttgccgcaacatcaaaagcggtcaaaaaagtcaaagacctgacagaccagaaggccccgttggacagcccggcgctgaccggtacgccaacggcaccaacgccggaaaccacagctgcaggtcttgaaattgccacggcagcgtttgtggctgcgaaagtggcacagttggtaggttctgcgccggaagcgctggacacgctgaaagaactggctgacgcattgggtaacaatcctaattttgctaccactatcactaacatgattgtgggcaagcagccgctggatgaaacgctgacgaatctgagcggaaaagatgtcgccggccttctccggtaccttggtatgaatattcagctccggatggggccactctcgattgttggtgttgatgcatacggtaatattccacagcaggacggcatggtgatgacgtcaatttatattgacccggataataatgctgccacggaggcaacattccagccgatacaggtgaaatttggcgatagtgactggcaggacttaaaaacactgaagccagcaggtaatttaaagcaggaggtaaccgatgacaatattcaagaaaattaa

SEQ ID NO: 397439 - DNA, 1359 bp, Salmonella enterica
atgccgatgtttgttccgctcacggcttcacgggaaaccgggcgggaagagatgcgggatctcagcgcgtggttttcgcaggtccggcgccagcagtcactgaatatcaggcctgttcccgtgatgtctgaaccgcccgcaaccacgctgacaaaggcagccggtatggcgactgccacgataacgggggcagggaccgggtacgctgtcggcgataatcttacgcctgcaggtggtaactttgcggtgccgggccgaatccgcgtgacgggcgttgacggtgcgggggccatcacgggtgccgccgtccagcagccaggcgtgtacgcggatgaacccacaaatccggtggcgacaaccggtggccgcggcagcggggcctcgtttactgtcagatggaacgccggggttgcgtcctcagtgtataacggtaaaacctggtcacgtactgatgccggcgcatttctgtataccggctacaacatcatggacacggtttccggataccgggggaacgggatacagaacggtacacagtgcatcattgagtttataagcgatgccccctctctggattttcgcctggtgggcggtaattaccagggggacctgtatgtggatggtcagcgtatcagcgggatatcaattaaaacagacagcagcggcgcgccgtatatttataccgttgactgggccggggaggtgaaaatccgttcttaccgtctggtgggcatcaataccgggttcgggggcgtcattaccgggcaggcttacaccgtccaggctcctccgggaaccctgcgtcctcttgcatggcagatgggggacagctacacggtgggtattggtgcgaaacagggcagctataacgatttccgggtgatgtgcgatgccctcggtctggacggtattgctgacgggataagcggcagcggatggacatcgctccaggagggacgggtaccggaatggcggggggaaaacaagctgggcagtatcacccgtaaaccacagtacatctttttctcgctcggctataacgactggtcagctgatattgggcgcgtcagggcagcatttccgccagccgttgcggccgcccggcgtatctgccccctggcgaaaattatcgttattggtcctgccaccccggtcgggtcgacgacacagctgaatgccatccgggaggccatggctgaaatgtgtgccagcctggatattgcgttcgtggatgtcagcgacgtggtgaatgcgaccaacaaaggactgtacacaggcagtgacagggtccaccccagcgacgccggccacatttaccgggggatacagatggcgataagggtatctgagcttttgtaa

SEQ ID NO: 397440 - DNA, 582 bp, Salmonella enterica
atgaagcgactttttttctttataccgataatattcattagttttgacgccatggctacgtgtgaaatacagccaaaaaaccatgcttgcctgaccatttttaccaagggcaccatctattccgctttccccattttaaacaataagcctgaatggaaatggtatcagagtgaggatataggtgaatattactggcaaacagaactgggtacatgtaaaaataataaatttgtccctaatggtgccaggcttttaattaaccttggaacactgcgccccaaggaaaaccctccaactgaaggatcttttcaggatttactaaatgctgctgagaaaacagcatttttcgatgacgcaatcgttgataataatattaggagtcatatccgagggggcttctatcaaaaaaacagcagagattcagtattgtttgcaattcttgataactcaatcatggtaaagtattttaaagcagagaagtcaacttatgctcgcatgacagcgcatcttcctgaaaaaaatgagtcttacgaatgcgtaacgaaaatagaatatggggtgcttcgtagtgagaaaaaataa

SEQ ID NO: 397441 - DNA, 528 bp, Salmonella enterica
atgggtggatggaatctgtatttgtatccattggatcccgttagctggactgattcgatgggtctcgcacctaataaatatggacacatgaagaacggtggctacggagcgaaaccgaccccaccacctaagcccaacccgggtaaaatgccaggcatagcggaaaaattgatgccaaattatcctattgaccaagccagcagtgagcccaacgttttcaaaacattttttaatggattcagcccgtacgattacacattgtattgtaaaaagtgggtgaaaccgaacctgatttgcacaccatgggatgatccaaaatatccaggtatggatacaaagacagcaattgattatctacccaagaagaattgggcagtaaatcaattgccagagggatattcttgtgcagaaccctatttattcccggatctcaatgaactcagtggaccagcaacggcagggatagatgatctgggtgagttatgggggaaaatatcacagagaacaaggaggggagggagaaaatga

SEQ ID NO: 397442 - DNA, 684 bp, Salmonella enterica
atgaggctttataattttacaagtattacgactgatagagtttttatagatgatgtcatttgtgaagatgacttacgtaacataataaagtcaattgatatcgtagcctccacaagacagaaggcatgcctccaacttttaaattatagaaaaaaaaatagacagtatcgacttaatgcaagaaaagaattatccctgcatgtcaaatctctccgtcaacgagtacggagcaataatgaaaaaaaattaaataatgagatccgtaacactattaactggatgattgatattcagaatgttgagcgactactgctacgtgatgtgatgcgtaaggctcacatttcgttaactcaggttttgccaacattaatatcatcgaagttggactgggagaatttgctcggtgatatgatccgccatgagcttgaagacaatcatataacaggagcaatcagaatcacctgcaatccagcgctgaaactacattgtatactgcagaatgagagcaataattttcatatcatccatgatggtaattttccaattaataaattaataatagaaaatcaatacgtcaggataacactagatcccttaaaacaaatagatatgttactggatatttttaaactaacatatcttaacctcattgaagaaggccaggaatgtcacaattatcagtaa

SEQ ID NO: 397443 - DNA, 291 bp, Salmonella enterica
atgtgtgaagaaatcaggattgcaagaattattgtgtttttttgtgtattctcaatggctttgcttgttgttttttttggctttcgattttgtaaaaaaaacaatatagacatgaatacttttccaggtatgcttgaaatgtatcgacgtatttttatgtttaaaaataaggtattctctattttaatgttggcttttatatatggtggcgcgttgcttggatttataattttcggcgtcagtctttgggcggaaacacaaggttgtgtgttcccaacacgatatagttaa

SEQ ID NO: 397444 - DNA, 192 bp, Salmonella enterica
atgagcagcgtactgatcggattcgttttgctgttcagcccctgtagtcatgatgcctgcgagtgggtgccggtaactgaaaaaatctacccgacccggcagaactgccagcagatggcagacgaactgaaaaagcgccgtccgcattacgaatttagctgcggtgaggtctatcgcggagaagaggattaa

SEQ ID NO: 397445 - DNA, 891 bp, Salmonella enterica
atggatattttgaaaggtaaagtcagtatattaatgcctacttataacagtgcagattttattgaggaggctgtaaatgacattattatgcaagactacgtgcattgggaattaattattgtagatgacggttctactgataacacaaggaatatattaaggaaatataatgatgagaggataataattcattatatgactaaaaactcaggtatttcggtagccttaaataaggcactggaattagcgagtggtgaatatattttgagatttgattccgacgatagatgtgatacagatcgtatatcaacgcaactttgttttttagaagaaaacaaatttgatattgtgggaacatctgttaaaacaatatcacgagaaggtatattgataggtagatctaaatattatgaagatagcgtactcttaaagaaattattaagatatgaaacacctatgctccatatttggctagcaaaacgagaagtgtatagcaatgttggggattatcggttagatggagtagaagattatgactttatttactatggtatatcgataagaaagcacaattctaatacagccagtttgcaaggatgggatcaacgtaagaaatttaatttagcttggggtttacaccgagaaagacagcgttttggaaaagaattaactcatattgctaatataggaactagtaagcttggaaataaaatgcattctatttcgaatgctttcctcagaaaagcattatcaacaaaaaacttactaataaagatagtctttactttcatatcagcattaatatccccttatcaattacaatatctattgtttcgtactttaagtagagtaaataaattaaaatatgaaaatagcatatctaatacctag

SEQ ID NO: 397446 - DNA, 144 bp, Salmonella enterica
atggaactcaccactggcttagtggtggggctcccactgcttgtacgtacacggtttcaggttctgtttcactcccctcgccggggttcttttcgcctttccctcacggtactggttcactatcggtcagtcaggagtatttag

SEQ ID NO: 397447 - DNA, 183 bp, Salmonella enterica
atggtggcgttacatcttcaccttgatttactggccgttgatttcaatgcgttccaggtatatctgccgcacttactttcttacatccacgacgatattaaggctatagacaaagagttaatttccctcggcctgtttgacgaggcgatgggtaaaagaccgcgaaaacctgacgcgaaataa

SEQ ID NO: 397448 - DNA, 129 bp, Salmonella enterica; identical to SEQ ID NO: 397410

SEQ ID NO: 397449 - DNA, 612 bp, Salmonella enterica
atgaaaaagcaattatttcgtgggttaatggttggcgcactggcaactttcgctacgggcatctcgacatttgcccaggccgacggtacccccagccttgatttaaccgttaaggccaatattacaaccggtacgtgttctgcatccatcatcggtaaaggaggagcgaccaatactatcggcttcggcaacgtatatatttccgagatcgtcgcaaagactaaagttgaggcgtttaaacttcgctttagcgattgcgcaggtttaaaagagaaaaaagcaacggtagtactttctccggcagcaggtgttggatgcacaggcggtaactcccaaaacgcagagttctctaatgccactactcaaacaccgaaagcggaaagaacagcggtagaagtctggacaacagacgttccggaaagtgccgatagcgaacagttccattgttatgataaaaacgcgcagaccgtcgatctggctggtgccagcacaacaacaccagtggattttccattaagcgcacgtttagtgccagttagcggctatggtgcctcatcgataactgctggtgatttctattcgcctactgtctttactatcacgtaccagtaa

SEQ ID NO: 397450 - DNA, 417 bp, Salmonella enterica
atgccaactaatatattagataaaattaggcatagtttgagttgtgtggcggttttatttggtttgttcggcatttttgtttttgcatcattttcgtcttcctatgccaggctttattcagcaggtctggctgcgccttttttatatattattgtttttgtctatgcgattgccgcctggcgtatttattcaaagtattacccgtttttatcatttggtcgtttatcattcgcggagtgttttgttccggcgctggccctggtgtgccttacctttctctacagcgtttttagtggcccggaaccctggatagccgagttatcaaggcaattttttttcataaatttcttaacacgctggcgatatgctttctggctcctgtggcggaggaaattatattcagagggtttttattaa

SEQ ID NO: 397451 - DNA, 342 bp, Salmonella enterica
atgatcggcaaaccagcggcacggcagggtgacatgacccaggtgggcggtccgatagtccaggggtcggcgggcgtgctgattggcgcgccgacgggcgtggcctgttcggtgtgcccgggcggcatcacctacggttcgccggtgaacccgctgtcgggggccaaggtgctgccgggtgagacggattttgcgctgcccggcccgctgccgtttgtgctttcccgcgcctacagcagctaccgcacaaaaacgcccgcgccgtcaggactgttcggccccggctggaagatgcccgccgatatccgtctgcagcttggctggtttttctccgtcaaatag

SEQ ID NO: 397452 - DNA, 339 bp, Salmonella enterica
atgctggcgttgctgaaagacgggacgttcaaaagcgcctcacaggtggcggcctgtctgggactgacaccggtagagaaaacgtcggggagttcagtgcgtggcagaccacatatgtcaaaaacagggccgtcaggagtacgggctaagctgtatgttgcagcgctgaccgcgagccgctggaacaaacaagcgaaggctatctatgaaaggctggtcgcaaagggcaaggcgaagaaagccgcgctgggagctgtgatgcgcaaactggtgcatttatgcttcggcgtgttgaaaacgcggcttccgtgggatgaaaattatgtagctaccgcttga

SEQ ID NO: 397453 - DNA, 348 bp, Salmonella enterica
  misc_feature (6)..(15): n is a, c, g, or t
ttggtnnnnnnnnnnctgtacgacaacccggaatatcgccagaaaaataaagctgaattcgcgctgaaaaatgccagtgaaaacgctgaggatgcagcccgcgtccgccaggaactggacgacaaactaacccgaatcgctaacaccattgcatctgctgtatcagaaaacgagatcaacaaagtctattcatcgattgcccgcgaagcggaagtgcatcgcaaggatgcagaatcgaaaggtgatacacagcacgcgcgttacttaggtgggcgtctgcggcggctgacaaccattaaagatgaacgtatcgccgaactgaacaaagcacaggagaaggcagaatga

SEQ ID NO: 397454 - DNA, 300 bp, Salmonella enterica
atgggcaaattcgcggacacgacaggggttggccatgcagacgctgacaccagcctcatgcaggccatacgccagattttcatggtaaatacccgtcgcttccagtacgacagtcacactttcaggaacgcatttttgtgcgttcagccagtcgacaactttacgggcaacggcgggttcgttagtcagaaccttgtgcttttttttaccgccggggccggcagtaagcagacaaagatcgattttatttttactgacatcaataccgagagtacacacagaacacctcctttcacctga

SEQ ID NO: 397455 - DNA, 273 bp, Salmonella enterica
atggcaaaacttactgattaccaagtaaatactctgcgggcaatcaacgaagggaaagtaatgctgcgcggaaaatttgaccactactggtggagtgactctgacactctgtgttcagtagtcgccagacgcctcaagtctaagggcctcatcaagacggtttaccttaattcggtgcgggataaagtcgaattgaccgaggccggacggcaggcagtatcgaaaaaagaaattaccgtagcggatgcccagcgcttcgagagagaattttaa

SEQ ID NO: 397456 - DNA, 696 bp, Salmonella enterica
atgaatataggaaaccgtgtcagacaacttcgccgcgcgaagaacatgaaaattgctgagctagcagaagccatcggcgtggatgccgcaaacatctctcgtctggagactggcaagcaaaagcaatttaccgaacaaacactttctaggctggctgactgcttaggtgttgatatagcagaactctttacctcagactcaaaaggtaatactgtatgtaaacacagtgatatgaggaaggattcagctaacgtgaaggatttgttccgtatcgagatactggatgtcagtgcaagcgccggtaatggactcattcagggcggtgatgttatcgatgtaatccatgctatcgaatataacaaggacaaagcattagctatgtttggcgggcgccctgccgctgagcttaaagtgattaacgtgcgcggtgacagcatggcgccaacaattgaaccgggagatcttatttttgtcgatataagcatcaaccagttcgatggtgatggcatctatgcctttggctttgatgataaaatatacgtaaaaaggctgcagatgatccccgataaattattggtgatatctgataacactaactacagggaatggagtattaccaaagacaacgagtgtaggttcggtgtttttggcaaggttctgataagccagacgcagtcactcaaacgacacaattaa

SEQ ID NO: 397457 - DNA, 480 bp, Salmonella enterica
atgaatctgttacctgtattgctgaaaaaatactggttgcaactctcagtgactttgctgattgctgcacttgcatggacaacagagcattaccgcgacaacgccattcagtataaatcgcagcgcgatacagccagccatagcctgacactggcgaacgcgacaattaccgacatgactaagcgccagcgtgacgttgctgcccttgatgctaaatacacgaaggagttagctgatgcgaaagctgaaaatgatgctcttcggcgcaagcttgataatggtggtcgggtgctcgtcaaaggaaaatgccctgtgtcatcctcagccgaaaccgccagcaccagccgcgtgggcaatgcggccaccgtcgaactctctccaggtgctggacaaaacgttttcaatatccgcgccggaatcatcagcgaccaggaaaaactgaaatatttgcaggagtacatccggacacagtgccattaa

SEQ ID NO: 397458 - DNA, 456 bp, Salmonella enterica
atgactctgttacctgtattgcttaaaaaattctggaggccattagcagaaatactgctagtggcttttttattatgtgctggtgcgtattggtgttattcacaaggttatcagaaggcggatatatcctggaaattccagtgggcgcaacgagaccttactgatgcgaccgccgcattgcagcatgaagtaatcgaaagagcgaaagaacagcgtcatcagcacgccgcagatgaagaacggaaacgagctgatgaagagctggcaaaaatacaggccaacgctgatgctgctgagcgtgcttgcagggggctgcaacagcagctcgcaggaagtgaaaccggcaggtttccgctcttgctgcaacaagccaggcaaaagcggagaccggaatactgctcgcccggttgcctggcgaagctgacgatctggcggaaagttcgcagaagaggctaa

SEQ ID NO: 397459 - DNA, 300 bp, Salmonella enterica; identical to SEQ ID NO: 397454

SEQ ID NO: 397460 - DNA, 669 bp, Salmonella enterica
atgagaaaaattataattccattatttctgagattgatatcacaaaaaacggtgagttccattatcccagaaatacagattccatctgacttcaataaagacagatttgatgattattacaacaacatatccagcaatagtggaaatggttcatgcgataatatttcatttaaaaatttctacccacctgaatacatatcattaaaaataaaataccctccgtttaatacttggttttgtctgtattctgtagatgttattcatagcgggtatgggccgggacaagccctgcctgaaaagatctaccttgataaaaaaacaggtttatggaaaaagaaaaagtacactttaagcaaaaaaggtacccagagttctctggaagtttatggcattaaaaacctgagcgagttgcagcctgtggctctgtataacattcagtccgtcaatgccagtggctatgcggttatcgacaacaatattcccctatgggaaagaaagaaaggggtgaagaaagacctctcattctgcctgatacgtggcgaagctgcattttgtggttcaggatcgatgataaaagttgtcgacgggaaagaaatcgattttacaccctacatgctcaaatctctggaaaccgtcgaaatggggttgccggaaaaagcaaaaaactga

SEQ ID NO: 397461 - DNA, 879 bp, Salmonella enterica
ttgatcggcccgccgggtacgggtaaaaccatgctggccagtcgactgagcgggattcttccaccattaagcaatgaagaggcgttggaaagcgccgcgattctcagtctggttaatgcggatacggtacaaaaacgatggcagcagcgtccctttcgctcacctcatcatagcgcctcacttactgctatggtcggcggcggcgcaatacccgcaccgggagagatatcgttggcgcacaacggaattttgttccttgatgaattgcctgaatttgagcgacgcacactggatgcgctacgtgaacctatagaatccggtcaaattcatttatcccgtaccagagcgaaaataacgtaccctgccaggttccagttaatcgccgcaatgaatcccagcccaaccggacattatcagggaaatcataatcgctgcacgccagaacagacactacgttacctcagtaagctgtcaggcccgtttcttgatcgtttcgacctttcgcttgagataccgcttcctccgcccgggattctcagccaatacgcctcaaagggtgagaacagcgctacggtaaaaaagcgggttatcgctgcccaggaacgacagtaccgacgccagaagaagttaaacgcgcgcctggaaggtcgcgagatccaaaaatactgtgttttgcatcatgatgacgcccgctggcttgaagacacgctggtgcatcttggattatccattcgcgcctggcaacgcttactaaaagtggccagaaccattgccgacatagaacaggctgacgagatctcgcgtcagcatttgcaggaggcggtaagctatcgggcgatagacaggttgttaattcatttacaaaagctgttggcgtaa

SEQ ID NO: 397462 - DNA, 147 bp, Salmonella enterica
atggcgttaaagcacataaaattgagcgaacttgatgatccttttgaatttaagactgatgatgaagaaaaggatggtggatctaagggtattgatgaatctttaaaagctcatcgctctaatagcacgttatatgcacatctatag

SEQ ID NO: 397463 - DNA, 321 bp, Salmonella enterica
atgactgcacgcgtgattgccctcgatttagacggaacgttactaaccccgcaaaaaaccttactcccctcctcgctcgacgcgctatcacgcgccaaagaggcaggctttcaacttatcattgtcactggtcgccatcacgttgctattcatcctttttatcaggcgctggcgctggaaacacctgctatttgctgcaacggcacctatttgtatgattatcaagcgaaaactgtcctggatgccgatcctatgcccgtggataaggcgttgcaattgattgatttactggatgagcatcagattcacggcctgatgtag

SEQ ID NO: 397464 - DNA, 300 bp, Salmonella enterica; identical to SEQ ID NO: 397454

SEQ ID NO: 397465 - DNA, 300 bp, Salmonella enterica; identical to SEQ ID NO: 397454

SEQ ID NO: 397466 - DNA, 885 bp, Salmonella enterica
atggcgttgcatcaggtggtcaaaccgcaattcgaggcgcggcatgattttgatattttcgccgggttgtgcaaacgcttcgatcgcgaggcggcataccgcgaaaatcgcgatgaaatgcagtggatcaacgctatttatgatgaaggggtgaaaaccggggcggcgctgggcgttactctgccggatttcgacagcttctggcagggcgagggctacattgaatatccggcggggcagccgtgggtgcgtcacagcgagtttcgcgagcagcctgacctgaacccgctcggaacgccttcgggattaatcgaaatcttcagtaagacgatagccggatttggctatgcggattgtcccggacatcccgtctggatggaaccattcgaacgcagccacagcaaagcgacaacaaaatatccgctacacctgcaatcctgtcatccggataaacggcttcattctcaactttgctccagcgacgcgtttcgcaaaacgtacgccgtcgcagggcgagagccgctttatatgtgtgagcaggatgcccgggcgcgcgggctgaaagccggcgatatcgcgcgcgtctttaatgaccgcggccaggtgctggcgggcgtggtcattagcgccgattatgtccccggcgtcattcgtattcacgagggcgcctggtattccccgcagaaaggcggcaaggcgggaacgctatgtacctatggcgatcccaatgttctgagcgcggacgtcgccacgtcgcaactggcgcaggggccatctgcccacacggttttggtggaggtggaacgctatcagccgcaggcgcctgacgtgacgggattcggcggtccggatacggtaaaagaggagagcgagaatgcagcatag

SEQ ID NO: 397467 - DNA, 429 bp, Salmonella enterica
atgaaagcgctgagcaataatggcagtcagtggctactacaacagtttttagcggaactgatgcaaaaccaggtcttttatacccacatcagtaaactggcctgccagtatgccgcccgccaggcgcttttacgtacgggcctgacaacgctttttagcgaaggggaaattggcggcgcatccgcagggctgcatctgtcgttgcgcatcccgtggccctcagcgatcgtcgcgcagctacgccagcgcagtctgcgcgccggcattcgcttcgatacgttaatggagatagaaaacggctccgaaatcgcctggcgaaaagagaatcacgaaacggtgatgctttttggctttggcggtctgccagtacagcaaatccgcagagtattagctgtcctgcaacaggaaagagaaacgttaaaaagttaa

SEQ ID NO: 397468 - DNA, 333 bp, Salmonella enterica
atgaaacggttctgtttggcgttagcaatgatggttactgcaccggcgatggctgcaattcagtgcggcaattacacaatgaccggtgacggaatgactgttattaacggtgagactgtcacatctcagaaaatcaaatttctgggaaaagatggtgattactcaaacatgaaaatggacatgggcctgatgccttcccgtgatggcaacaattacggctttgagtttgtgaagcgtaacggaaaagctttcctgaacgtccagctgctacagaacagcatggacgcaccgaaaatcatcggatctttcccgtgtaaaaaagtgcctggttga

SEQ ID NO: 397469 - DNA, 1620 bp, Salmonella enterica
atgcctttaccgttcccctttgacttcaaaaatcctgattaccagatggtttttgaatggcgaatggagcgtttgctgcgtattcgccagcatcctgagatgctgcccgcgttgaagcagttttatcgtactaacccggctcagttcatcatcgactggggcatgacgacggatccgcgtaatatcgattatggcctgccagtcaccatcccttttctgctattcccgaaacaggaagagtggattcactggattatggaacgctggggcaagcgggagaacggtatcaccgaaaaatcccgtgaaatggggctgagctggacggcgatcgggatggcctgttcgctttgcctgtttaacaaagagatggtcatcggcttcggttcccgtaaagaggaatatgtcgacagtactggtgaccctaaggcgctgttctggaaggcgcgcaagtttgtagagacgttgcccgtcgagtttcgtgggtcgtggaatgagaagaagcatgcaccgtacatgcgtgttgaatttcctgagacaggcgcggtcatcaagggcgaagctggtgacaatattggacgtggtgaccgaaccacactctatctggtggatgaggctgcatttctgcaacgcccgctactgattgatgcggcgttatcgcaaaccacccgttgccgtattgacctgagttcggtcaacggcatggcgaacccttttgcgcagaaacgacacggcggaaagataccggtattcacattccactggagcagcgacccccgtaaggatgatgaatggtatcgcagggaatgcgagaaaatcgacaatccggtggtagtggcgcaggagcttgacctgaactacagcgcatcagcggaaggtgtcctgatcccctcagactgggtacaggctgctgttgatgcacatatcaggctgggcatccagccaactggcaaacgactgggggcgatggacgtcgccgacgaaggtcgggacaaaaacgccttttcaacccgtcacggtttccttctggagaatgtgcgggaatggtccggtgtgggcagcgacatttaccagtctgttgagaaggtcttcggcttttgtgaacaggataatctcgaagagtttcgcttcgacgaggacggtctgggggctggcgttcgcggcgatgcgcgtgccattaacgagttacgcaaagccgcccgcaggccgccaatacttgccacaccatttcgtggtagcggcgcggtattcgatcctgatgacgaagccgtacggggcgacaatgggcaggctgcacgcctgaacaaggatttcttcgccaacgccaaggcacagagctggtggtacttacgcaagctcttccggaatacctaccgcgccgttgttgaaggtatggcctacaacccggacgaaattatctccatcagcagtacgatggagagcaaagacaaactcatcatcgagctttcgcagccaacctactccattaacggcgtggggaaaatcgttgtggataaacagcctgacggtaccaggtcgccgaacctcgccgactcggcgatgattagctacgcgccgatggattcctctcttgataattgggccaaactggccggagcgtga

SEQ ID NO: 397470 - DNA, 339 bp, Salmonella enterica
atgcaaggtttgggaaccgctggaaccacgtggaaccacctaaaagtgaaggtggttcctcctcgcagcccttgtagcaagcggggcggaaccactggaaccactggaaccacctttctgctagaaaccccatatatatatataagtcgattgggggaaaggttagaaaaaggtggttccaggtgggggacggtggttccactccgaattaatagctttttgcatgttggggtgtgcgatacacaaatcggggctgtgttacctatgcccacggagaggcgggcgcggttccctgaaaaattttctgtagcaaaacgtagaggtcagagctatgcgtaa

SEQ ID NO: 397471 - DNA, 639 bp, Salmonella enterica
atggcacaaacagtattaaccaaccatattaaagaacaagttatctgtaacgcgctgacaaaagcgggaatacccaagcgcaaagcggcgctgcgagcagcgcgtattgactgggctgagcgtgttcgccttgcggcgattggtggtcaagaagttgaggccgagataatcaaaaacctcaaaaaaatagaaacgctggtatcaaaattccccgaatcgttaaaaaccgccaatagtattatcaggaaagataacgacatgtatctgaatctggctggctctcgggttaacgtctatttcaacggtaactaccgggggtatgaatcaggctccccggaccatattcacaaaatcgcaccgagtgaatttaccctgctggcagatgaccccttagttactgagttttacgggtttgatgcactttataagcagattcagagcgatgagtcagacattcgccagaacgtcagcgccgcattgagcaaagtacgtactgttaaacgcctgctggaagaatggcccgaagctaaagagcttctgccggctgacgccccgtccgtccccctaccaccagcgatacggcgcgaaactctcaacgaaatgatcggactcccttctgacgaagaagtcacagcgtaa

SEQ ID NO: 397472 - DNA, 309 bp, Salmonella enterica
atgagtcgtgaagacgcgcagatgaagatccgtttaccagcggatttgaaagagcaattagaaaatgcagccaatgcaaatgggcgttctttgaatgctgaagttttgcagaggttgactgcatctttccccacatcaacctatgatcaaggtacccatgcttttttctaccttcggaaggcggagggtatgggacttggtggcgaagctgaggatctgcttgaagaatgggggaaaaatatcgaaaaaaataatgaattacttaaatccctgcatgatctcattgaaaacaaaatttataaaaagtga

SEQ ID NO: 397473 - DNA, 177 bp, Salmonella enterica
atggctattcagatcacgcagttacatcaggcagacattttcgggtatatcgcagacatgctggaaacagcaaggcttctcagttcgctggagacaggggatcaactggcttttgaattgattgattttgcgcagcaggccgccagggatgcagcaaacaagccgtgggatgaataa

SEQ ID NO: 397474 - DNA, 774 bp, Salmonella enterica
atgaatactttagcactgacaaacgataacacgcaaccaatgatgggcagtcggaaaattgcagaagtggtaaataaaaaccatgccgatgtttgccgtgatattcgtgcaatgctggcaaagctttacggtggtgatgagcgcgattatatccgtaaagcagatttgctttaccttacgaatcagtgtgttaattgcgtacagtacgataccgataatccaaacgcatgggagtaccaacttgactatgaacactccgaatgccttgtaacgggttacgatgcagttcgtcgtatggcgatgattaagcactggcaaaaactgaaaaaagaagtcgagcaacctcggttagttatgactcaccccgcacctgtaattcaggtggatagtagcattgtccagcttgctcgcgtcatctcggaagcaaccgcatcagccacgatgaaagcgatgacggaggttattacccttccggcgtatcaagcagaacccacagcgccagcatatttatcccacacagaaggtgagtatgtgcccatcagcaaagcggcctggaaaaccgggttgtcagattcaacctgtcgaaaagtgatcggatttttcaaagtgccggttcgttcaaacagcggtgttcgcgggctactcgttaacctttccgcaatggagcaagccgcacagcggttattgaacgaagcaaccccacctaagggcaaccgcaaacgctggacacatccgcagttcggtaacttcacctattacgccgaccttatctga

SEQ ID NO: 397475 - DNA, 543 bp, Salmonella enterica
atgcaagtggcgatgatttttttcgtgccagacaatactcgcttttattatagcaaacttcctggcgtaaaatcattacgcatagtgcctaatatgaaccattattcaattaaacagtttgctgaagaaagcctcgttccatttattaaccggtttcaaagtaaaaaaacattaccacagttgatcggccttattcaccaccatcttcttacggtctatttttcagaagagccggtaaaagttgttcgctggacagcgaacaatcccaatgcgcgtgatttccgttatgcctgtggtatccgctatcagccgcttacgatagatattcccatcaccaatagaatcagtattacgttaaatgaacctgagacgggttgggaagctacctatatcgaagcaacctttgatgatggctatgtcgcaacgactcaggtttatattacacccgatgataaatacccacagacagcgccgccctcagttaatgccgcatgtcaaacgttgccggggcgtggattagggaaaaacgatcgcctcgattaa

SEQ ID NO: 397476 - DNA, 252 bp, Salmonella enterica
atgattgataaatatctttccatcctggtgaaacgcgtgaagaaacccattttactgacattattgtgcatgatgctggcaggttgtgataacccgaaatctcccgagtcttttacgccggaaatggccagtttttcgaacgaatttgattttgatccattacgtggtccggtaaaggatttcagccagacattgatgaatgagaatggcgaagcaggtcaccggtacgctttcacaggaaggctgttttga

SEQ ID NO: 397477 - DNA, 339 bp, Salmonella enterica
atgctggcgttgctgaaagacgggacgttcaaaagcgcctcacaggtggcggcctatctgggactgacaccggtagagaaaacgtcggggagttcagtgcgtggcagaccacatatgtcaaaaacagggccgtcaggagtacgggctaagctgtatgttgcagcgctgaccgcgagccgctggaacaaacaagcgaaggctatctatgaaaggctggtcgcaaagggcaaggcgaagaaagccgcgctgggagctgtgatgcgcaaactggtgcatttatgcttcggcgtgttgaaaacgcggcttccgtgggatgaaaattatgtagctaccgcttga

SEQ ID NO: 397478 - DNA, 339 bp, Salmonella enterica; identical to SEQ ID NO: 397452

SEQ ID NO: 397479 - DNA, 339 bp, Salmonella enterica; identical to SEQ ID NO: 394051

SEQ ID NO: 397480 - DNA, 300 bp, Salmonella enterica; identical to SEQ ID NO: 397454

SEQ ID NO: 397481 - DNA, 300 bp, Salmonella enterica; identical to SEQ ID NO: 397454

SEQ ID NO: 397482 - DNA, 300 bp, Salmonella enterica; identical to SEQ ID NO: 397454

SEQ ID NO: 397483 - DNA, 339 bp, Salmonella enterica; identical to SEQ ID NO: 394051

SEQ ID NO: 397484 - DNA, 339 bp, Salmonella enterica; identical to SEQ ID NO: 397452

SEQ ID NO: 397485 - DNA, 231 bp, Salmonella enterica
atggtatttgcgcatttacgcctgaagttacattcatataaacctctttcatgcacatgcctgcttatgtttatgagaaaaatgacaccttcaggcaacgatatgactatgactatgactatgactatgactatgactatgactatgactatgactatgactatgactatgactatgactataggggaccgcgctaagtcatcatctaaatatgttttatttgatacataa

SEQ ID NO: 397486 - DNA, 300 bp, Salmonella enterica; identical to SEQ ID NO: 397454

SEQ ID NO: 397487 - DNA, 1323 bp, Salmonella enterica
atgcaagcaaccgccacaacactcgaccacgagcaggaacacgttccggtaaactcacgcaataaagtcgttattgcttcacttatcggcaccgcgattgagttcttcgacttctatatttacgccaccgcagcggtgatcgtgttcccccatatcttcttcccccagggcgatcccactgcggcaacgctacaatcgctcgccaccttcgctatcgcgtttgtggcgcgtccgattggctctgcgctattcggtcatttcggcgaccgggtaggccgcaaagtcacgctggtggcttcgctgttaacgatggggatctccacggtcattatcggtctgttgccgggctacgcgacgattggtattttcgcgccgctgttgctggcgctggcgcgtttcggccagggactggggctgggcggcgaatggggcggcgcagcgttattagcaacggagaatgcgccgccgcgtaaacgcgcgctgtatggctccttcccgcagttgggcgcgccgatcggcttcttttttgccaatggcaccttcctgttgctctcctggctgctgaccgacgagcagtttatgagctggggctggcgcgtgccgtttatcttctcggcggtgctggtgattatcggcctgtatgtacgcgtatcgctgcatgaaacgccggtgtttgcgaaagtagccgcagcgaaaaagcaggtgaaaataccgctgggcacgttgctgacgaagcatgtccgcgtaaccattctcggcacgtttatcatgctggcgacctacacgctgttctatatcatgaccgtctattccatgacttacagcactgccgccgcgccggtgggacttggcctaccacgcaatgagatactgtggatgctgatgatggcggtgattggtttcggcgtgatggtgcccgtcgccggcctgctggcggacgcatttggccgtcggaaaagcatggtcatcattaccacgctcatcattctcttcgcgttgttcgcctttaccccgctgctgggttcaggcaatccagcgctggtattcgtgttcctgttgttaggtttgagtctgatggggctgaccttcggcccaatgggagcgctactgccggagctgtttccgacggaagtgcgctataccggcgcgtcgttttcctacaatgtgtcatcgattctgggcgcttccgtcgcgccgtatattgccgcatggctgcaaagccactacgggctggcggcggtaggggtttacctggcgtcaatggcggcgctgacgctgattgcactgctgttaacccatgagacgcgtcatcagtcgttgtaa

SEQ ID NO: 397488 - DNA, 306 bp, Salmonella enterica
atgagccagcggtttccaacggagtcaatacaagccccggcagtaaatttaaacgattacagcgggtttacgatggccggaaagagtgtggaaattattcctgctaacgcagccacccgcatttatcgtatccagaaccttagccatgaattctcgatctggtttaatgacactggaggggaagctgccgcaggtgagcctggtagctatgagcttgctcctggtgcttattatgagttttcatcaccatttgccgtgtcgatttatgcggagactatattccctttcagtgcggcgaggtattaa

SEQ ID NO: 397489 - DNA, 207 bp, Salmonella enterica
atgccaataagcatacccggtgaggtggtattcggtacgcccactggtccaggtagccaaataattaacgtcgtcccgactgaaaacgaattaccgtccaacaagagtggcttctatatagtgactgacagtgaaaaaggtggtgcgcagctttatatgctgacgtcaggtgcacgattttggattgctatggtgagggatttatga

SEQ ID NO: 397490 - DNA, 198 bp, Salmonella enterica
atgtcaaacaatcttctccgtatgtcagagattatgcgtcgtactggatatggaaaagcatggatttatcgcctcataagccaaggtaaatttccgaggcccattaaaatcggcacccgtgcaatcgcttttgttgaaagtgaaatcgatgactggattaaccagcgcatcgaagagtcgcgtaaggaggttgcctga

SEQ ID NO: 397491 - DNA, 237 bp, Salmonella enterica
atggcaaccagacaacttgaattaactaataaatgggtacaactcacaacaggtaaagaggaagtgttgttgcaagtgatgtcatctggcggggtatttgtttttgattccatgaccaggccagatgataaagctgtaggttactttattgcgccactgggaagttgccgtataactccgccaacagcggcatggataagagctaaacaccgcaacgcaatggtcgtttattcctaa

SEQ ID NO: 397492 - DNA, 159 bp, Salmonella enterica
atgtgtgccggcctggatattgcgttcgtggatgtcagcgacgtggtgaatacggccaataagggtctgtacacaggcagtgacagggtccaccccagcgatgccggccacatttaccggggtgtgcagatggcgttacgcgtggcaccgtatatttaa

SEQ ID NO: 397493 - DNA, 339 bp, Salmonella enterica
atgctggcgttgctgaaagacgggacgttcaaaagcgcctcacaggtggcggcctatctggggctgacaccggtagagaaaacgtcggggagttcagtgcgtggcagaccacatatgtcaaaaacagggccgtcaggagtacgggctaagctgtatgttgcagcgctgaccgcgagccgctggaacaaacaagcgaaggctatctatgaaaggctggtcgcaaagggcaaggcgaagaaagccgcgctgggagctgtgatgcgcaaactggtgcatttatgcttcggcgtgttgaaaacgcggcttccgtgggatgaaaattatgtagctaccgcttga

SEQ ID NO: 397494 - DNA, 582 bp, Salmonella enterica
atgaaacgactttttttctttataccgataatattcattagttttgacgccatggctacgtgtgaaatacagccaaaaaaccatgcttgcctgaccatttttaccaagggcaccatctattccgctttccccattttaaacaataagcctgaatggaaatggtatcagagtgagaatataggtgaatattactggcaaacagaactgggtacatgtaaaaataataaatttgtccctaatagtgccaggcttttaattaaccttggaacactgcgccccaaggaaaaccctccaactgaaggatcttttcaggatttactaaatactgctgagaaaacagcatttttcgatgacgcaatcgttgataataatattagaagtcatatccgagggggcttctatcaaaaaaacagcagagattcagtattgtttgcaattcttgataactcaatcatggtaaagtattttaaagcagagaagtcaacttatgctcgcatgacagcgcatcttcctgaaaaaaatgagtcttacgaatgcgtaacgaaaatagaatatggggtgcttcgtagtgagaaaaaataa

SEQ ID NO: 397495 - DNA, 339 bp, Salmonella enterica; identical to SEQ ID NO: 397477

SEQ ID NO: 397496 - DNA, 339 bp, Salmonella enterica; identical to SEQ ID NO: 397477

SEQ ID NO: 397497 - DNA, 132 bp, Salmonella enterica
atggaatttaacgatcccatccatcaacgccgtcgtcggattttcagcctgattaaattcgaccttaccgccagcaatgtcctgattcccggtaagaccgttaaaccagatattagcgctggtaacgactga

SEQ ID NO: 397498 - DNA, 303 bp, Salmonella enterica
atggggaaacttgaatcatcatccgatgtggcaaaaaaagagtacagaaatgccatgaatgtaatgttgatggaaaaagatgactttaacaaaaaaatactaaattctgataacttacagaaacaatatggaggtaatggaaataaaagctgggtagttgcaccgttaaaagatctccttgataaaggtgcgaaagtttatccagatgaatcatgttcattaagattaggtcaaccatttatcataactcttccggaaacgacaaaagtcaatgttgatatttatccagtaagtaaaaaatag

SEQ ID NO: 397499 - DNA, 159 bp, Salmonella enterica
atgtgtgccagcctggatattgcgttcgtggatgccagcgacgtggtgaatacggccaataagggtctgtacacaggcagtgacaggggccaccccagcgatgccggccacatttaccgggggatgcagatggcgataagggtatctgagcttttgtag

SEQ ID NO: 397500 - DNA, 339 bp, Salmonella enterica; identical to SEQ ID NO: 397477

SEQ ID NO: 397501 - DNA, 360 bp, Salmonella enterica
atgagcttcattcaaaatattaatgaaatgacgactaatgttattaacaaagaaaagggagagagtctacaaccctcaccttcggccgaaagtgcggcgcagtttttggatcagctattgcccaaaactgccgcgatagcctcgcccgaacaggtgttaattgaagaaataaaaaaaagacacctcacgacaatgaatacaaatcttagcctggatactctttctgcaggagggttatcaccagaaaacttgattgacttgcaaaagactgtactgaacgcaaatataaatattgatgtagtttctaaatttgcaagtcttttatcaacatcaataactaaattggtctcagtgcaataa

SEQ ID NO: 397502 - DNA, 138 bp, Salmonella enterica
atgcgtatggtcagagtaaagcagcagctgaaaaacagattgaacgttatgcggcaaaaagtggagctgcatattttatctaccgatatccaaatgttttcggaaaatggtgcaaaccaaactataactcgttcgtag

SEQ ID NO: 397503 - DNA, 177 bp, Salmonella enterica
atgcctataattaatggaaataaccctgctgctatccccgtaacggccaaaccaactaaaccggcagtaatgacacctaatgatacccaaagtttggggtcgctctttaatgggctggaagactcaggcaatggttgcgcgtcagtaccgatctccatcgcgccagaggagttgtga

SEQ ID NO: 397504 - DNA, 333 bp, Salmonella enterica
atgttaggttcattcaccgcgacgcggaatgaaatggagaactacacctggaaagaggggaaattgcataaaaatggttccgattctgtggactatggttctttgatgtttggaccaacatatcgttttaatgactatgtgagcctgtacggcaatgctggtatagcgacgatgaaatttaataaacactcaaaagaagagtcctttgcctacggcgctggcgtaatatttaatccggttaagagtatatctatcgatgcatcatgggaagcaagccgtttcttcgctgttgataccaatacatttggtgttagcgtaggttatcgcttctga

SEQ ID NO: 397505 - DNA, 240 bp, Salmonella enterica
atgatttcggaattcgatgttataaaaaagagagttattgagctgaatgagcaggcccgctatgatcctctagccgcctcaacattgaataaaataattgaaggctatacccggggtgaagaagcacgcttatacaattcagcgatcgagaaagttgatgcgctcgcaaacctattgaatcatgaaaaaaaaccggaaaccactattaaaagaaaaaataaatatagaaaaatagtatga

SEQ ID NO: 397506 - DNA, 243 bp, Salmonella enterica
atgaaaaaactactatcagcaatcgcagtgttatcagtaatctttgtttctgggtgcgctggcattctcgaaaagcagaagccgatttgcaccgctcaggcaatggttggcggtcaggacactaccgtgcagatttacggagtgcgtaaagtcgccaatcagacgcaataccgcgctggctatccatttaactggcaatgggtagcggttaataacttcaagacgacaacttgtgggaaatga

SEQ ID NO: 397507 - DNA, 654 bp, Salmonella enterica
atggcaacatacggtgcgctacttacaactcctgacggagttcagttcgttactccgaacactacccccatcgcacttgagaaaaaactgacagcaacaggaaatggtatcgctacaataacaacgacatttaatactgaagatgttgttatgcctttctgttgcactaccggagcggaggcatatttcacttataccataagcgggaatacaatcagtgttcaggcaaggcaaacggtaggacagtctcagtcacttacgcttcatctttatctgttcacaacaaaagcacaggtgcctcctgcgtggggaatggctatctgggataaaaacgggaaatgcattctaaccaatgaaacaaaaatacttacagatataacgacaggggggatagttggagaggctaactctggggttaatcttgatattataaccacaggtaaaaaagccatagcaccacaggctgctggttttatggtggcagtatcttcaggtggagcattgcagtcaccgattgggaatacgtgttattttaacggagcatcctctcgcatgagaacaatgctggccgaaacaccaccaaccggatggaacaggcaggtaattgattttaaaacttctgtaaaatatatcgatgcctcttattacgattaa

SEQ ID NO: 397508 - DNA, 312 bp, Salmonella enterica
atggcgtggggtgttcagacatgggatgacaatggcgtccctaataactatgggatcaagcctacaatggtactttcccgtgtgaatgtgtctaacgggcaggtatctgggtcgtggtcttttaccattgagtccggataccagttacgttatttgcaatgtccgtttcaatcagttaactcagcgagcaggagaaaaattaatttctctggcggaaccgcatcattatccagtgctgccagttcagactatacggaaaataccgaacctgctgttgcggggatgattattttttatcaggagaaaatataa

SEQ ID NO: 397509 - DNA, 387 bp, Salmonella enterica
atggattatgttgaagccataaagccctacattggttacttactcagcattgcaaccttcctgcttggtcgatggtggggtaaacgtgacgcctaccgaaacgagcgcaacaaagccgccgaaccagtacatatcaacgttttgtcgcatattgagaaaatttcacagcggatgaacgtcagaatacccgtcacccaaaagcagattgatatcctctgctggcattcatcaactgctgatgcagaaaaaatccgcaatgcatggcgagagtacaaagatgttgagtctcaggctggtgatgaatatcagtccaaccctgagtttactgattatgaccatttcgttgacgccgccaggaaggtcgccgatcttgccgggaaacggtga

SEQ ID NO: 397510 - DNA, 1782 bp, Salmonella enterica
atgccatctcagcaagggctgaaaaggttttgcgcccttcctccgcgccagttcggccaatcaattgcgagtgggacggttagggcgcaggaatttaactcaatagtcgagcaaatgccagaactagcacggcaaatcgctgctggtatgggtatttcgatggatgagcttagaagattaatgctggatggtaaattatcagcagaggattctctaaacgctattatcaggcagacaaacagggttaacgaccaattcaacaaattacctcgttccgttgagcaagccacaaacagcatgtcgatatcgtttcaaatgttggttggtgagattaatgatacgactaacgccagcactacaatggtatctgtcattgattcaataaccgcgtcgatagaaagactatcggggaaggttccaaatgccactcagcaaattgcagaacttagatcagaagctgagatgtatgcgcggagggccagaacctggggatggcttgggtttggtgagtggcaaaaagaaaatgaagaaaaatcagcaaaattaaccgctgaagcttgggaaaaatcatccagaacaggttgggaagctgcgcaaaaagtagcaaaaaatagcaagccaattgagattaaaacggaattaacagaagacaaaactgggggaaaacaaaagacaggagataaagcagattctgcaacgccagctcttgaacgcctgaacactggttacgccgatggctcgctagaattagcgaaatacgatgctgttgttgcgcttggtaacaaagcatcagcagagcagatcgccaaagctgaacagcaagcggaatccatctggaaaatacagcaggcaaccaaatcagcagcagaagaggaaaagaagcgcacgcaggcagggcaaaacttcacaaatctacatggacaggcttcaccagtcgctgcggttgataatgcttttgctcagcagatggcacagcttgatgagtacgcgcgcctttacccacaaaggattgctgaggctgaagctgttcgggccggaattgaagaacaataccgtaagaaacgcatggcggcaatgtgggaggaatggcagcagcaaagcgagattaatagcatgcttggcgcggctgttgattcccttcaaggtggcgctaccaatgcgataactggtctcatcaatggtacccaaagcctgcaggaatcattcgctaacatcggcactaccatcctcaacagcgtggttggcagtcttgtacagatgggtcttgagtgggttaaaagtgcggtaatggctcagtctgccaacgctaccgcagctacaagcgcagcagcgaccggggcgagtattacggcttccatggctccagcagcggcagctacaaacatcgctacaatggggcaagcgtcaacaatcggcatggccgctatggcgtcggctgttcctgcaatggttggactatttggaggccgtcgctatggcggcacagtatcagccggaaacgcctaccgcatcaacgaagatggacgctctgaaatcttccagacggcaggtgggcagcagatgttcattccgaaccagtcagggaaggtgatatcggctgataaggcgggaggtggcggtggggtagtgcagcacatcactttcgaaatcaacaccaccggcggcatagacgatgcgaccaaggaatggattgttaaatcgatgaagcaggttgctctgttccagatcaatgaccaggccaatcggccaaatggtatgatacagccgaggacaaaacggtaa

SEQ ID NO: 397511 - DNA, 492 bp, Salmonella enterica
atgaagggtatatacagtcatgaatttgcgctggtcgacctgacgataatgccggataatcagcttttgcagcatcggcggatagcgatgttagagctcctgcaaaaacatattcgtcaacgcgatttaagcgaactgctcgacccccttatcacgcttttaacgcaggatcatttgacggacacgcagctcagtgggctggtcaactatatgttgaaagcaggaaacgccgcagaacccggggcgctgattcgtcaactggcgcagggcgcgccgcagtataaggagcaactgatgacaatagcggaatggctggaagaaaaaggctggacggaagggttgcaaaaagggcttgagcaagggttagcacaaggccgtgaggccgaagcgcgcgctattgcccgcaaaatgcttgccaacgggctggaacccgggctcatcgccagcgtcaccggcattacgccggaagagctttccacgctttcgcattag

SEQ ID NO: 397512 - DNA, 309 bp, Salmonella enterica
atgtttttggcttttacgttgcggatgacgcgtgctacgctggaactacataatcaaccacagcacctttttctgcgtaatatcaatgtgatgcaaacgtcagcgattggcccggcgttaaaaatgcacttcgatttgcgtaaagatgtccgtggtcaatttatggcccgccaggacacgctgctttccctcgctaatgttcatgccatcaatgaaaacgggcagagttccgtggacatcgacaggattaatcaccaaaccgtgaatgtcgaagcggtgaattttccgctgccgaagcggggagggtaa

SEQ ID NO: 397513 - DNA, 1419 bp, Salmonella enterica
atgagcaaagtaaaacaagccgatatcgaccggctgattgaacgggtcggcgggcgcgacaatatcgccacggtgagccactgcattactcgcctgcgctttgtgctccaccagccagcaaacgccaggccaaaagagatcgaacaattgccgatggttaaaggctgtttcaccaacgccgggcagtttcaggtggtgatcggcatcgacgttggcgattactataaagcgctgctggacaccaccggcaaagcgtatgctgatagagaacaggcaaaaaaagccgctcgccagaacatgaagtggcatgagcagttaatttcccacttcgcggagatcttctttccgctactaccggcgttgatcagcggcggtttgatcttaggctttcgtaacgtgatcggcgatgtgccgatgagcaacggccaaacgctggcgcagatgcatccgacgttaaaaacgctttatgattttttatggttgatcggcgaagcgatcttcttctatctgccggtggggatctgctggtcggcggtgaaaaaaatgggcggtacgccgattctcggtatcgtcctcggcgtgacgttggtctcgccgcagttgatgaatgcgtatctgctgggccagcaaacgccggacgtctggaacttcggcttatttagcattgagaaggtgggctaccaggcgcaggttattccggcgctactggcagggctggcgcttgggtttattgaaacgcggttgaaacgcatcgtgccggattatctctacctggtcgtcgtcccggtttgttcattgatactggccgtctttctcgcccacacctttattggcccctttggtcgtatgatcggcgacggcgtggcctttgcggtacgttatctgatgaccggcagtttcgccccgataggcgcggcgctgttcggcttcctgtatgccccgttagtcatcaccggcgtccaccagacaacactcgctatcgatatgcagatggtccagagcatgggcggtacgccagtctggccgctaattgcgctgtcgaatatcgcgcaggcctccgccgtagtgggcatcatcatctccagccgtaaacacaatgaacgcgagatctccgttcctgccgccatttccgcttacctgggggtaaccgaaccggcgatgtacggtatcaacctgaagtatcgttttccgatgctgtgcgcgatgatcggctctggtctggcgggactgctctgcggtctgaacggcgtcatcgccaacggtatcggcgtgggcggcctgccgggcattctgtctataccgccgcgctactggcaggtgtacggcatggcgatggttatcgcgatcgttatcccgatgattctgactacctttatctatcagcgtaagcatcgtcagggcacattacaaattgtctaa

SEQ ID NO: 397514 - DNA, 372 bp, Salmonella enterica
atgtcagatgcaaaatcaatctcgacgcatgattcgcaaaactcacaaaatcaaactgtgctgttagatccaacacaatttgatgccatcgttaccgccatgctgccagctctgcagacaatgattcgctccgctatgtcagacacaatgacagtgaaagactttgctgccactcgcggtgtaagcgagcgtctggtctggcaatggctcgatgagggcatccttttaaaagctccgaccaaagacttttccaacaaagaggaagccgctaaacgaagccgcaccctcgtaaacgtaaaagcatggcgtgacaagctgactcaacaagcgattgattgttgctacatcgaccagcgcaccgctcttaactga

SEQ ID NO: 397515 - DNA, 234 bp, Salmonella enterica
atgagtcgagttgtttatttttcaacaccgagaaatgcaggaaaaaacacgctggatgaattgtttaaagaagccaaaaaagaagagcgtaaagaccgcgcgctcgctgtttccatccgccttgaggcgctggctatccatatcaccaaagagggtatgagcggcaccgaagccgccgaactgctgcgccgtgaagccacccgctttgagaacgaatcacaggagctgcactaa

SEQ ID NO: 397516 - DNA, 228 bp, Salmonella enterica
atggccgacgcaatggatttagcacaacagcgcgaacaggaagaccgcgagcgccacatcagcaacgcgcgcagccgtcgccatgaggtttctgcatttatctgtgaggaatgcgatgcacctatcccggaagcgcgccgccgagccataccgggcgtgcagtgctgcgttacctgtcaggaaatcttagaactgaaaagtaaacattataacggaggtgctttatga

SEQ ID NO: 397517 - DNA, 273 bp, Salmonella enterica
atgagtattcgtatagaaataggtgataaatggtttattacaagtgaccagtatcaattcattttgaatgaaaagaaagttgttaaatcggggaaaaaagctggcgaggaatggctcgacactgtcggttattacccgaaaattaatcagcttatttccggactgattcatcaccatattcagcagtcatcaattaccactcttgactcaatggccgctgaaatcgagcgtatcggagaaatgtgcgcctcctcaatcaaggcggcggcatga

SEQ ID NO: 397518 - DNA, 282 bp, Salmonella enterica
atgagaaaaacacatcaactaaaaattcggcctgagttttttcaggctgtcctcaatggaacgaaaaaagccgaatttcgtcttgctgaccgtgcttttgctgtaggggatttactttgcttaaacgagtatggccactgcgaatatgatccgcaaaaggtcggttttaccggcgcttttgtctacgtgctggtaactcatgtaactgaccttaacgagtgggctcccggatatgtgatgttaagcatacagcgcaggcaaatgggggaactatgcgggtaa

SEQ ID NO: 397519 - DNA, 447 bp, Salmonella enterica
atggttcgccggagccgccgcactcgccttatccattgccgccttcaccgcgctgggggtcgccgcttctgtggtactggtgctattcgtcgcgctattaagcttcacaatccctttttgcgtcagggtgccgtccgggacgtcggttatctgggaccaggcgtgagtgtgatttgccgcggctttgctatttgccagttcgtatgcttccctcactgcgcttggcgtggccgcttcgctggtgctgctgctatttgtcgccgcattaagcttcacaatccctttttgcagcagcgtaccgtccggaacgtcggtaatctggttccaggtatgggtatgattacgcgcttgcgccatcgccgcttttaccgccttcggtgtggcggctttggtctcgtcatcgctgtcggtagcgttactgagctgggtaaagcctttctgcgttag

SEQ ID NO: 397520 - DNA, 1041 bp, Salmonella enterica
  misc_feature (1028)..(1037): n is a, c, g, or t
atggcaggaaataaacccttcaacaaaccacagactgatgcccgcgaccgcgatccgcaggttgccgggataaaagtgccgccgcactcgattgaagcggaacagtcggtgttgggcggtttaatgctggataacgagcgctgggacgatgtggccgagcgcgtggtggcggaagatttttacacccgcccgcatcgtcatatctttacggagatggggcgcttgcaggaaagcggcagtcctatcgacctgattacgcttgcggaatcgctggagcggcagggccaactggacagcgtcggcggcttcgcctatctggcggagttgtctaaaaacacgccaagcgcggcgaatatcagcgcttatgcggatattgtgcgcgaacgtgccgtggtccgcgatatgatcgcggtggcgcatgaaattgcggatgccggttacgatccacaggggcgcaatagcgacgaactgctggatctggcggagtcgcgcgtcttccagatcgcggaaaaccgcgccaacaaagacgaaggtccgaaaagcatcgaccaaattctcgacgctaccgtggcgcgtattgagcagttattccagcaaccgcacgatggcgttacaggcgtggataccggctatcaggatctcaataaaaagacggcagggttacagcgttcagatttgattatcgtcgcagcgcgtccctcaatgggtaaaaccacttttgcgatgaacctctgcgaaaatgcggcgatgttgcaggataaaccggtacttatctttagtctggagatgcccggcgaacagatcatgatgcgtatgctggcctcgctgtcccgcgtcgatcagacacgtattcgtaccggtcaacttgatgatgaagactgggcgcgaatctccggcacgatgggcatcctgctggagaaacgcaatatgtatattgacgactcctcgggtcttacgccgacagaagtccgttcgcgcgcgcggcgtatcttccgcgaacatggcgggttaagtctgattatgatcgnnnnnnnnnnatga

SEQ ID NO: 397521 - DNA, 396 bp, Salmonella enterica
atgatcgactacctgcaattaatgcgcgtgccgtcgctttctgataaccgtactctggaaatcgccgaaatttctcgctcgttgaaagcgctggcgaaggaacttcaggtgccagttgtggcgctatcgcagcttaaccgctctctggaacaacgcgcggataaacgcccggtcaactccgacctgcgtgaatccggctctattgaacaggatgccgacttaattatgtttatctaccgtgatgaggtttatcacgagaacagcgacttaaaaggcattgctgaaattattattggtaagcaacgtaacggtcctatcggaacggttcgtctgacgttcaacggtcagtggtcgcgcttcgataactatgcgggaccgcaatacgatgatgagtaa

SEQ ID NO: 397522 - DNA, 501 bp, Salmonella enterica
atggagccggccagcatcaggccaatgatcaatgcgcgcggaaaatcacgttcaggatttttaaattcagacgacaaatgcgtaaaagcctcaattcccacaaatccccagaacatgatcgccagggcggtacacagtcgggaaaaggtgagttcgtttacggctggaaaggtgatatccgcaggtttaatcgcgcctttccacagaatggcggcaataagcgcgataattaatccagcgataatggcttgcaggttggcgctggagctggcgccgcgcgatcccataaaccatagtaaacctatagtacccagttccccaaataagagctgttcgcttcgccagccaaacagcgcctggccgaagcccaccgcaatatgcaaggctgcgggaaaactaacaggaatgactgataaaaacagccaactgatcacccgttgcagacgcgggccaaatgccatcccgacaaaatgcgctacgccgccagcgtgtggaaaatga

SEQ ID NO: 397523 - DNA, 189 bp, Salmonella enterica
atgaaaataacattactggtgactttactttttggcctggtctttttaacgaccgtcggcgctgccgagaaaccgttaacgccgcaacagcagcgcatgactacctgtaatcagcaggcgacggaacaatccttgaaaggcgatgaccgtagcaagtttatgagcgcctgcctgaaaaaagcggcgtag

SEQ ID NO: 397524 - DNA, 315 bp, Salmonella enterica
  misc_feature (167)..(176): n is a, c, g, or t
atgaatccacaggcaaccacaactgatgaattaacctttaccaggccgcaaggcgagctggaaaagcaagtcctgaccgctgaggcagtcgagtttttgacggaattagtcacacgttttacgccaaaacgcaataaactcctggctgcacgtatccagcaacagcnnnnnnnnnnattgataacggtaagttgcctgattttatttcggaaaccacttccattagagaaagtaattggcagattcgcggtattccggaggatttacaggatcgccgggtggaaattaccgggccagttgaacgtaaaatggtga

SEQ ID NO: 397525 - DNA, 249 bp, Salmonella enterica
atgaacaagaaaactaaacatacgttcacccctgaattcaggctggaatgtgcacagctggttgttgataagggctactcatatcgacaggccagtgaggcgatgaatgtcggttctaccacgcttgagagctgggttcgacagctcaggcggaagcgtcagggtatgacgccctctgcaactcccattgctgcagagcagcaacgcattcgcgaactggaaaaacaggttcgccgcctggaggaataa

SEQ ID NO: 397526 - DNA, 1473 bp, Salmonella enterica
atgacgactgctgacgattccatccgcgccagcatgtgcgaggctgacgggctttattttgcgcgttacttcttcaagcagcgcaccggtggcaagatgattgttgcgcctcaccacaaagtgattcagcaaacactggatcgcgtcattgatggtgagatacaacgcttaatcatcaacgtcccccctggctacacaaaaacagaactggcaaccatcaacatgatggggcgagggctggcactcaacaaccgcgctcgctttatgcacctgtcctattcgcacaacctggctctgctgaactcctcgaccgcgcgcggcatgattaagtcgcaggcgtaccagtctatgtggcctatggcattgcgtgatgacgcagacagcaaggctatgtggtggactgaacacggcggcggtgtctatgcgtcgtcagctgccggacaggttaccggattccgtgccgggcatatggagccaggctggcagggtgcgctgatcatcgatgacccggtcaagccggatgacgcttattccgatactgtgcgaaacggcgttaacaaccgctttaacgagacaatcaaatcacgactggcgatcgagacgacaccgatgattgtcatcatgcagcgcattcactaccacgacctgagcggctatctgctgcgtggcgggagtggagagaaatggcatcacctgaatctgccggtgattatcgacaatagtcagccatacgctgcgcagtatcctgaaaatacccacgctataccaattgaccatggcctgcctgatggctggctatggccgtttaaacataacgaatcacatcgtgtatcgctgttctcgcaccgtcgcaccgccgaagctcagtatatgcagaagcctcgcaggtttaatgcagaaggagccctgtggacagaagtgatgatcagcgcagcgcgagaactgcaaattcatcatgataaggttcgcaccgtcgtagcgattgacccgcaggcaacgaatagcgatgagagcgatgaaacgggaattgttgctgcaagctcatatggtggcggcgataaaaagcagttctctgtggatggagattacagcggcaaatattcgcccgcagggtgggccaagaaagctatatcggcctatgagcagcacgaagctgacgcgatagtcattgagacgaaccagggcggagacatggcggaggagacactccgcaacgccgggttcaaaggtcgcatcatccgtgtccatgccagcaaaggtaaatatgcgcgagctgaaccaatctcagccttatacgaacaaggccgcgtggcaaaccatggcaatctctacgtattggagagccagcttatggaatatatcccggccactgcgaagaaatcacctgaccgcctcgatgcgatggtttacgcactgactgaactgaatggatcgcaacctgtggggatgatgattccgaaacgccttcgctaa

SEQ ID NO: 397527 - DNA, 270 bp, Salmonella enterica; identical to SEQ ID NO: 392703

SEQ ID NO: 397528 - DNA, 1356 bp, Salmonella enterica
atgagtaagcgcaagcggccacaaccgccccactctgtcgaggcggaacaatcagtactcggcgggctgatgctggataacgatcgctgggatgacgttaccacgcagatttccgcgcaggacttcttcatctctgcgcaccagacgatttattcccatatgcaggccctggtcgaacagggaaaccccatcgatctgatcacgctaagtgaatcgctggaacagcaggagcagctcgaacaggtgggcggtttcgcctacttggcagtactgtccaaaaacacgcccagcgccgccaacatcattccctacgcgcaatacattgccagctacggcgagctgcgccagcttctgttattaggcaatgaattgagcgatatggcaggccagccgcgcagcaatgttgccgaagtactgaactttgccgaacaaaagctgtttgccattgcgcagtcacatcaggagggcggcctgaccgacatcaacgcttgctttgacaacgtgctggcaggcatcgctcagcgctatgaggccgaacgcggtagcctcagcggtacgccatccgggctggaacagctcgacgccctgacctgcggcttacagcctgccgacctgattatcgccgccgcacgcccttccgtaggtaaaaccgcttttgccctgacgctgtgcgtgaatgcgctaatgctacgccccatgcagccagtacaaatctacagcatggaaatgtcggcagagcagctactgctgcggctggtttctctgattggccatgtctcgcagacccggctacgtagcggcgatctgagtgatgacgactggcagcagattggcctcagcgccagtatcctgatgaacgagtggaaagatcgtctgctgctcgacgattccggaatcctcaccccatccctgctacgcagtcgggccagacgatcgctgcgccagtacgggcttccctcgctgatcgtggttgattacctgcaactgatgcgcagcggcggagcggagaatcgcaatcaggagatctcgacgatctcccgatcgctgaaagcgctggcgaaggaactcaactgcccggtactggcgctgtcgcagcttaaccgggcgctggaatcgcgccttaataaacgcccctgcaatgccgatctgcgcgattccggctctatcgagcaggatgccgacgtgatcttattcctctatcgcgacgaactgtacgatcccaacacgctggatcggggtatcgctgaagttattgtcagcaaacagcgcaacggcccgataggcacggtgcgaacccgatttatcagcgaccaaacccgcttcgaatcgctcagccagcaaggagtcgggtcatga

SEQ ID NO: 397529 - DNA, 303 bp, Salmonella enterica
atgagcgatactgacggtgttctgcgacgctggaaggatatttttacctatgcctataaccatcaggaaaacggtttatatgcgatggcccttcatccgcagataatcggtcatgggcatcatatgatgatgttgtcacgtttgattgaacatattaaagggcatgatggcgtatggtttgcaacctgcgaagagatagcccgtgtatgggtggatgacgaagaggatcgacaaaaaatgctccgtcctgatgttcgtggcgttgcgccgattccggatgattatggctggccaggcaaatga

SEQ ID NO: 397530 - DNA, 258 bp, Salmonella enterica; identical to SEQ ID NO: 392677

SEQ ID NO: 397531 - DNA, 1089 bp, Salmonella enterica
atggctacaagcaaactgattcaaggcgatacgattactgaaactacccatgcagcgaatggttttgaccctgcaacaagcgatgataaaataagctatacttccgctcgtgttgcgaagccggtatacaataaatataaaaattccacgactaaaccgaaggtattcggttattacaccgactggtcgcagtatgacagccgtctgcaaggcaatatgtcccaacctggccgtggttatgatttaaccaacgtttcaccgaccgcttatgacaagctgatttttggctttgttggcatcaccggtttcagaaaaattgatacagaagaccgcgacgtcgtagcagaagcggcagcacagtgcggcaaagtaaaatatgagccgaccttcctcgatccgtggggcgatttccagtcttatatcaacctgggttttgaaaccagcggctgggacgttgatccgaaaaccgtgacccaggctaacgccaaaggtctgctgggcgcgctgcgtgatatgcaggcaaaagcgaaggccgcaggtcatacgctggcgctctccatgagtatcggcggctggagcatgagtaacggtttccacgaaaccgccgcttctgactcttctcgtaaaatctttgcgaaaggcgtggtgaaactgttcaaacagttcccgatgttcagcgaagtggatattgactgggaatatccgaacaatgaaggggcgggcaacccgtttggtccggaagatggcgctaactacgcgctgctgattgccgaactacgtaaacagctggactccgctggtctgagcaatgtgaagatctctattgccgcttctgctgtcactaccatttttgattatgcgaaagtaaaagatctgatggctgccggcctgtatggcatcaacctgatgacctatgacttcttcggtacgccgtgggcggaaacgctgggccaccacaccaaccgcaaagcgctggaagagggcggctgggctgtcgaaactatcgttgatcacctgctggcggaaggtttctctgctgaccgtatcaacatcggttatgccgctatacccgtaacgctcgtcaggtag

SEQ ID NO: 397532 - DNA, 276 bp, Salmonella enterica
atggcctgtagcgcgaatctgtttccgcagattggcacgcttcgtgagcacaataatgttttttatgttcagggatattccggctttggcgtcacgccttcccatattgtatgcaaaattctggccgaaggaataaatggcggttccgagcggtatcgtctgatgagtagcattccccacgcgacaatttatggtcgcgacagtctacgtctattactggtcagtgctggaaaactgatacatcaaacagccggtttctggaaaggccggaattaa

SEQ ID NO: 397533 - DNA, 6234 bp, Salmonella enterica
gtggaagatattgctggtaatactgcctcgtcatcagcgtataatttccagatcgtaacgcaaacgcaaaagccaacaatagagttggtcaacgatacgggggtggataatacagaccatattattaatgaaaagagtcctgcactgacaggtaccgcggcaccctattcaactgttaaactatatattgatggcgcactgttcgctgaggtcagaacaaataaagatggcgtatgggagtataccctgaaacccgatcaaggtttggttgatggcgatcataaaataaccgcttcagttgaagatatcgctggcaacattgcccattcggatcctttcttaattagcgtcgataccgctatttcaataccgatagtttcactgagcccggattcagattcgggaatttcagatgataatttaacgaatatcgttaaacctaccttgcacctaaaagatattgatccggacattatcagtgttcaggtctgggatgccgcgtctgacacgcagatcggtgttgccacgcaacaacctgatggttcatgggcctatacctttacttcagatttaacggaaggcttgcatcaggtttatgtcaagattgaggatatcgcgggtaataaagcgaacagcgcggtactcgattttactatagataccacaatatcaacgcccgtgatttccctgctttctaaggatgatactggggttacaggcgataacctgaccaatatcaataagccaggttttgctatttccggtgttgatgtcgatgcgcatcgggtcgtcgtacaggtgatgcacaatggcgtgagcgaagagatcgaactttcccaccacaacggtagttggttatttacgccagggaatacatgggcggatggcagctacacgttaacggtgaaagtagaagataaggcaggaaatatcagccactcagcgccgctgacggtcgttatcgatacccaaatcgccattgatggggtggaactggtcaacgatagcggcgtgaagggcgacaatatgaccaacgacgaccgtccccactttcgtgtgacggtacccacggatgtaaatgaagtccgtctgagcattgacggtggtaatttgtgggttaaggcaaccccgggcgtggcaggaagctgggagtatatctggccgacagacctggcagatggtcaatacacgctaacggtggaagcgactgataacgcaggcaatacagtgacgaagaccatcgatttcgcggtggataccacgctgtcagtgccggtcatcgtcctgaatagcgcggacgataccggtgtccagggcgataacatgacgaatcgcccccagccgacatttaacctgcagcatattgatgatgacgtcgttcgcgttacggtcagcgtggagcatggcggcgtcaccactacctttgacgcggctaaaggcgcaagcggatggacctttacgccgccagcatcctgggcggatggggattataccctgagcgtgtcagtcgaagacgcggcagggaacaccagccattccgcgccgctgacggtgagggtggacacgcaaatcgcgatcgacagtattgaactggttaacgacagcggtattcccaatgacaatctgaccaacaacgtgcgtccgcattttcgagtgacggtaccggcggatgtcaacgaggtacgcctgagcattgacgacggcaagacatgggtaacggcggcgcagaatacagcaggcgcctgggaatatatctggccggatgatgtgaccgatggttcccataccgtgacggtggaagcaaccgatgaggcgggaaataagacaacacagacactcgatttcaccatcgataccactctgtctgtaccgaccctctcgctggacagcgcggatgacagcggcatcgcgggcgataatatcaccaacgttaaaacgccgggctttaccctcgacaatattgatgccgatgtcagccgggtgatggtggaggtaatgcataatggcattaaacaggaggtgcaactggttcagaccggcggacagtggcgctttgcgccgaccagcgactgggtggacggcgactatatcctgacggtgaaggtagaagatagggccggaaatgtgaagcagtccgcgccgttgacggtgacagtggacacgcacatcgccattgaccgtattgaactggttaacgacagcggtatccccaacgataatctgaccaatgaagcgcgcccgcactttcgggtgacagtaccggcggatgtcaacggtgtaagactgagcattgatggcggcaaaacgtggtttgacgccacgccgagtgcggcacagggggtctgggattatacctggctgacgaatgtggctaacggccctcacaccctggtggtggaagcgaccgatgcggcgggaaacaaaacgacgcagaaactggatttcaccattgataccacgttgtcagaaccgactattacgctggacagtgcggatgatagcgccgctggcgataacatcaccaacgttaagacgccaggctttaccctcggtaatatcgacgccgacgtgacccgcgtagtggtgacggtggagcatgatggtaagaaccaacagatagagctgattaagaacggcggcgtatggcgctttacgccgggcgctgcctggaccgatggcgactatacgctgacggtaaaggtggaagatgaggcgggtaatataaattattctgcgccgctgacggttactatcgatacgcaaacgtctattgatcgcatcgaacttattaatgacacgggtattgtcggggataacctgactaatgaagcacgcccacagttccatattactgtaccgacggacgtaaactctgtgcaactgagtattgatggcggcaccaactgggttaacgccacgctgacgtctggcggcgtttgggagtatacctggccgacagctctggttgaaaatacgtataccctgacagtgaaagcaaccgatgttgcaggcaacacggcgacggaaacgctcagttttaccattgataccacattgtcgacaccgaccatcacgctggacagcgcagatgatagcggcaccgtcaacgataatatgactaacgttgaaacgcctggttttattatcggcggtattgatcctgatgtgactcaggtcgtcgtgcaggtgatgcgtgatggtcacagcgaggaagtgacactgacgcagactaacgggcagtggcgttttgtaccggacagcgcatggaccgatggcgattatacgttgacggtaacggtgaaagacgaggcggggaatattcgccactcagcgccgttgacggtcaccatcgatacccaaatcgccatcgacagtattgaactggttaatgacagtggtatccccaatgacaatctgaccaacaatgtgcgtccgcagttccaggtgacggtaccgacagatgtcaacgaggtgcgcctgagcattgacggcggcaagacgtggtttaacgccacgccgggcgcgacgccgggcgtctgggattacacctggctgacagatgtggctaacggttctcacactctgacggtggaagcgaccgacgcggcgggaaataaggcaacacagaaactggagttcaccattgataccatgctgtcagagccgactatcgctctggacagcacggacgacagcggaacaaaaggcgataacctgaccaacgtgaataagccgacgtttatactgggcaatattgacgctgacgcacggtatgtcacggttgaggtacagcatggcggcactaaagagacgctgacggcgaccaaaggcgcgaccggcatctggagcgttataccaaccggcacgtgggcagatggcagttatacgctgacggtgaaggtggaggatgaagcgggtaacgtaaaacactccgcgccgctgacggtcacggttgatacccatatcaccattgataatattgaactggttaatgataacggtattcccggcgacaatctgaccaatgatgttcgtccacagttccgcgtgacggtgccaggggatgtcaacgaggtacgtctgagcattaacggtggtacgacatgggttaacgccacgcagggcgctccagggcgttgggattatacctggccggacgatgtgactgacgggctatacaccttgacggtagaagcgaccgatgcggcgggaaataagacgacgcagacactcaattttaccatcgatacccagctgtcaataccaaccatcatgatggatcgtggggatgatacgggtgcgcctggcgatcatattacgagtgtcaaaacgccgggctttaccattggcaatattgactccgatgcgcactcggtcattttgcggatcacgcagggcggtaatagccaggaagtgaaactgacccaggtcggaggtcagtggcgctttacgccagatgctgactgggcggatggtagctatacgctgacggtagaggtaacggataacgcaggaaatgttcgtcagtccacgcctctggtagtgacggtggatacgcaaaccagcattaccaatattaagttggtcaatgacaatggcgagcctgatgacaatctgactaacgccacccgtccgcagtttgagatcacagtgccggtagatgtgaattccgtgcaactgagcattgatgggggcgcaaactgggtgagtgcgacgcaaggcgtcaaaggcgtatggggctacacctggccgacagagttgggcgatgggaaacataccctgaccgtgatggttaccgacgcggcaggcaatacggcgacgcaaacactcgactttcgcatcgacacccagttgtcgacgccgaccattgcgctggacagcgcggatgataccggtacgcctggcgatgatatgaccaatcgcacccggccgacctttattctgcagaatatcgatccggatgttatcaacgttacagtaagcgtcacgcataagggaacgacaacctcgtttaccgcgacacagggggctggggggtggagctttacaccgccagcgccgtggggcgacggtgattatacgctgacggtgacagtggaagatcgggcgggaaatacgcgtccgtctacgccgctgacggtgacagtggatacgcaaatagccattaatcatattgaattagtcaacgatagcggcgtccctggcgataatatgacaaaacatgtgcgtccgcagttccagatctcggtaccggaagatgtggaaaaggtcttgctgagtattgatggcggcacaacctggtttagtgcgacaaagagtccgacgcagggcatctgggattacacctggccgacagatatgccagagggacagcataccctgacagtagaggcaactgatgctgcgggtaatacgacgagacaatcgcttaatttttctatagacattacactttcgacgccaaccattgagctagcgcccgatcaggataccggccagattaagaacgataatctgaccagcgtcactcagccgttatttgtgttgggccatatcgataaagatgttcaacatgttgtattgaatattgagcataacggtacgtttaaaacagtggtgctcaccgagtcagccgacggctggcgctatcgaccggatgccgccttgggtgacggtagctataaattaaccgtgacggtaacggatgtggccggtaatcagcaaacatccgcacctttaacggtgacgatagacggtactttggctacgccgaccattgaactggcggctggcgaagatagcggtactgtcggcgatcgcctcactaatcatgatcggccagtattcgatatacatcagattgacgctgacgttacacgtgtgatggtcaaagtaacctacaatggtaaaacgcacgaggaagcggcggtattaaccaatggtcaatggagttttagcccttctgcgagctgggctgatggcgcttaccagctagtcgtcgtggtagaagatctggcggggaacgtaaaagaatcggcacccttagaggtgcgtattgatacgacaacgaccattgataatatcgtgttgcttactgatactggcgtacaggatgatcaattaacgaatgtttctgaaccgtcattcagaattgacgttcccgctgatgttgttcaggtacgcgtaaccctggatggtggcacggaaaaatgccgacgggcagtggatttttga

SEQ ID NO: 397534 - DNA, 282 bp, Salmonella enterica
atgcgcagccagccccgtcactttaccttcatgccggtttgcggtaaatcccagcaagtgagttattctgccgtaaaaatatcccaggctgtcaattgtggtttcacgatgcaaaacagactcattaccatcaacaatatggcgaacagtgaaggaaagaaaatctccccggccatcgcaggtgacaaccagcgcatcattccatggagaacacagccaggctccccaggcatgagtatcatggtgatcgatatacctgactcgtgtttccagattgtttga

SEQ ID NO: 397535 - DNA, 258 bp, Salmonella enterica
atgagcattacaaccattctcaacaccggactagccttgatgggatggttgttcatcatgttcaaaacagggcagtggtttatgtcagtttttctaaagcaatgggataaacgaagaaagcaatctcgtcggcaaaaagcaataaacgaattttacgatgcgtttgacctgtccagcatagaacccggaacaacggttcgcctggcgactaaaggcgatctgacaatcatgatgtttcgtcaggaggccgccaaatga

SEQ ID NO: 397536 - DNA, 360 bp, Salmonella enterica
atgagcaacatcgacaaactcaatgatcatgaactggttgatctgaaaaacgctatcgaaagagagcttaaacgacgcgctgatgggccaaaagtcaccacgtattatgtcgtctcctgcatcactgatgctcagaattttactgatttggactgcgccttacgttgcttaaaaagtgtcaccgaagaccttatggagtgggtaacggaatccccagaaaaccgggattacgtcaatcgatgcacaggtattgttggggcaaaactccaagtggaggagatgaatctcgatcacttcaacatgtgcgttgcagaaaaatatttcgacgatatttggtatccaccggagactgcccaatga

SEQ ID NO: 397537 - DNA, 558 bp, Salmonella enterica; identical to SEQ ID NO: 392637

SEQ ID NO: 397538 - DNA, 207 bp, Salmonella enterica
atggcgatgaaatactcatattttcagcacaccgaatgtaccacgcagcaggccgacgaactggtggctcggtatcgggcgcgcggtgtcaaaactgaacgtagcctcaatccggattacaccacctggacagttagcgcgtttctccctacctccagcaaaccggccagaccggataaccgctggcgtaaccgggtctgggggtga

SEQ ID NO: 397539 - DNA, 378 bp, Salmonella enterica
ttgttacttgaagaggctgaacatatcgggaagaatattagtaaaaaatatcttaactcgttttccagaccgttaacttctcccgctgagtttattaacgttttaaacgatgcgactttagttcgggatgtgagatttatcttggatgctctatgtgcactggataatgcagttgagcacattcttaaatgttgtgcatacccaaatgaccgttacgaactggaaagaggtgggataagtcgaactatagcctatcgggagtactatcgcgctgaaaatgccattcttcgctccgtagtaagcgatcgtgaatatgcagagcatgctgtgaaatataatcagctctctgaatacaagaaaaaaatatttcgtaaataa

SEQ ID NO: 397540 - DNA, 1005 bp, Salmonella enterica
atgtacgcattcaaagccgaaaggccggacgctgcacgccgttatcacagtaaattcgtatctggtacaaattaccaggaatcttcaaatagacggttttcattaagcaacccaactgaaaatattttgcgaagctcaattcttgagtctggttggttaatcaataatatcactttgcgtgacgttaatgctatttcaggtaatgccattaatattggagccagcgagttacatacaggacgagttcacggtggcagattccataagatgttagcgataaatggcactgaattttttctgtccgaaacggacacatgtgcacgaatcagctatttagatatgtcacatatttatcatacaggtgctcagggcgaatttgataaatcggtcagtgcgttttttagtcaggcttatgcacttgatatgttgcgggttggttttaatggagagtcaattgccgatacgactgatccagagatgaataaaaaaggtgaagacgtaaatatcgggtggcatgcgctggcaaaaaactatcagggtggtcaacaagtcttaactactcctgtaaccctcggtgaaaccggggaatggaagaatctcgacctgcttgctaatcacctcattacagagctgattgccgaaccttatcgtgaagatccacgcttggtggttctcgtgggtgccgagattgctgctaaacagcgacttaagctcttcaacgcggctgatcgcccggctgatgtggatgctgcgcaaatggcagtcagttcggttgccggacggtttgcttttatcccgccgttcatgccgggaaaacgtcttgcggtcactacgctggataatctgcacatttatacccagtcccgaacccgatcattccgggctgagtttgatgatgagaaaagtgaatacgttaattcttatcttcgcaatgaaggctatgcgctgggggagcctgagctttatgccgctgtggatgagagcgctgtaactttctccgactga

SEQ ID NO: 397541 - DNA, 573 bp, Salmonella enterica
atgtcaggatttagatggatgttcaataaactaaattcggttataaatttcttgcgccttgccaattgctcgggctatattcgcaccgttgccgcaaaatcggcaaccgggcgtggaaacccgtgtaatctgaaggcgacaccagacgcgccacgcgtctttttttgtgtccgtgtctttgcacacctattgcttttacagcggtttctttgccgttgtagctatcgagtaatggtggctcaggcggggctgacttcggtcaggccggtatccttcagagccggtatttccacccccgtctgggctaccaccagtgggcgtggaaactccggtggtagcgttaaccgctatctgaaggagattgccgccatggcttcgatccctacattgtcacatccagaatttacctttgtttttctcgcagtgcgccgtactgactgctatgcacgcccgttacctgttcgaattgtcgcaacgtgcgaacatgctgcgcgtctgaaactcgttactgaatttgtactcagctttgctgcccgtatccctgttaaatcatacggggaggctagcgcatga

SEQ ID NO: 397542 - DNA, 240 bp, Salmonella enterica; identical to SEQ ID NO: 116631

SEQ ID NO: 397543 - DNA, 411 bp, Salmonella enterica
atgcacgctaatatcgggatcaacgcaacagaatttcgggcggcatttctgcgctcctgcattgctgacgcctatatctccctgatgctgcggattaatggggaagctgtgtatatcgaggatggcgagcgtatcgagctgacacctgagcgtgtggccatgaatattctttatcacattgaagcgccctggattaacgaattcggccaggaagaggggcatcgcctggcgtgtgacgttctggagcgaatgctgtcacccggttatatggctgaaaatattcgcctttccgcatttggtgtttctgagctacgcgaagtgtaccgggacatcgttttcggtgcgcccgatggagaagtacctcctggtttcagcattaccactgcgggagtcggggaggtactgttatga

SEQ ID NO: 397544 - DNA, 273 bp, Salmonella enterica
atgcgagtgatgaaaatttactgcccggagtgtatgtctgcggcaacggtgaggaaaacaaaccgaaagcatcccaaattatcagatgtgtactgttattgctcaaatgtagagtgtgggcacacgtttgtgatgaacgtttccttctcacacacgattagtcccagcgctttgcgcggccagggacggattaaagagctaatggatgccctgccaccggacgagcgacaaaaagcattagaactcctgttggcagccaaagagagtcactga

SEQ ID NO: 397545 - DNA, 210 bp, Salmonella enterica
atgcacccgcacttaacccgtttgatatcatcaggcaaaagacagacggtgaacatgagttatatccactgttttacgtgcctgcgacagactgtagttattctgaaggttaagccagctttcggcatcgccgccaagaacgatagccagcttaaccgccatttctggcgtgatatttactttaccgctcagaatacggctggcggttga

SEQ ID NO: 397546 - DNA, 210 bp, Salmonella enterica
atggcatttaacgttttctccggaggaagaactaaggagtctgtcgcctatgatttggctctcaatcttgccgccaaagacccggaaatcactaccccggatgcgcttattcagcgtattgctgacttgctaccagcttgtcgtgatgcagcaaataagaagtacaaagatgaatcgccaaatccttttggcatggctataaaacgataa

SEQ ID NO: 397547 - DNA, 180 bp, Salmonella enterica
atggaaaagatagtagaaaagccaggatttgagagtaacagccggataattatggccgctgatgcggcgctggcggcaacaagcgccgcttttaaagacgcgaccgatgatgaatggcttcgccagaagatgataaaggcagcgcttgaggctgcccttgcatcaattatcgttttatag

SEQ ID NO: 397548 - DNA, 399 bp, Salmonella enterica
  misc_feature (386)..(395): n is a, c, g, or t
atggctgatcaaattaccgcagaaaccctttcaccaatatctcataaccagacaccagttatcaccactgaattactcgctcgactgtatggtactgacgcgcattcaattacaaaaaatcaccgtagtaacgtcgatcgatttatcgctggaaagcacttttacaagttggaaggctcggaactaaaggcattcaagaacaaggtcactaatagtgacttagtcgcaaatcgtgcaaaacacctcatcctctggacagaacgcggcgctgcccgccacgccaaaatgctcgaaaccgatcaggcatgggaggtattcgagaagctggaggattgctatttcagccagaagcaacaaaccccaactcgccaggtatctcctgccgnnnnnnnnnngtaa

SEQ ID NO: 397549 - DNA, 429 bp, Salmonella enterica; identical to SEQ ID NO: 392647

SEQ ID NO: 397550 - DNA, 804 bp, Salmonella enterica; identical to SEQ ID NO: 392649

SEQ ID NO: 397551 - DNA, 522 bp, Salmonella enterica
gtgcaaaaaacactgctggcaaaagcaatcctccgcacgctggcggagaaatttcagcaggaagcgaacgtgaccttcccgccggaactggtggcgatggtggatagtctggaagcggagcttcagcgcggggaactcagcgccacaaaccggacgtggctggcgcagtgcgggctgacggcggagcagatacaaaaccagatggagccggaatacacgccgcagagaacaatccatctgtaccactgcgaccaccggggcctgccgttgtcgctggtcaacgcggaggggaaagcggactggtcagcggaacatgatgcgtggggtaatgtactcagtgaaaataaccctcataacatgaaacagctcatccgtctgccgggccagcagtatgatgaggatacggggctgtactataaccggcatcgttactatgtccgttacagggacggtatatcactcaggatccgattgggctgcggggaggatggaatttttatgtatatacgtccaatccaataa

SEQ ID NO: 397552 - DNA, 150 bp, Salmonella enterica
atgttcgtcgaactcgtttatgacaagcgaaacgttgaaggcctaccgggagcgcgagaaattatccttaatgaactcacaaagcgcgtacaccagatctttcccgcggcatccagacatttctcaccctgcgtgattctgtcgcggtga

SEQ ID NO: 397553 - DNA, 969 bp, Salmonella enterica; identical to SEQ ID NO: 392753

SEQ ID NO: 397554 - DNA, 855 bp, Salmonella enterica
gtgtataaaaccattaacctgttaaaattactgcccgtagtattattaagcgcatgtactacatcgtatcatccccaggatacaacatcggcgtccgagttaccccatcgtgacatacttgttcagcaacctgataactgtagcgttggctgtcctcaaggaggaagtcaacaaacaatctatcgccatgtctatacgctcaataataatagcgccacgaaatttgctaactgggttgcctatagcgtgacaaaaaccagccaggcgagcggtcgcccgcggaactgggcgcaagatcccgatttaccgccctcggatacgttggccccttccgcctataaaaatgcccatgcgctgttaaaagtcgatagaggacaccaggcgccgttggcgggattgggcggcatatctgactggccggcgttaaattatttatcgaatattacgccgcagaaatccgccctgaatcagggagcatgggcttcactggaaagccgggtgcgcgaacttgccaaacaagctgatgtatccgtagtgcacgtagtgaccggccccctttttgagcggcatatcgccacattgccagaagatgctacggtagaaattcccagcgggtactggaaggttttattcaccggaacggcgccgtcaaaaagtgaaggaaattacgctgcgtttatcatggatcagaatacgccccgttcggcgaatttttgcgactatcaggttaccgtggacgctatcgaacataaaacgaagccagtgctgacgctgtggtctgccttgcctgaagcggtagccagcgaggtgaaaacaacaaaagggagtctggcgcagaagttaggttgtcgatga

SEQ ID NO: 397555 - DNA, 435 bp, Salmonella enterica
atggaagagttaaaacacgtaatcgcattgttgctggaagacgccaaacgcttgcagcagattaagccaaacgcaggtactgaggcccgcattacacaggctataaaagtgcttgaacctgcctttaacgccaaaatcgaatgctcaacaagaaaggcatcgctcgaagccccaaaaaaagccgaagaaaccattatttttgatggcgtgctagctaatgaacggtttgcaactcatgtggtggataaatttcaccctaccatttctcgagtgattgaagagatggttttgaatggcaagccggaagatcaaattaaagaagccgcagcaacaaccggcagagcaatcgttgctggggtaagggagttaattagaagtgcctccactcgtttgaaggatgagccttcgcttcatgctcgagttcagaaggactaa

SEQ ID NO: 397556 - DNA, 267 bp, Salmonella enterica
atgaaggttgaagtagaaactccagaagagaataccggtgacgttatcggcgaccttagccgccgtcgtggtatgctcaaaggtcaggaatctgaagttacaggcgttaagatccacgctgaagtaccgctgtctgaaatgttcggatatgcaactcagctgcgttctctgaccaaaggtcgcgcatcgtacactatggaattcctgaagtatgatgatgcgccgaacaacgttgctcaggccgtaatcgaagcccgtggtaaataa

SEQ ID NO: 397557 - DNA, 1416 bp, Salmonella enterica
  misc_feature (1306)..(1315): n is a, c, g, or t
atgtgtataagagacagggccagtgagcgatgcagtaaccaactgcttgataccctacaagtacaatacgacaatctggaaaataaagtcgcagagcgcactcaggcgctaaatgaggaaaaaaaacgtgctgagcaagctaacaaacgtaagagcattcatcttacggtaataagccatgagttacgtactccgatgaatggcgtactcggtgcgattgaattattacaaaccacccctttagacataaaacagcaaggattagcagatactgccaggcactgtacattgtctttgttagctattattaataatctgctggatttttcacgcatcgagtctggtcatttcacattgcatatggaagaaacagcattactaccgttactggaccagacaatgcaaactatccaggggccagcgcaaagcaaaaagttgtcattacgtacttttgtcggtcaacatgtccctctctatttccataccgacagcatccgtttacgtcaaattttggttaatttactcggaaacgcggtaaaatttaccgaaactggagggatacgtctgacggttaaacgtcataaggaacaattaatatttctggttagcgatagcggtaaagggattgaaatacagcagcagtctcaaatctttactgctttttatcaagcagacacaaattcgcaaggtacaggtattggactgactattgcgtcaagcctggctaaaatgatgggcggtcaactaaaactaaacagtgtccccggagttggaacctgtatctcgctagtattacccttacaagaataccagccgcctcaaccaattaaagggacactgtcagcgcctttctgcctgcatcgccaactggcttgctggggaatacgcggcgcgcccccccaccagcaagatgcgcttttcaatgcagaacttctgtatttccccggaaaactctacgacctggcgcaacagttaatattgtgtacaccaaacacaccagaaataaataacttgttacccccctggcagttgcagattcttttggttgatgatgccgatattaatcgggatatcatcggcaaaatgcttgtcagcctgggccaacatgtcactattgccgccagtagtaacgaggctctgactttatcgcaacagcagcgattcgatttagtactgatggacattagaatgccagaaatagacggtattgaatgcgtacaattatggcatgatgacccgaataatttagatcctgactgcatgattgtggcgctttcagctagcgtagcgtcagaagatattcatnnnnnnnnnnattacaaaaccggtgacattagctaccttagctcgctatatcagtattgctgcagaataccaacttttacgaaatatagagctacaggagcaagctcctag

SEQ ID NO: 397558 - DNA, 261 bp, Salmonella enterica
atgccgctcggagcgacctacggcgagccgagtaacgacgtgctgcaaagtgtgatgggtgtcgatccgcagcctcccgttaaggaaaaagaagacctgaaaaaactgacagagttagtcgatcaggggaaatacaataaacgggaaacacagcaactcatggctaccttgcaagacgcactaggtgaacatcacccacagttaaagcgtttacagcgtagcattgcccggcaggagttactgaaagggaaagcgcaatga

SEQ ID NO: 397559 - DNA, 231 bp, Salmonella enterica
atgaccatctacaaaatacctgaaatgcttttgaatccccgcttcattgctgttttgaacagatgtatcgacgaagaagagctcattatgccaatagatctgatggttgataaagcgacaggattttctgatgagcagtggaaacggttttttgaagcatttatcccgttcgtctatgagtttatatggctcacatggagagatcgtgacaatgaggagtactggcaatga

SEQ ID NO: 397560 - DNA, 270 bp, Salmonella enterica
gtgctgtgggcgcatgagacgcagcaggaatacagcgcgcaggggctggcgaaccgcctgaagccggacggcctgccgccggtggaatggctgacctacgggagcgggcacctggcggggatgaagctgggggacatgcccctgatggagtacacgcgggacaggctgcaccgggaggtacagcggcggttcggttcagacagcctcccggacagttatgaactgacaacgactgaccttccccctgtaaacagtgccagtctaaactga

SEQ ID NO: 397561 - DNA, 366 bp, Salmonella enterica
atggttatagctcaaggaactgtcaacgaagacgttgttatcaaactgcgcagacgcataaatgcgtgcagactgactatcctggtcgacatgaccggaatcctggtcgatatcgcctttcgcaaagcctgccgccgccccgacgatccatttggcatagttgccgtcgatcgacttatcaagaccgaccatcacgccgctaacgtcctgatcgtaactcagcgtatcggtatccgcattgaaatggccgccgatgtacgagatccatgcgccgccggtatccatgccattttgcgcctgacgtccattatccaaacgatttgccagcgcatcctgctccaggttccagatattggtgttagctga

SEQ ID NO: 397562 - DNA, 285 bp, Salmonella enterica
atgcaaaatataacctttaccccgccaagtcctgaacagcgccgcacccttttagaagagtacggctttaagttcgaccgtcgaatccgtgaagaagaatgcagcgagatcaccagcctttcccgttccagccgctggaagatggaacagcaggggcgcttcccgccgcgctgtcattttggccgcaatagctgtgcctggcttctttctgatgtgctttggtgggttcgcaatccaccctctgtggaaaacgtcaacaatccatacagccgcaagtctgcttaa

SEQ ID NO: 397563 - DNA, 546 bp, Salmonella enterica
  misc_feature (179)..(188): n is a, c, g, or t
atgtcagacaagttacattcaaactccgcaaacttattcgatagccttgcctttccacccggcaacctgactacatcaaaaacatcgagcgcgccgtcaatgctaattaaccagcggccattggcaatgtttgaggcagagcaatcaacaagccaggatgaatttaccccttcaacaannnnnnnnnngactaaatcctcagcgcttgccggaatcattgaggggtcaggatgccaacgtccagcgtcttttagttcacccgattcaaggcgggatttttttatcgttaaaacgtccgaaatgctagcctccttactttctcgcatgtttccctttccggtcgctaaccattccagcgatacaccagtatcaagtgcgcatgtcacgaccacatcaccgggaaagaaatttcgtcttacccaagtgctgatagtgccagaggagatatccaacaaatccccaagctccttttgcattgtaaaaccgtacgcatcaaggatgcgccttaaaacaggttttccaccactcgctaaaatctcgtcataa

SEQ ID NO: 397564 - DNA, 813 bp, Salmonella enterica
atgaaaaaaatcaatctactacagatggcaattttattcatacccggagtaatgggaagcgttcaagcagagacgttatttgaatgcaaattacctgataataaatcagctactatagcaatgcagggagcacaattatactacacctttggtaaacaaaactctgagccagatatgcaactgaacagagacaatgattggtatttttatggtcaacatggttctggtagcaattatcaattaagtttcagagtggttaaaggcgattataactatgtaatatactcacaagatactggtaacggtgttactgagggtctggtagcttataaaggaaataaagtactttataataagcattgtactgaacccgctaaatatgatgcttcgttgttccagactgatgctgctgatatcggtatgaatgatgaatccgaccaagttagtgattatattaccagtattgccaataacggtaataatcaacgcaacgataattcaactcaacaatcaaaccaagatcgagaacaaacccaaactaatcaaaatcctattgaagtaagattagccgaaaatacggcgtggggtactatgtcaatggttaatattaccagtttaactaatagtgttacaattaacgatgtagtagttaatcgtggtaattgtacattatttgtctctaatcagttaaaacaatatcgtcagcgcactctaaaatatggagaacaaactaaatatggttttaacactgattgtaatattagggagattgtagttaaaactaatcaaggtgactgggtgtttaataattaa

SEQ ID NO: 397565 - DNA, 258 bp, Salmonella enterica
atgccgtactcaccaagaattgcacaaaaatcatccgaaatatcagatggcaaaaacaacttcaaaggtggcttgtccattaagatctcctatgaaacatggtctgccagattgaggaacttcagtatcttctttcaggcggcattatcagctctgctcaatcgtgagacagagttatttttctacgatgtagacactgatagctggacgcgtgggatgacaaaggtaacgcgaaaacgtgaagacttggaagcctga

SEQ ID NO: 397566 - DNA, 186 bp, Salmonella enterica
gtgatttcctcacagcagtcatttagcaagatgcgtcaaaagagcttggattttactgatgtgaagggtggctatccaagcgaaatcgaggaattgaagacgaaaatttctgaacttgaatacaagattgatactgttatcgaattactgattgcagagcgtaagcccaataacaaggacaaatga

SEQ ID NO: 397567 - DNA, 183 bp, Salmonella enterica
atggatgtcgtgtcgaatttagccttcctggtgataataacgaaactggacacgttattgtacgggtcagtaaaggcggcaattctgagacgcgagaaattccgactgactgttttgaaaaagtatgtcgaactttactattcagatgcgagttttctctccctcaggatgctattatcttaa

SEQ ID NO: 397568 - DNA, 141 bp, Salmonella enterica
atgacttactacttcaacaaaaatatgtccacctacgttgattataaaatcaacctgctggacgaagatgatgacttctacacaaacaacggtattgcaaccgatgatatcgtaggtgttggtctggtctaccagttctaa

SEQ ID NO: 397569 - DNA, 222 bp, Salmonella enterica
atgtttgtagcagatggattgaaagccgaccctgacaataatggatgggtcttaggttggggcgttgtgcgcacttcgccctggcaccttgtcggggtatatgccaccagggatgttgccgaaacaaaagctgctgagctgggtgttggttacgatgccgcttacggtagccatcgtgttggaagcgatgatttcgtgacagggactagatttctggattga

SEQ ID NO: 397570 - DNA, 348 bp, Salmonella enterica
ttgcgcgcggaaatattgcccaatgacgaggtaaagagtgaagcattgaaagcgcaatgtagcgagattaacaataactcagaattgaaagggaaaattgatacgcttaaagaggtcattactcatcatccacaaaaagaaaaactggctgaggttgcgctgcagtttggcagagaggcgggtttgaccaagctgaaagcggaaactgattatgtgttaagtagtatgctggatggccttatcgaagacggcagctggcgtaatggcccggcttttgagtcatacctgaataaaccaggcgtggaccaggttattactactgttgatggtctgcacatgcagcgttaa

SEQ ID NO: 397571 - DNA, 345 bp, Salmonella enterica
atggcggcgtcttattacgctggcgaaataaccacgcaccgaacgaccggcaccctggcggatggttgtgatgtctcccgcccgggtaatttaacctatgaaatcgttcgtgaattagtcgatgacattgtcctggtcagcgaagatgaaattcgtaacagtatgatcgccttaattcagcgcaataaggttattactgaaggtgctggcgctctggcttgcgcagctttattaagcgggaaattagatagccatattcagaacagaaaaacggtcagtattatttctggcggtaatatcgatctttctcgtgtatcacaaattacgggtttagttgacgcttaa

SEQ ID NO: 397572 - DNA, 216 bp, Salmonella enterica
gtgttttgtttcgtgctgccacagcagttcccccgttccgggatgctgcaccgtctggcgttcgcagttcatccgtccctgtttatcgtactcatactgcacggcgacgcggtggccatcgcagagatggctgactccggtcagccagccctgttcgttgtactgccagcgttcggcctctgcgccattcacggtgcggtacatcagccggtctga

SEQ ID NO: 397573 - DNA, 168 bp, Salmonella enterica
atgacctgccttatcgcatttattatcgcagtggcattactggttgtgggcctgtggaacgccacgttactgttaagcgagaaaggattttacggtctggctttctttttgagtctgttcggcgcggtggccgtacagaaaaagacggcagaagatcttactgagtaa

SEQ ID NO: 397574 - DNA, 570 bp, Salmonella enterica
gtgctggggagcgatttttatcgttctggcgcgttaggatttggtgttgatttacagaattatggcgcattctcatttgatgctacatgggcgagaagcgagatccaggataaggtatggcaggggatgtcttatcgtgcccagtatgcaaaaaatatcgactcgacgaacaccaaccttacccttgcgagctatcgttactctacccgtaatttttatacctttacggaagctttaaataatcgaactaccgatatcgacgatgacagtttttacgcttatcgcaacaccaacaaccgccgtagccgcttgcaggttaatatcagtcagaacctgaacgaactgggttccttctatctctctggttatcaacaagattattggggactgcagggctatgagcgtacgttaactatcgggtataaccaaagctgggagcggattcgttttatgctcaactattcgttgacgcaaacgccgacatccaaccgtgatgaacaaatatcgtttaccgtcagcattccgttggataaatggttacccaatgcctgggcgaattataccagatag

SEQ ID NO: 397575 - DNA, 333 bp, Salmonella enterica
  misc_feature (321)..(330): n is a, c, g, or t
gtgaagttactcaccgctttatctgagctaatcagtatttttttattcacgaccatttttatttttcttgcacgaaaagtagccataaaaattggtttagtggataaaccaaactttcgtaaacgacatcagggcgttatcccattagtcggcgggatttctgtgtttgcaggaatctgctttatgtttggcctctcggattactacataccgcacttatcgctatatcttatttgcgctggtgtattggtttttgttggtgcgatggatgaccgttttgatatcagtgtaaaaattcgtgctgtggttcaggctgttatnnnnnnnnnntag

SEQ ID NO: 397576 - DNA, 342 bp, Salmonella enterica
atgcagaagaaagtggcaaatataacagtcgcgatggttaattcccccggcgtgcatttgcctttcactggtcgtgaagaggatttaaaaatctctgtaatcgacctgcatcgcgcgcagatacgtcagcgcgttccccttcgctggcgtgataaagatctcattgggctttatttctcttcaatgaacattggcctgactaagcgagatatattccggtttatgcgtgagtatttctctcttcccctgcgagagattttgcaaaaagaatcggggttgattcatcaggcagatattaaagccgctcgaatcaaagaaagaacaataagaaaacatctttaa

SEQ ID NO: 397577 - DNA, 390 bp, Salmonella enterica
atgaccaaaaagtgtaccctactaacatacggcatactctcgctggcgctggccacgccattatctgcctgggcgtttgactctcttacggtaattggcgatagccttagcgataccgggaataatggtcgctggacctgggatagtggtcaaaataagctctacgacgaacagttggccgagcgatatgggctgacattaagcccttccagcaatggcggttctaattatgccgctggcggcgcgacggcgacgccggaattaaacccgcaggataatacagcggatcaggtacggcagtggcttgccaaaacggggggaaaagccgaccacaacggtttgtatattcactgggtcggcggaaacgatctggcggcggccatcacgtaa

SEQ ID NO: 397578 - DNA, 1032 bp, Salmonella enterica
atggaaagctcgccgaagaaaattcctcgtaacaaagctcccgccctggttctggttctgctctcgctggtcgtcatggtgtttgtcatctggcgggtagacagcgcgccctcgacgagcgatgcctatgcctccgccgataccattgatgtggttccggaggtgagcggtcgtattgtcgagctggcggtggtggataaccagcaggtgaaaaaaggcgatctcttgttccgtatcgacccccgcccctacgaagccagtctcgctaaggcggaagcctcgctcgccgcgctggataaacagattatgctgacccaacgtagcgttgacgcgcaaaaatatgccgccagctccgttgaagcgacggtcgccaaagcgcgtgcggcggcgaaacaggccaacgatacgctgcgccgtaccgagccgctactgtcggaagggtttgtttcggcggaagatgtcgatcgcgccagaaccgcgcagcgtgctgccgaagccgatctcaatgcggttttattacaagcgcaacaggccgccagcgccgtgagcggcgtcgatgcgctggtcgcgcagcgcgtcgcggtacaggcggatatcgctctgactaaactgcatctcgacatggcgacggtacgtgcgccctttgatggccgcgtggtgtccttaaaaacctcggtcggtcagtttgcttccgcgatgaaacccattttcacgcttattgatactgaccactggtacattatcgccaacttccgtgaaaccgagttgaaaaccattcatgccggaacgcccgccgctatccgcctgatgagcgacagcggtaaaacgttccagggcaaagtagactccatcggctttggcgtactgccggacgatggcggtatggtaattggcggcctgccgcgcgtatcgcgctccatcaactgggtacgcgtagcccagcgctttccggtgaaaatcatggttgaaaaacccgatgcggcgctatttcgcattggggcttcggcggtcgccacccttgagccgcaataa

SEQ ID NO: 397579 - DNA, 258 bp, Salmonella enterica; identical to SEQ ID NO: 392677

SEQ ID NO: 397580 - DNA, 258 bp, Salmonella enterica
  misc_feature (240)..(249): n is a, c, g, or t
atggacaagccacctttgaagttgtttttgccatctgatatttcggatgatttttgtgcaattcttggtgagtacggcataaagcactccactggaaaaatggtaagtaatgggccttcgctcgttgtgaactcggcttccgacgccgttaaagaaattgtaatcgagatcgtaaactccacgccgttttggactgcattcagcgcctgctttatcgcctatcttaatcggaacaaaggnnnnnnnnnntcttgctaa

SEQ ID NO: 397581 - DNA, 315 bp, Salmonella enterica
atgttatcaaaaatggtttctgaccgagtcggtaagcgattcctgaacagggaaatcccacaattaccaatgagcatcaaaggacaattaatgaagcgcgtaaaaattgaattttcatcaggcggtattgtaatcaagcatactggattcaaggtcttgcagggtgatcgcgtgttggttgaggatttcctgtctggcaagatttcagatgtatttgtccgtcactatgagatatgtgccgatgacagccctgtatctattcagtttacgaaaggggatgtccccggtttaaatgtgaaggccactctatcctga

SEQ ID NO: 397582 - DNA, 231 bp, Salmonella enterica
gtgcgtgacgcatttttagcaaaagatgcgcaagccgatagcgcatttttgccgcgcggggaaaaatttctggcggatatttatcagcttgcacgccaacgtctggcgaataccggcgttgaacatgtctatggcggggatcgctgcacctttagcgaaagtgagactttcttctcttatcgtcgcgacaagacgacaggtcgtatggcaagttttatttggctgatataa

SEQ ID NO: 397583 - DNA, 228 bp, Salmonella enterica
atgagtaacgttactggcagcacaccctatacgcccaaagaaaaaggcaacgctgcgaacgttgcctttgggaaccagaacgatcactggtcaggactgtcttttgttttttttgcgctgtcgggcttccagttcggcatgtgcaatatcgactatagcacgaatgtcggtaccggctctctctccgatttcttcaatcttggcgagcgtctcaagcgccctgtttag

SEQ ID NO: 397584 - DNA, 558 bp, Salmonella enterica; identical to SEQ ID NO: 392637

SEQ ID NO: 397585 - DNA, 171 bp, Salmonella enterica
atgaacgcggagcgcggccgtaatgccgcgtatctgcagaacagaatggatgatgccgatacgctgaaaaaagccgttgatacccgggcactacagaataagggtgagcaagaggttgaagcagtgaaaaacagcattggttcggcatttcaaaatcgtaacaagcgttga

SEQ ID NO: 397586 - DNA, 270 bp, Salmonella enterica; identical to SEQ ID NO: 392703

SEQ ID NO: 397587 - DNA, 954 bp, Salmonella enterica
  misc_feature (172)..(181): n is a, c, g, or t
  misc_feature (936)..(945): n is a, c, g, or t
atgaataaaatatacgctctgaagtatagtgtcagacaaggcgctcttgtgcctgtttcagaactggcaacacatgtcaaaaaatcatcttgtactcgcacaggtttgataaagaaacttattccatcagttatcattaataccctccttttaggttattcaatctcatcgnnnnnnnnnncactatacttcagagcgtatattttattcatggagaatccctaccagacaataagagattttgcggagaataaaggacaatttacgccaggcagtatgaatattcccgtttataacaaagcgggtgcggttattggctatctgaataatgctccaatgcccgatttcagtagcgccaaccaccagtcagcggttgccacactggtttcgccacagtatatcgtcagcgtaaaacataatggcggctatcagagtgtcagttttggcgatggtgagaatgggtatcgtcttgttgacaggaataatcagcctggacgagattttcatgccccacgtttaaataaagtagtcacagaagtcgagccttctttgatgacgcagtcggggatggtgtctggtgcttatagtgataaagatcgttatcccgcattttaccgaatagggtccggaacccaggaaattaaagatacaaatggtcatatcacctcaatttccggcgcatacagttatctgaccggcggaacggcgggctcaccgggatcttataatcagggccagatgatcagtaccaataccaataagcagttgtatagtttggcgcagggaccgatgggaacacacccacgcagtggtgatagtggttcacctttgttcgcctatgactctgttttacaaaagtgggtcattgtcggggtggatagctccggtggcgatggtggcactaactggacctgtctcttatacacatctgacgcnnnnnnnnnnagtggttga

SEQ ID NO: 397588 - DNA, 141 bp, Salmonella enterica
atgaataagaaaagtccgtcaatggttaacttgcccgcaccgcgtgagccaattaaccagaaaatcgataccaataacgcattggtgttaaaccataacgccatacatgaacatctaatacctgtgacaaggccattgtaa

SEQ ID NO: 397589 - DNA, 519 bp, Salmonella enterica; identical to SEQ ID NO: 392594

SEQ ID NO: 397590 - DNA, 726 bp, Salmonella enterica
  misc_feature (592)..(601): n is a, c, g, or t
atgacccccgaacagcagaaatacacggcaaaggtgatgcaggtttacgctgcaatgatcgccaatatggatgcacagattggcaccgttattgagacgttaaaaaagaccgggcgtgataaaaacacgattctggtcttcttaagtgataatggagttaatccggcgcagggctttcactatgaatctgaaccggatttttggaagcaatttgataatcgttacgaaaatattggtcgtaaaaattcatttatctcttatggtccctactgggctgatgtcagcaatgcgccttatggtcgctatcacaaaacgaccagcgcccaggggggaattaataccagttttatgatttccggtcctggtatcatacataatggtgccatagatcacgccacgatggcggcgtatgatgtcgcgcccacgctatatgaatttgcaggtattgatgtcagtaaatcattatctgaaagacagactctgccaatgaccggcgtgagttttaaacgctatctgaccggtgaaagtctgcacgcgcctcgcacgcaatatggcgttgaacttcataatcaggcggcctggatagatggannnnnnnnnnatggaaattgcgtcgtcttgtcacagtattcccacaggctggtaatgcgccatgggaattattcaacctgcaacgtgaccctctggaagtgcataatctcgcagcagattatccggataaagtga

SEQ ID NO: 397591 - DNA, 720 bp, Salmonella enterica
atgaaaaagtttttcgcagtctgcatcattccccttctggtaacctataccgctactgcatcagcaaaagaaggggtctatatcaccgggaaagcggggacatccgtagtaaatctctatggaatcaactcaaccttcagcgcagatgaaatagtcaatggccatacaacgttacctgaccgtaccaaaggcgtttttggcggcggggttgctatcggttatgactttaatgatcaattccagcttccagtacgtttagaactggataccactttcagaggtgagacggatgctaaaagcgggcaggatattactgcatttggtgagtcagtacacataaatgtaaaaaatcaggtccgaatggctacttacatggtgaatggctattatgattttcataatagtacggcatttacaccatatatcagcgcaggcgttggcctcgctcatgtgaagctaaagaataacaccattcctgttggctttgacattaatgaaaccctctctgcttcaaaaaataactttgcctggggagcgggtatcggtgcaaaatatgctgtaacagataatattgcgattgacgctagttataaatacattaatgcaggcaaagtaagcatttcaaaaaataactatgccggggatgaacatacctcttattatgcagatacaaaagctgcatccaatgacttcatgcttggcattacttacgcattttaa

SEQ ID NO: 397592 - DNA, 297 bp, Salmonella enterica
  misc_feature (236)..(242): n is a, c, g, or t
atgaaaatctctcttgtcgttccagtttttaacgaagaagacacgataccgattttctataaaacggtacgtgaatttaatgaactaaaagaatatgaaattgagatcgtttttattaatgatggtagtaaagatgcgactgaatcaataattaacaaaatagccgcatctgatccgctcgttattccgctttcgtttacgcgaaatttcggtaaagaacctgctcttttcgcggnnnnnnnttcctatggatgtcgatttacaggatccgatagaagttatccctcatctcattga

SEQ ID NO: 397593 - DNA, 1029 bp, Salmonella enterica
atgaacatatcatcaagcggaattaatttttccacaattcctttccaggttaaaaaattagctaaaactattcgtgaacgtacgaaaaactggttctcctcagaaataaccagtgttaaaaacacgcatatatctttaaatgaaaaattaaaaatcggaaagacctcaccgattgagatagcgttaccacacaaaataaaagaactctttcagccgaaagacaaaagcaccttagacaaaacattggttactgttaaaaatattacagacacaaataacacatgtaagaaaaacatttcagaagaagatgcctcaaaaattaccatagcattcatgcgtaagcatattgcaaatcaatcatatgattataattacagagtgacaggtgcagatctactccccggtggagtctctatatcagccaataacaggccgactgtttctgaaggaaagagagatctgacttcgcctgatgcgaataaaacaaatagtcatgatgaaatgccacctataccgccagtagattataatgccactttacataaaggagaaatcgttgggaaaggagggaatgctattgtatatgctgataaagacgatgacacaaaagttttaaaaatgttcactatacctcaactccatgaagaggtagtgcatgaagttgaatgctttaacacatattatggaaaaggtagcgcagaaatcatatataacaacaatgttatatcaggtatcaaaatgacaagaatacaaggggaaccagtaatttatgctaaaaacttaccaccccatgcagaacaagctatatatgatatgtttgatcgactggagcgaaataacattctcttcgttgacactacagaaacaaatgtgctttatgaccgtgacactaatagatttaaccccatagatatatcatcttataatctaaagcatacagatagtaaggacaggcaagatagcattatagaatcctatattggtggcaaaaattatcttattaacacagtattaaacaaaatagaatag

SEQ ID NO: 397594 - DNA, 408 bp, Salmonella enterica
atggattctctttttgccagcactgattttgctcctaccccagactactattttggcttaggttttacctccgaacagaagcaaattggtgtgtatgccttaggtgttaacgaattaggagccccaaatgccgacggtgaaacgcgttacccgattttcagtaccgacggcggtactacctggactagcgggcatgacatctctgcgggcacaggctattccccaatcaaaaacaacggtacagatattttagcgtttgctaaagataacgaatcgacagtctctcctgaaacgtctctcaccttcaggattggcgtttcggcggttatccaggatcttaataccctgcacgtgactgatgaaattacgctggacggtttaaccgcaattaacctggtctacctgtaa

SEQ ID NO: 397595 - DNA, 150 bp, Salmonella enterica
atggaccagcgtgttgaccagcgcttcacgcagtgcgatatgtactggcgtatccgttctgcgctgaccctcttcaagcgtaaatggaactttcagatcggcgaccagtttttggtataccttgcgataaaaatcaaacaagttccctga

SEQ ID NO: 397596 - DNA, 330 bp, Salmonella enterica
gtggtcgtagtctcctggcttaacagacatatcattcacaattacttcgcccctggtggctacaaaatacctgaaatgcttttgaatccccgcttcattgctgttttgaacagatgtatcgacgaagaagagctcattatgcaatttgaaaggttgtcaggtgtcactcgaccaccaaagcggcaacacccaatagatctgatggttgataaagcgacaggattttctgatgagcagtggaaacggttttttgaagcatttatcccgttcgtctatgagtttatatggctcacatggagagatcgtgacaatgaggagtactggcaatga

SEQ ID NO: 397597 - DNA, 321 bp, Salmonella enterica
  misc_feature (293)..(302): n is a, c, g, or t
gtgttttgtcgggtccagtacattgataatccatcatctgcggttaataaaccggttattgcatacacctatgccgaagccgtttcaaagataggtttcagcactaactttgaaaaatatactttgagcgaagtgattaaggtcgcttttggtatctatggcgtggctccggttgtgtttatcaatgtactggacccgacaaaacacaaagcagacgttgtcgatgaagccgtcaaactttcaggcggtaaggcaacgctggctaaggatggggtgctctacgactctgttgnnnnnnnnnngtctggattgtccggttga

SEQ ID NO: 397598 - DNA, 297 bp, Salmonella enterica
atgttctgcgctttcgcatccgccatgttctgcggggagagcgtaaacaggcagctaaaggcgaagaacatcaccacggcgaccatcagcatactggcgcgggagatgatctgtgaacatttacgctcggtaaattcgcggccaaactctttctcatactcttcacgcttagacaccacgaaggaagagacgatgggcgagaagttaaaggagaacaccatgatagaaatacccagccataccgtaaccagtatgccatcgtgcccggtcagcgcgatattgctgagatcaacctga

SEQ ID NO: 397599 - DNA, 339 bp, Salmonella enterica
atgactaatatgacatctattaaactcccaatggagggtaaatccttttatccttctcttaaatgcgaacaagttacggtattagatacttataaggtcagtatcttcaatgaaggatatggtgattctgcatgtataataagaatcatcgagatctttatgttaaataaactgcgtcataaaggagaggaattacgttctttaacagggctaacaatccccgatacggaagcgactgccgatgaaatcaatctcttaatgagtcgacttgaggtgctatgtcagcgtgaagaagaagagttatccttccgacaaaaggatgttagctctgccgagtaa

SEQ ID NO: 397600 - DNA, 150 bp, Salmonella enterica
atgcttgccgcaggagaatcaaataaacaaatcgggcgggcgttaaatattagtaccggaacggttaaagcgcatcttgaatcgctttaccggcggctggatgtaaaaaatcgtacccaagccgccatgatgttaaatgaatcgaattaa

SEQ ID NO: 397601 - DNA, 237 bp, Salmonella enterica
gtgaatatagatgatctcaaaaataaattaagtgaagacttacagaaaagaacggtggcactggttgagcagatccctgaaaaaaggaaaaacagatatcatatgcaggaagatgcgttgattgagttgccgtctggtgagcgtattgctatatctaatcaatggggggtaggaaatatagaactgcttattgattttgttcgtcaggatgattttgtagttgaaaaagtggattga

SEQ ID NO: 397602 - DNA, 225 bp, Salmonella enterica; identical to SEQ ID NO: 394356

SEQ ID NO: 397603 - DNA, 213 bp, Salmonella enterica
atgccagtcaccggaatcgttatcgacgctagcgctatattccgtaccgttaaccgttaccttcacctgaatatcctgattcgcttccaccgttccctggagagtgacggtactatcaagaccgttagtcgtcgatcccagggtggcgtatcgatagtgatcttccccgttatcggggggattagttacccgctatatcttcgagcgaaatag

SEQ ID NO: 397604 - DNA, 138 bp, Salmonella enterica
atgaaaaagtttattttatccactttagttattactacaagcgttttggttgtaaatattgcacaggccgatactaacgcctttaccgtgccgacacctgccagcgcgtataacgaaaaattgtcagataatcgatag

SEQ ID NO: 397605 - DNA, 219 bp, Salmonella enterica
atgcatgttggtaaagattacagttggttagggttaatcacaggagagataattattggctttttaattgggttttgtgcggcggttcccttttgggcagttgatatggctgggtttctgcttgatactttacgtggcgctacaatggggacgatattcaattctacaatggaagctgaaacctcactttttggtttgcttttcagccaaaaatattaa

SEQ ID NO: 397606 - DNA, 198 bp, Salmonella enterica
atgaaaaatgtaattatatacggtattaactggactaattgttatgcccttcagtctatttttgagcaaaaatatccggaaaagcgcgttaaaacgtgtaactcattaactgcacttttgcattctatatccgatatgccggacgctgggctgattttagctttgaacccgcatgagcacacctccagggcggcgtaa

SEQ ID NO: 397607 - DNA, 174 bp, Salmonella enterica
atggaacaagtaacaggaaagggcaagcagatctcttaccgtccgcgtaaagaggtgcgtgactttttggagtgcaacgcagcgaaaacataccgctctgttcagggaatgattgactacctgatggatcacttaatggaattggagaagaaaggtgagcttaacatccgctaa

SEQ ID NO: 397608 - DNA, 750 bp, Salmonella enterica
atgaaaaccaattttttaaaagtggccatgctggcgctttgtgttgcccccctttccgttttagccaattcaactcactggggctacgaagggaatggcgctccagagcactggggaaatctggatgaagcgtttaaaacgtgccagtcagggacaagccaatcccctgtgaatatcagctctcagtccgtgcacaaccaacaacttgctgagcttgatgtgcaatatgctgatggcccttcaacgctccttaacaacggtcatactcttcaggcggagatgagcagctatactcccgactcaattcaggttggcagtgatgtgtatacacttaagcagttccattttcacgcccccagcgaaaacaccattgacggtaaacactacgcgctggaaatgcatttagtacaccaggatcgggcagggaaaatcgccgtcgtcgccgtcatgtttgatattggcgaaccgaacgacgcgcttgaaagcttatggcagtccatcccatcgactggcggtaacacgccattatttttacccgtcaatatcaacgagcttctcccggctgataaaaattactggcgttacaacggatcgttaaccacgccgccctgcagtgagcatgtcagttggttcgttatgaagtccccactaacgctttcacaagaacaactgagcaaattcaaagaggctattccacacaacaataaccgtccggtacagccgctcaatggccgcgaggtcgtcgagtaa

SEQ ID NO: 397609 - DNA, 210 bp, Salmonella enterica
atgccttatccggactacgttgttagattgtgcaaaccggataaacgcagcgccgtccggcatgactatttactgagagtggggcaattcctcgcccccgtcaaatcattgctggctttcttttctcggttgacgcagaacttcgttgatctgcggcgcatcgaccggaccggtaatgcgataacgcagaatggagaccttgctccatag

SEQ ID NO: 397610 - DNA, 210 bp, Salmonella enterica
atgtttattaaatcacagagtttcgacgacggctggcagcagattgagatcgtctcacccgacttagatccggtgtgtctccaggtttatgtctcttttggcgctaaacaggaccacaccattatcgattgtatggtgaaagaaaacggtatctggaaggtgcaatccgttgcaggtcaggaaatattacgtaacgtgagcctcaagtag

SEQ ID NO: 397611 - DNA, 138 bp, Salmonella enterica
atgttaaatgttgtcgaaaatgccctggacaataccggtaacgcccacgcccaggtaggtgaagttgtattttttaaacagctactcgatctgctttgcctggtagggacgcgagggcaaaaaagggggcgttgttga

SEQ ID NO: 397612 - DNA, 852 bp, Salmonella enterica
atgaacgcctccttttataccgagcatctggaactgattacgctgaacgacgctatcgcgtcgttcagccgccttttcgccagtaccgttcgctatcaccactggcatcagtgcctggaagtgctgtatgtggaggagggatttggcgtggtgacgatcgaccataagcagtacaccatgcggcccgggcgaatgttcttttttccgccgttcaccctgcataaaattatggttgatgaaaaagcgcaggactgttacaggcgcacgatcattcatctcgatcagcatgcagtcctgaaactcctgcgtgactttccgcttaaccaacagcgcttgcaaagcctgagcgcccggggcggcgaggcttgggtgattgacgtacacgagatccacacacatatcgattttctgttcagccgctacgaaaaaatggtcgcgtccaaaccgttaaatgcggaacacgtcgcctgtctgctattaaatttacttagcctgttacccgaagataacgtcactatgccggacattggcagcgggatcgccagccaggtaatgttctggctggatgaaaactacacgtgtaagtttagccttagcacgctggcagaagaggtaggtaaatcaaaaagttacatctcgcggcgttttcatacggaaacgggagaaaatattctcgactatctcaatacgttacggctgagaaaagcctgtgaggcgctgctgcacagcgaggcaagcgtgcgggagattgccggtaaggtgggattttccgatgtgacctattttatcagcgcgttcggcaaagggattggcgagacgccgctacagtaccgcaagcgacataaaaattga

SEQ ID NO: 397613 - DNA, 1821 bp, Salmonella enterica
atgtggtcggcaactgaagaaaaatcaaatccattgtcatcgcgcgcagaggtctcgcgtgccgttcacgccatattaggggcgctggataagcagtttccgtcggggcaggctcagttttctctggggaatacctgcgcccattacagtgtggatatcgcctgtatggaggggctttcccgcgcgctatgggggctgtttccgctgatggcgggcggagcagacgtcccgtttgctgaaaaatatattcaggcgattaagctcggcactgacccgcaaagccctcattattggggcgataccggcccttacgatcagcggttggtggagatggcggcctatggatttggcttggcgttactgcaaacacgcttaaccgacgcctttagtgagtcagaactggcaaatcttcatcgctggctgaatcagataaccgacgcgcaaatgccggacagcaactggaactattttgcgattatcgttcaggtgggtttcatgcgcgccgggttgccgttcgatcaggatgccatcaatcgccgttttgaaatgatagaagcctactatctcggcgacggctggtactccgacggcccggaacgcccgaaagattactacatctcaatggccttccatttttatggcctgctgtacgccacgctcaacccacaagacactgctcgggcggccacgttacgcgaacgctctcgtcttttcgccaacgattttatctatatgtcggcggctgacggcgcatcggtaccgtttgggcgcagcctgacctaccggttcgcgatggtggcgttctggagcgcggtagcctttgccgatctggatgtgttttcgcctggcgttgtgaaaggcatcatttttcgccatctgcgctggtggcgacagcagcctgttttcgatcgcgatggcattctgacgctgggctttgcctacccgaatctggcaatgtgcgaggattacaactcgccaggctcgccctactgggcactcaaagtgttcttgatcctcgcactgccggaatcgcatcccttctggcaggcggaggaattaccgcttccctcgcttttcgaaacgcgcgtgcttccacatgccgcgcaaattttgcagcacagcgagaactctgaccatgtcactatgttgacctccggtcagcttgaactaaataactacgttaataccgaagccaaatacactaaatttgcctactccagccgctttggtttcaccattgaacgtgggcgtttcggcattaagcacgcggcatgtgattccatgttattgctggcggatggcgataactatttccgcgggcgtcgtcactgtgacagtgtacgcgtcgatgagaatgacattttctctcgctggtcgccgtggcatgacgtcgttattgacacctggctggcaccgtttggcgagtggcatatccgactgcatcgtattaacagcgcccgcgtcttacagacggtagagggcggttttgcggtaatgaaagcggagcatcagctgcgcgagcgtgcctgttatctctctgccgacaacggcagcagtgctattgtcgatctctcgccggtgattcaccgcctgccaggcagtattgtcacgccgcccaacagcagcgtgatgtttgctcaatgcgcatcgattccggcgctctccacggaaattcccgcaggtgaaagctggctgtgttgcgcggtgacggcctccggcaaccagaataagagcgtggtcgccccgcaattgcaaataaaccataaccaggtcgttcttcgtgaacctggaagcgcacgccaactgtcatttattttataa

SEQ ID NO: 397614 - DNA, 1269 bp, Salmonella enterica
atgaaaacaatatctctgtataataaaatggaatattacaaaatcagtagctttatattcctttatttctttacctggtctgccagtataggcctgctggctatttggcttggacaaaaagcgcagcttagcgggacggttatcggcactgtttttgccgttaacgggatattctcggtgatcctgaagccgatatacggttatattctcgataaaattggcatgagcaaatatttgctctattttgtggtggtgatgtccgcgctgatggcacccttttttatctatgtgtatcaaccgttactaatatctaatactttgctgggtattactactggcgcgatatatctgagctttgcctggtatgctggcgtggcggcgtgtgaatcttattcagatcgttatagccgtttgcacgacatggagttcggccagattcgcatgtgggggtcgctgggctgggcggtcgcctcgtcgttttcgggcctgctgtttaacctctctccgacgtataattttatcctgggcagcgcggcctccgcggtgatgctgatcgtcctgttgagtctgaaggtgaacgttaatgcggccaacgccgcagaggtgctggccaaagagaaaattgccccgtcggatgtctatgcgctgctgcgcaatcgcaaattctgggcgttctgtctgtatgtcgcgggtgtagcgtggatgatgtttatcgccgaacagcagttttcccgctattttgtcactttcttctcggatatccatgaggggaacgcggtgtttggttatctgggcaccgttcagtcgggaatggaatttgtcatgtatatggtggttccgctatttgttaactatgcaggcgctaaacgtgggttgctgattgtcggtacgctggtgggcgcgcgcctggtgatttccggtctgtgtgattctcacttattaatttccgtactgaaaccgttatacggtttggaaatctgtttattactggtctctgtttttaaatatattgccgaacattttgataagcgcgtgaatgctactatgtatttgctgggttatcaggcgatgttatatgttggcaatgtggtggtctcttctcccgctggattactgtatgaccgtattggttttgaaaagacttatatcattatgggagtgattgcgctgtcgtttacgcttatttcagcattcaccttgtcagcatgccagagtaaacgtcggaataatgcaacgcctgcgatcgcagaaaataacgcttcaagataa

SEQ ID NO: 397615 - DNA, 1191 bp, Salmonella enterica
atgttaaatcatatcgttgaggaaaacttacgcgcttttcctggcagcccggtaaatccggaagcttttcaggacgaaatgtgcagcgcgcgcaagcatgtcctcgaactgattagccgtcatttaacggaattcggtgaaaaatttcccgccgaaacctgcgtcaaaggctattacccgctgacggacaacatcgagtggaccaccagcttctggaccgggcagttatggctggcctgggagatgagcggcgaagcaaaattccgcgagatggcagaaaagcatgtccgctcatttggtctacggatcgccggacgccacgacaccaatacccacgatctgggctttctctatacgctatcgtgcgtttcggcctggcggttgaccgggaatcgtgatgcgcgcgggtttgcgctgatggcggcggaagcattgctggaacgttttcacgagaaggcgcggatcgttcaggcctggggcgaccttaccgatccggaacaggccgggcgtatgatcatcgactgtaacatgaacctgccgctgctgtattgggcgagcgagcagaccggagatccgcgttttgccggggcggcgagcgcgcacgtcgcgcaagcggcgaaatatctggtacgtgaagatgcctctacgttccacacctactatatggatgtaaaaaccggcgcgccgcgttatggcaacacgcagcagggctatgccgatgattcgtgctggtcacggggtcaggcgtggggaatttacggtttcctgctgagctatatctatactggcgacaacgagatggtagctctgtcgaaaaagctggcgaattattttctcaatcgcctgccggaagatgccgtttgtcactgggatctggcgctggttggaaccgacgcgctgcgcgactcctcttcagcggcgatcgccgtctgtggtctgcttgagctaattaaacatctgccggtcactaacccggatcgtaaacgctatcagcagtgggcgatgggaataatgtcgtcgctgacgaaacactacctgatggcgaaagaagagaagggcaacggggtactgaaacacgcggtttaccacctcgccagtaacaaaggggtaaatgagtgcgcaagctggggggattatttttacgtggaagcgctgatgcgctttacgcaaagctggaagctgtactggtaa

SEQ ID NO: 397616 - DNA, 138 bp, Salmonella enterica
atggaatgggtatttcaacgtcaggctattttttgtgaggttgcgcaaaatatattgagaaaaagagtagaagcattgaacctttatttacataaagagggctttattgatgatcgcagcgagccagagagtcgataa

SEQ ID NO: 397617 - DNA, 612 bp, Salmonella enterica
atgctggtttacgctgctatgattgccaatatggatgtacagattggcaccgttattgagacgttaaaaaagaccgggcgtgataaaaacacgattctggtcttcttaagtgataatggtgttaatccggcgcagggctttcactatgaatctgaaccggatttttggaagcaatttgataatcgttacgaaaatattggtcgtaaaaattcatttatctcttatggtccctgctgggctgatgtcagcaatacgccttatggtcgctatcacaaaacgaccagcgcccaagggggaagtaataccagttttatgatttccggtcctggtatcatgcataatggcgccatagatcacgccacgatggcggcgtatgatgtcgcgcccacgctatatgaatttgcaggtattgatgtcagtaaatcattatctgaaagaccgaccctgccaatgaccggcgtgagttttaaacgctatctgaccggtgaaagtctgcacgcgcctcgcacgcaatatggcgttgaacttcataatcaggcggcctggatagatggagaatggaaattgcgtcgtcttgtcacagtattcccacaggctggtaatgcgccatag

SEQ ID NO: 397618 - DNA, 591 bp, Salmonella enterica
atggctgaagctgcgggcgtgaagctcgtttataccctgtttgctcgcgaagcatttgtttttattgttaataaagacaatcccattcaaaccctgaacgatgctcagatccgcgccatttacagtggcgcggtaacccaatggcgggaggtaggcggtgacggcaacgccattcaggcctggcagcgtcccatggattcgggtagccagacggcgatgttggcaaacgttatgcaggaaacgccaatgattccagcgccggagacgcgaaccgccacggcaatgggggagattattgatgtggttgccgaatatcagaatacgcagggggctattggttacacgttccgctattacgccacgcagatgaaaatcaataatggcatcaaactattggcgattaacggcatctctccgacaatcgaaaatattcacaatggtacttatccgtatactgtggatgtttatatggtcacccgcgaacatccaacggcggaaacacaaaagctggtggattggtttttaagcccgcaggggcagcagctggtacaggatgtgggttatgtgccgctgtatccggtggtaaagtaa

SEQ ID NO: 397619 - DNA, 1674 bp, Salmonella enterica
atgtggcatacgcgagcgctggagctaagcacccaggcatactggaattgggataaggcctgcgagcttatagagtgggccgtcgcgcacgatttcaataccgtggtggttgggcaggcgaacctgttcgatatgctggtttctccgaaaggctatacgccgcatcagtataacgaccgtctctccagccagcagcgcgcccgctgcgtctaccttacccgtctgggactgcgatgccagcaaaaagggttgcgtctctatctccaggccaaagagtttaactttccgaccgatctgctgctggcacacccgcacctgtttgaatccggccacggcgtgcgtttcgatatcgatttctggcgcagctatcttgccgataaagtcgcgttaatctgtcagcgcatcccctcgctcagcggtttgatggtcgccatctcaaataccgacggccttctgcccgtttcgcgtcccaactgggaattaccctccggggaggagaccgcgcccccccagcgcaatgaacgcagcttcgcaatctacagcagttgcttcctcacgctctcccgcgtcatgcagcagatgaataaacatctggtgctgcgggtttttccggcgggcaaccatgaccttggcaacgttctggaggcgattcgcccgctgccggagagtgtcagcgtgtcgatcaaacttacccccgaacggttttggccctcctttccgaataacccggcgctgcttgcagtacgcgaacgcgaagtgtgggcagagatcgatttagtcggtgaagaggtgggctggggtatcttcccatttccgcgtattgatgagctaaaaggacgcttgttgtggtgtcgcagcaatccggccatcaacggcgcggtatgtaaaatcggttgggaaagtctggataatcactgggttatcggcacgctcagcgaatgtaacctgatggcctgtagccgtctgctcataaaccctgatgcaaacctcacgcagacgcacctgatgatgtactggttagaggaaagctatggctggcagcctgacgaacccacatttagcaccttctgttcactgctggaacgtgcggggcaagtgctatacagcgccatttacgtgcgcgaccacgtatttcaccgccatagccaggttccggaaagctatggtcaggcggtgtggagcctgtacggacagctcaaccgtaaccactggctgccaggttcggagcgggatatcaccttcaaccgtcacgatgtggagacatcagccacctgtctgtcacgtatcgccaaagagaaagatgaagccggagagatgtccatcgcactgcgtgaggaggcgttatatttcgcgcaaacaacggcgtttccgaatgcgcttaaaagccgttggctggaggaatggcaaggtttttccctttattgccgtctctttttacatgcgcaaaaggcattttttaccctgcgtttcgcctgcgaagtggaaaatagctggagtctgcgcgaggtgtgtcagatcaatattcaggagctataccgtagcgcgtcagaaatggaagactattgcctgaaacaggccgatgcctcccccggtttgcatgtgttgtttgacgcttcccgcgtgcgggcgctagcggacagcctgagccgtgagttatcagcgcttaaaggatga

SEQ ID NO: 397620 - DNA, 1365 bp, Salmonella enterica
atgaaactttctttagatactctcccgctcgatcgtcgtggcaataccgttgttaccgcgcagcttcagctgttgattgatgaaatcgaccgcgcgggcggcggaacgctgaccatcccgccaggcatctggcgcaccgggacgctgattttaccctctaactttactctgcatctggaagcgggcgcctgcctgcgcgccagtgcggacgcggcggattaccagcgcgcagaaaccaccacggtggcggaattatcacgcatggcgctgatttacgcccgtgataaacaacgcatcacgctgagcggagaaggtcgaatcgacggcgacgccgcaagctggtttgcgccggaggcggacgcccagggctaccgtcagccagaaacgcatcgtccgcgcctgctggtgtttgaaggctgcgatcaggtacgtattcacgatattaccctgtacgactcgccaatgtggacggcccacctggtaagctgcaaccatgttttcattcgcaatatcactattgataacaatctggcgttctcaaataccgacgcgctggatatcgatagctgtcaacacgttcacatcagcgacagctatttcagtgccgctgatgatggcatctgtctgaaaaccacccataaaccagccgccttgcaacaacctgttcgcaacgtcgtggtgaacaactgcattattcgctcgaaaagttgcgcgattaagctgggtacagaaacctttgccgacattgaaaacgtcagcgttagcaactgtacgctgtttgagtccaatcgcggcattggtctggtatcacgtgatggcggacgttttcagcatctggcattcagcaacattctgtttgactgtcgccatggtcacccatgccactggggcaaagccgatccggtgtttatctcagtacgccatcgcgcgccagcactgacgcccggcacgatttcgcatgtgacattcaacaacctctcaggctgcgccgaaggggccattaatttacatggcgaaacgccagggcaaatttgcgacatcctgttcaatggtctgcattttgaacaacgcccgagcgattccgccgaacaaggctgctacgacatccgtccgccctgtaaccctgatcgccctaccggaatggggctggacaacgcctataacgttaacccggccactggccgcgcgcacggcgtggaaagctaccccggcgggttacccgcgttctatgccaatggcgttcacgggctacgacttttcgcgttcaacctccttcgcccggcagcgttacccacgcactggcactcagaagccatcgtcctgcacaacactcagcacctcttgaccgactcctcctgcctgtaa

SEQ ID NO: 397621 - DNA, 1557 bp, Salmonella enterica
atgattaaaaaagcacgagaaatcaagctacacaactatgtctgctatggcctcgcggatgtcatcggttctggcgcattcacgctggtcagcgcatggctgctctttttcctgaccaccttttgcgggctaacgccgattgaagcaggttctctgtttgccgtagcgcgtattgtcgatgtcatcatgtgcccactgatgggctacctttctgacaacttccataaaacccggctgggccgtcgttttggccgccgccgtttcttcctgctgttaagcattccgctggtatcggtttacagcctgctgtgggtcgaaggcttcagctactggatctatctgctggtctacattctgttcgaagtcgtctattcgatgattattattccttacgacaccctctccgcagagatgacgtccgactttaacaaacgttcaaaactgaccagcgcccggatgtatattgcgcaactggccggttttgtcgctgcgtttctccccgggcgactggtttcttactttggctcggactccgctgagtcgttcttttatgccggagcgatattcaccgtctcctttatggtcgtgttgttctttgtctacttcggcacctgggaacgctcgctggcagaaattgagcagaatgaacgtaaagttggcgatcgggaaaaactgccgctctcaacccgcctctacaatatctactatgattttgtttccacgctgaaaatcaagacctttcgctcacatctcgggatgtatctcggcggctctgtcgctcaggatatctttaactccgtatttacttatttcgttgtgttcgcgttgatgacctcctcggttatggcgtcaaacctactggcaacgatcaacggtctgcagttctttggcgtaggactggcgacctggctcaccctgcgtttctcaccgtcacgggcattcgccacccaagggacattggcgctactggcctttgccctgttcggcacggcgtggatgagcggcgccaccagcatcgctttactctatttggctgccgctattgctggcctggcgcgcggcgggatttacgcgattccgtggaataactacacctttgtcgccgatgtcgatgaaattctcacctgtagtcgccgtgaaggcattttcgccgggttcatgagcttgctgcgtaaagcctctcaggcgctctctattttcctggtgggcgcggccctgcaaatgtccggctttgtctcgggacaaaccagccaaccggcatccgccattaatatgattatggtcattatgatcgtgctaccggttgttctcaccctgtgggggatttggtctgccttccagttcaaggtcagcagccggacacacgccatcctcaatgaagaagtggcgcgcctcaaacgcggcgaaagcaaagccacagtcagcgtagaaaacaaagcggtgatcgaaagcctgacgggcctgccctacgagcagtgctggggagaaaacaccgtcggttatatcaatcgttgccacatgaaagcgcaatcgtctgcccccctgaacaatatctga

SEQ ID NO: 397622 - DNA, 1236 bp, Salmonella enterica
atgactggacaaagcctgaagactcaacaagggctatgggtacgaataggtctacccagggagcttttctggggattcattggcgtttttttgtttattaccggggcgaccattgaacaaagctggctgtcctcattactacagcagcacgggttttcgtcggttaatatcagcctactctcggcaatattcggcctgtgcgtcgccgtcgtctcctggttttctggtatcggcgcgggagtgctcggactacgccatttgatgtgggcagcgacggccgtctattttatcggctccgtgccgtttatttttgttgccctgccgcacaataattatcctctaatggtcgtgacttacgcgttacgtggcgtggcttatccgctgttcgcctactcgtttctggtatggatcaaccagcgctgtgaaacacgtattctgggccgtgccgtctcctggttttggatcgccttcggcgtggggatgaccattgtcgggccgtggtattccagcctggcgatcgcacacgtgggcgaaaccgccacgctgctcagcggctttatatttgttcctgccggcgcattctgcgcgctggtgcttaaccacgatcgcccctctttacaaaccagacaagcgcttggtccggcgctgctggaagggatagtcgtgctggttcgcgaccccaaaatgcggctggcggtggcggtgaaaaccattaatgacatcggcaaattttcgctggtgatcctgatgccggtctatttaccgcgtttcggctttagcattacggaatggctgacaatttgggggctggcgaacgtcgtgaatattttcgcaaactacctgtttggctggctgggtgacgttattggctggcgcaatacggtgatgtggttttccggcacgctgtgcggcggcgcaatgctggcagtgtgctacgcgccggtgttgtttcatcacagtaatacggcgctgtttctggcgctggcgatttatgctatcggcctgggcgctttcggcccactgagcgccttaattccgtccctgctcccgcaaaacaaaggtgcggccatctcgtgcctgaatctgggatcgggtctcagcaatttcgccgggccgcttatcgtcaccctctgcgtggggccgttgggcgtggaaaagacgctatgggtaattgcaggcctctatttcgccgccagtttgcttaccgcgccgctacggttgccggaaaaagcgtaa

SEQ ID NO: 397623 - DNA, 720 bp, Salmonella enterica
gtggttaaaatgccgaagtatattgatatatataaagagattaaaaaaagaattatttctggttattacgcgcaaaatagccagcttccggaaggaaaaaagtttgcgctgctttttgactgtagtgaactcaccgtgaccaaagcactggatatcctcgttaaggaaggtctggtggtcagaaaaaggggcttgggttcttttgtgaaattaccgttcaatacctcgtctttcaataaccaccttaagggaacaaaagcgcgctgtaaggaatcgggcgaaacgatagtgacgcgggttgtcgccttttcggcaatacccgcgccagccgatgtgcaggagaaactgcagcttagcagcgatgaaatggtttactcgatcctgcgcgtcagagttatagacgacgtccctgccattattgaaaaaacctttatgccagttaatgtgatccccggccttaactatgccaatgttgcagattctatttatacctatattaccgacgcgctgggttatcaaattcacagtagccatatgatgattaccgcgtcaatggccgacgaacagcaaagccaattactggaactcgacgtgccggaagtggttattcacgtagagcaaacagcttatttagacaacggaaaactcttcgaatattctgtcgcgacccaccgctataatcgatttaaattcgccacagaatttattaaatataattaa

SEQ ID NO: 397624 - DNA, 834 bp, Salmonella enterica
atgaaacgtattttaaattgtcgggcgtccgattttcagcagcaacccgatgctacagaactggttgcggcgattaaagcctcagagggccgcgtactgctggccgaagtggcggcggaaaccttgccgctctacccggatgttacgaatgctgagctggttgcggcgtttggtgccgatatgatcctgttgaagggctataacaccgccacgccagaggagggtgggtttcgccagataaaagcgcttaccggcaggctggtcggcgtcagtctggaggttacgcctgagcccgagtcagacaactcgcgccatctttcgcggcactcgcttgagcgcatccggacggcggattttctttgcctgacgggctacgataaaccggagctgaataagcgcaccatgctggacgccattcacctggcgaaggcgcattttcctggcttcatcatcgcggcgaaattctatactgccgggctggcgaccgcggcggaatatacggagtatgtggaggcgggcgcgcatgcggtggtgatccctgcgccgggaacttgtcaggggagccgtgaatcggcaattggcgaaattattgatgccgtgcacctggcgggcggccttgcgataaccaccatcagcaccagccaggagggcgccgatcccaataccgtcagcatgattggtctggcaagcaagcgctgcggcagcgatatccataactttggcgatgccggctgcgccgggattgccgatccagaagcgattcgcagtctctcaattaccgtacgcgggaaaaggcatacttatgtgagaatggcatcatctataatacgttga

SEQ ID NO: 397625 - DNA, 1035 bp, Salmonella enterica
atgattaattgcgcatttattgggtttggtaaaagtgcgacccgttatcatttaccctatgtcctgatccgtaacgataaatatcgcgtgaaaacgattttcgatattaaacctaagccggaaatcgaatctcaaccgccctatcagggcattcattttacgcgtgatgttaatgatattctgagtgacgaatccatacggctggtggtggtttgtacacacccggatagccactttgcctatgccaggatgtgtattgagcatggcaaaaatgtcatggtcgaaaagccgtttaccacgacggcggcagaagcgaaagcgctcctggcattggcgaagacacatggagtaaccgttacgccgttccagaatcgccgcttcgattcatgcttccttaccgttcagcaggtgattaaaagtggcctgctgggtgagattgtggaaattgaaagtcactttgactatttccgcccagatgtgcagccgcaggttaatcatccgtttaacggtgcgttttacggcctgggtattcacatgcttgatcagatgctcgcgctatttggtagaccacgccaggtggcttacgacattcgtagcctgcgattgccgcaaaacccggacgatacgtttgaagcgcagctttattacggcgacttgaaggcgattattaaaaccagccatctggtgatgaccccgtatccaaaatttatcgtccacggtacccgtggctcattcacacagatgcaaatcgatcagcaggagacatacttgaaaaataacgtaatgccggatcacccgtcgttttgtgagcatagcgaacccgggataattgaatatcttgatgagaaccaaagccctgtaaaacgcgcggtgccgacggttcgcggtgattatggtcgggtttatgatgcgttgtacgaaacgatagttaacggcgcagcgaattacgtcagcgaaaccgacattattaccaatcttgaaattcttgagggtggatttaaacattctacgccttctgttatcgcattggattaa

SEQ ID NO: 397626 - DNA, 1689 bp, Salmonella enterica
atgacactcttagacaatattgccagtttctctcaaaaactggcaggccaggtgcatctgcgaagcctgcgcgatagctttattatcgccattccttttttagtcctggccgggctttttattatggtcaactatgtcttcctcgataccaacggatttatgcggcatgttctttctgccgacaccatgacgcagtggcggggtatcggcgaacgtgcgctaaacggcacaatgaatattctctctattatgctcgccgtgctggtgtcatattcgctggccagcaagcgtaaattcgagagcccgatcattgccgcaatggtctcgctggcctgcttttttgtgttgatgccggtatctgtttccgtcacgccagccggcggcgacgcggtgacggtgggaggcgtagtcccttatgcgctcaccaacgcaggcggggtctttctggctattctgtgcgcctttatttctaccagtattttcctaaaaatctccggcacgtcggcgctgaagatctcactgggggaagacgtaccgccgatggtgcagcagtcattcaatgccctgtttgccattatgatcaccgtggcgcttttctccgtggtgacctttttgattaccagcgtgacgcatactgaattgtttgcgctgatccagacgctggtgcaaaagccgctggtacatctgactaccagcctgccagggtttattacgttaaccaccttaacgaacctgctgttttctttgggtatccacccttcgggaataattaacccggtactggagccgccgttgctggtcgccatgcaggagaatatggccgcgtttgctgccggtcaggtcccgccgcacatcatcgtgctgccgtttcgcgacttatatggccacatgggcggaaccggctctacgctggcgctgctgctggctattctgctgcgcagccgcatgagcagccataaaaaattcgccagaacggtgattgcgcccggcatttttaacattaatgagccggttatttttgggctgccggtgatcctcaatccactgatgatgatcccatttatcttctatccgcagataaactttatcatcgcctatttcgccacctcctggggctgggtgtcgcatatcgtcgcctatgtgccctggtcggtaccgcctttactttccgggtggctgggatcgggcggcgatctgcgcaacgtggtgttgcaggtggtattaattggcatcggggttgtggtttatcttcccttcctgttggcctacgagcggtctattagcaccaaaaaatcacagcagattattgaggatataaaagcggcgccagcggagcaggaaacgcccctccagccaaccaccgatgctgaggcccatctgctgaacggtaaaaatattgttctgatgtgtaatgaagggatgtccacctccatggtggcgaaaaaaatgcgacagtatgcgcagagtattaactgcaccgccaatattagcgctacgcatattggtaatctggaggagatttatcaaaaaacagacctgatattcctctcgccgcagttgtcgtatatggaaagtaaggttcgggaaacggtacgggatcgctgccgcattgcgcgcgttaatccccagcatttttcgaatatggatggcaaatcgcttattgagcatgccttaacgttgtttaaataa

SEQ ID NO: 397627 - DNA, 312 bp, Salmonella enterica
atgccagaaaattacgaagaaattattatgggccttatcacccacgctggtgcctgcaaaagcatggccttcgctgcgcttcaggcggctaagcggcaggagcacgccgaggcgcaacagttattagccgaggcggataaagaggcgaaaaaagcccatgagatccagaccaagttaattggcctggatgaaggcgaaggtaaaattccggtgcacctgattatggttcatgcccaggatcacctgatgacggcgatgctcgccagagaattaattgctgaacttatccttcttcaccagaataaagagtaa

SEQ ID NO: 397628 - DNA, 1380 bp, Salmonella enterica
atgaaatatcgctttgccgataatttttggctcggttgcgctgaatccgccacgcagacggaaggtttttgcaccgccggtgggaaaatgccttccaactgggatcacgcttttaaaaccagcccgcaccgcttttttaatcagatcgggccggaaaagacgcgcggtttctgggagaactaccgggacgacattcagcttatgcgggaaaccggcattaacagctatcgcacgtctctctcctgggcgcggctgatgcctgatggttaccacccggacgaggctgctgttgcccgctaccgcgacattatcctctgccttaaagaggcgggtattgagccagttatcacgttaatgcattttgacctgccgtttttgatgcagcaaaaaggaggctggctctctgcggaggtggtggacgccttcgtcaactatgcggaaacctgttttgagcagtttggcgacctggtcagccactggatcacctttaacgagccgattgtgcccattgaaggcggctatctgtatgattttcactaccctttcaggcgcgatttcgccagcgcggcgtgcgcggcattcaatacccagctcgctcacgccagggcggtgaacctttttcacgataagcgctacgcgggaaaaatcggtatcgtcctgaacctgacgccatcctacccgcgctcagaccattcggcggacgtttacgcggcggaaatcgccgatctcttttttaataagagcttcctggagccaagcctcaacggccgttaccccgaaaaactgatcgcgctgcttaagcagtacgaccaactgcctgcggtgtcagaggaggagctgcagatcatcaatcgcgccagggtggatatgctgggggtgaactactatcacccacggcgggtgcaggccagacaaacggccatcaatccggcgtccccctttatgccggactggttttttgatgcctatgaaatgccaggccgcatcatgaacacctcgcgcggctgggaaatctatccgcagggtgtttacgatattttgaccgatctacggcttaattatggaaatattccggtgtttatttccgaaaatggcatgggcgttgaaaacgaagagcgttggatggaaaccggcctggtaaacgacgcctaccgcatcgattttatccgtcagcatcttattgccgtgcatcgggccattaatgaaggtagccactgtttcggctatcactgctggacgtttattgataactggtcgtggctgaatggctataaaaatcgctacggcctgtaccgccttgatctgactacgatgcagcgcacgccaaaagcgagcgcgcaatggtacgccgcactaattaaaaataacggatttaattaa

SEQ ID NO: 397629 - DNA, 1188 bp, Salmonella enterica
atgaaaacttgtctcttttttacgaccttacttctgtcctgcaataccttggctgaaatcaactttgacacgccttctggcaatctcaggttatatggcgacgttgaatttaatatggatgccgccagtagcgccaatcaattactttctacccgaaccagcccgaataaggactgggaagccaccgataatgaacgctggagtattaatggccgtattctgctgggtatggatggctaccgcgagttaacaaacgggaatttcgccgggtttaccgcccagccgcttgcggacatgagcggtaatatgaatctggatgacgccgccttttattttggccagaaggcgggcggtaaaaacgactggcgggccaccgtcgggcgttttgaagcctacgatatgttcccgcttaatcaggatacctttattgaatattccggtaatacggcgaacgatctgtatgccgacggcttcggctacatttacatgatgaaagaaggccgtggccgaagtaacagcggcggcaactttatgcttagcaagtatgtcgacaactggtacttcgaactcaacaccctcgtcgaggacgggagcgatctctacgccgataacgcttaccacggctacaacctgacacgtaagaaaaacacagtttatcttcgtcccgttatcgcctggcgcggcgatggcttctcaaccgctatcgccgccgagagcaacgttgtcaataacgcgtacggttcttacgacgcaaacggcgagtggcaggatctctccggacgtaacggttttggctggacggcaacctttcagcctaaaagtgatattaccgctaacctgaatgtggcctatatggatgcgcaggatgaaaaggattttaccgctggggcaaatatcctctgggataagtttgagataggctatatctgggcgcagaataaaatcgaagattttaataaagacagcttccagtatcgcgacgattttatcgaccaggacggtaaatatcaaatacacaccatccatacttcatatcatttcgctaatgttttagatatggataactttaatatttaccttggcgcgtattggtcactgattaaacgtgagtcaaataacctgagttccgatggtgatgattctgacgatcgctacggcgtgcgcgtgcgctttaaatattatttctaa

SEQ ID NO: 397630 - DNA, 1167 bp, Salmonella enterica
atgaccttacaattaatcggcgctgatatgcacaacagcccgctgctgtccgtacacaataatacatctgacctgtttagctggagcccttatggcggctccgccccccggacaagttcatcccaaagtctgcccggctttaacggcgaaagaccagatccgctaaccagcgcatctcatctcggcaacggttatcgcgcatataacccttttctgcgccgctttacctgcccggataacgaaagtccattcggcgtgggtggcatcaacccctacgcttactgtagtggcgacccggttaatcagaccgaccccagcgggcatggcccgctcacctggctactggaagccggcgtgcgcattggtctgcgtatcggactcgaagaaatcatggctaaaaacatgctgaaagcattaaaaatggctggcaaagtggaaacccacctggaacgcttcgcatccatttccacaggcgcgagttctgcggttatggagcataaatctccgcaactggcggccaaactcagttgggcgtcttttgctttggggcttccggatgcaatctgcggttcgaaaaaattattctctcatctgtcacagatgaaggataaccttttgacaggcagcgagtttaaaagacccgtcatgaagaatagccagactgagttagacaaagaagcaataataagcagcactacaggtcatcggatactctttccacgtggttatacgaataactttatgggcaagggcgaagacgccttgctactccatggcaataaagaggggaagctttggtatggaacattcgacacactgaaccaccagcaggttccccctggcaataccactaaaggcggctttcataccgtacaggaactggtcgatcatctctttgatgaccatggcatcgatctgcgtgccagccagggcccgattcatctcttaagctgctatgccaaaagaggcgccgcgcaagcgttggcaaatgccaccggcagagaagtcattgcctattcgaaacatagcaccataaccaatagcctggattttatagaaaatcctgactattttatacgggtagaataccgtaagcatgacccgcgcagaaaattcaaatccaggcatcgggccaaaccacgtagcttcttacccagaattgtataa

SEQ ID NO: 397631 - DNA, 3375 bp, Salmonella enterica
gtgctttgctcccttaattatccgtctggcagtggcaccactgagataataatctatcctgaaaccgccgaagaatttaccgtcactctctatacgacaaaccattatctgaccaagattactcactcccagcttggtcatagcttcccctggagtctgggttatcaggatgtcggcatgggtgatagccttcagacgctcgtacaggttaaaacacctacagggttagagaaaaatgttatctataattatggtcagaaaaagggactgctccactttcccgagtcagcgaaactggatccattacctgcagtaacccagctcaccgtttcgcctggccacggtcagccagatatggtcacccactattttgctactgaaaataataacgattctgccaacatctttaaaaattacctgggctacgattaccacttaggtagcgactggtcaccaaacagtgatttcatgtacagccagtttgaccctgattacagttaccaaaccatcgtctctcaaccagcggttgacggtaatagcgagttgagaacagtttatacctataacaactatcatctgcaaacgtctgttaaaacaacggaaggcgataccactcacctggttgaagttaaatattatattgatgattatccttataaatcttttaacgaacttcctgcacaatttcagtcaccgaaaatacaaaccgaaacctggattaacggagctaaagagtcttctgtacaaagaacggggtttgaatacgacagctttggcaatttaacccgccaaatttcgctttgtgatgccaacggtaacgccaccgaacaaagcaccattattgcatccgtttattatgcagcgcagggagaaaaggatagcgcggacggctacaccggttgccctgccgatccgtggggatttactcactggcttaaaagcaaaacgacaacgcctcctattcttcacggttatgatgatgtcccggttcgaacgcaactttaccgctaccaatcgtctcaagtactggacgatatgcctgtcagttatgccgttattcccagcactaagacgttaacaagcagcgatatcaccggtagtaaaatgcgtattctactgcggcagcaatcggattatgttacggataaaaagtcagttgactttggccgtaagaaacaacaaacgctcagcatttttgacgacagtggaacgcgttacaccaaaacgcacgactttgcatgggcttatgctaacgctagcaccacatgcgctgaaacgctgacaacctacgataatctaaaagcatcaacgacaattattgtctctgattataccggacggatacaatcccagacagaccgactcaataacacccagaatcactattatgataccatgggacgtatcacacaaaccgtatatagcccaaatacaaaatacgaaagtataaaaaaattcacttactatctgattaatgacaaagataacaccaccccggaaatctcttcggagataactgatatcaatactggaaaaacagataaatatattttcgacagcgccgggagagttatctcacactctactaacgcggctgacttcgatcgtccagacgacctcttagaaattaaagaaattcaatgggacgcacgcggacgtaaacatagtgaaatcgaaaaagactattcccaggataaagataataaactcaaaacatattctgtaacgacacagtatcactatgataactggggacaaaatgattccacaagtttatcatatggtcggcaggatattaatgctcacgatcccgtacaccgttgcgatatcagccagacagtatcaaccaatggcgcattacacctgagctcaacaaaaatcgaatatgaccttcagggaaacgcagttaaacaaattacctgtgataaaaacggcgctgattatgccactacgttatccgaatacgatgggctaggccgattgcgtcaatttacggacgcgttgggctatatcactcagtgcacctgggatgactttgatcgtatgcagtccaaacgcctggcaaatggtgccctgcttgagtggacttacgtttcatattcaccagaaaatttgccaaccaccatctcgctaaatggcgtgcaggcgggcagccaggattacgatgggttggggcgtctgacggcaacgttctgtggaggccgcgccgatagagcgacttatacaggagcaagtcatactccggataccaccacagatgcgatggatcagaccattaaccacacctggatacctgaactacatagcgtaccttcgtccattaccggcacggatttcgaacaatcattcacctataatgatgtcaccggcgcccttttaaccagctcggaatcacaaagccgcaccacccaattccagtgttacgcttccggtctggccaaatctgagcagataaccgatagcgccagagcaatggttgaaatggatcacggctggacattaatgggtcagcctgtaacatataccgacatatccggtaatgttgttactatcgattatgacgattacggtcgttattcaactacaacggatgcggaggttattgccagcgtactctatgatgatgtaggccgcctttattatcaaaaatccaccagcgcaactgaagaagtggttattgaactggaactcgatgattacagtcgggagcatattcgaactataacgccttcttccggtgaagcaattactattactcaggaatattatgccaataatcaattaaaaaaccgttatacatcagtaggcttaaacgtcgtgcgtacagaaacctttgaatatgacgaatgtaatcgtctgcaacattattactgtgaaggttcatctccagttgtcgatgcctataatcattccatcagtcagcaggattttacctttgatgattataataatattacctgctgtgttaccactctggccgatggattaaaagacacggcaaactatgaattcaccaaccaaaacgatccttgtcagctcattacggtaacccattctttaaccagccattatcctgcacaatatacgctggaatatgacgataatggaagaatggtaaaagatgaagcaggccgcacactgagttatgataccgccggccgacttattcatatcgaggttaacaatactgaaagccattataaatatgattcatctaacaagcttattatgcaaacgttagatcaggataacagcacagcaatatattaccttgaagataaaataattagtgaagtaaataccaattcaaataaacacacgcgccaaattccgggcgcgatggggatttttagcgtcaatgacgacgctaaataa

SEQ ID NO: 397632 - DNA, 222 bp, Salmonella enterica
atggatgatgtttcctttgggcttcttacggagcagtatttttacagtaagtcactacgaccagcgactgagtggagttatcagaaggtcgttcgctcatttgaaagttttacaccgcgtaatcctgcgtgtatcgatcatcttacagtgctgaaatggcgacacagggtgcggaatgaccaacacagggcaacccggatcacttacattatttgctattga

SEQ ID NO: 397633 - DNA, 717 bp, Salmonella enterica
atgccggtcatgcagataggcacgctgcgcttgcaggttaatcgtaaagcgattaagaacctgcatatcagcgtcctgccgcccgacggcaaagtccgcgtttccgccccggaacacatgacggaaacggcgatacggatggcggtcgcctcccgctttcgctggatcagaaagcagcagcaggatttcgccagacagccccgccagtccgagagggagatggtcagcggagagtgccactatctttggggccgtaaatatcgcctgtttgtgattgagcgtcagggacgtcatgaggtgaagattgcggggaataataaacttcagctttacattcagccgggaaccagcaatgaaaataaggagcgggtattaaccgacttttatcggcacgaactgaagcgacaggtggctaaattactgcccgaatggcaggccagaaccggtgtccccccaacgttctggggcatcaaaaagatgaaaaccttttggggtacctgtaataccactacaaagagagtctggctcaatctggagctggtcaagaaaccgccggagtgtctggaatatattctggtgcatgaactggttcacctgctggagcgtcatcataacgaacgctttcgcctgcatatggaccgctttatccctaactggcgggaacgacgagatttgctcaataagatgccgctggcgtttgaggcatgggagtattga

SEQ ID NO: 397634 - DNA, 3096 bp, Salmonella enterica
ttgagcaccataggccagcgcgaacgcgccacacagcaacgtctgattcagttttttgttaaagatttaggataccgctatctggggcggagtgctggatatgccggtgacagcaatatcgacacggacatactgtgcacgtggctgaagcggcgcggcgtcagcgatacgctgattacccgcgtgcttcggcaactggattccgccgccgcgctgggcgaaggcaagaagctttattacgccaataaagaggtctatcgcctgctgcgttacggcgtgaaggaaaaagaaggcgcgggtgagcaaaatcagaccgtatggctgattgactgggcaaatcctgaagccaatgatttcgccatcgccgacgaggtgacggtaaaaggcgaatacagcaagcgcccggatctggtgctgtacgttaacggcatcgcgctgggtgtgattgagcttaaacgttcgtcggtccacgtcagcgaaggcatccggcagaatctcgataatcagaagaaaacctttatccgcaatttctttaccaccatgcaactggtgatggcgggtaacgatacgcaggggctacgttacggcaccatcgaaacgccggaaaaatattatcttgagtggaaagaagacaatcccggcacctacgcgcataagctcgactttcatttaagccgcctttgcagcaaatcaaggctgctggacattgttcataactacattgcctttgacgccggggtgaaaaaactgtgccgccataatcagttctttggcgtcgaggcggctaaacaacatattgcccgtcgtgaaggcgggattatctggcacacgcagggatcgggcaaaagcctgacgatggtctggctggcgaagtggatccgtgaaaacgtaccgaattcacgcgtgctgattgtgaccgaccgcaccgaactggatgaacagatcgaaggcgtgtttatgggcgtggatgaagagatttatcgcacttcgagcggcaacgatcttatcgcgacgctcaatcatcctaacccgtggctcatctgctcgctggtgcataagttcggtcgtcgtagtgaagcagaagacactgcggcaaccgacgacttcatcaccgagttgcagcaatccctgacgcaaacattccgcgccaaaggcgatctgttcgtcttcgtcgatgagtgccaccgcacgcagtccggcaagttgcataacgccatgacggctattctgccggaagccctgtttatcggttttactggcacgccgctgatgaagaaagataaaaagaaatcggtggaggtgttcggcccctatatccatacctacaagtttgatgaggcggtggccgacggcgtggtgctggatctgcgctatgaggcccgcgatattgaccagtatctgacgtcagagaaaaaggtcgatgactggtttgaagccaaaacgcgcggcctgtcgaatttagccaaaacccagcttaagcagaaatggggctcaatgcagaaactgctgtccagcaagtcgcggctggagcagatagtcaacgatattctgctggatatggacacccgtccgcgcctgatggacggacgtggtaacgccatgttggtatgcagcagcgtgtatcaggcctgtaaggtttacgagatgttcagccagaccgatctggcgggaaaagtggcgattgtaaccagcttccgtcccgacgcggccagtatcaaaggtgaagaaaccggcgcgggcctgaccgagaaactgtttaaattctcgacctatcgcaaaatgctggccgactattttgaacaaagcgaagataaggtcgctgggcgtatcgccgaattcgagcgggacgttaagcaacgctttattaatgagctggggcaaatgcgtctgcttatcgtggtggataagctgctgaccggctttgacgcgccgtccgccacctatctttatatcgataaaaccatgacagaccatacgctgtttcaggcgatttgtcgggtaaaccggctggatggggaagataaagagtacggctatattatcgattataaggatctgttccgctcgctggataaagcgataaccgattacactacgggcgcgtttgacgattacgatcgggatgatgttgatggcctgctgaaaaatcgtctggagcaggcgaagctggatctcgacagcgcgctggaggtagttcgcagcctgtgcgaacccgtcagggcaccgcgcgagttgccggactatcagcactatttctgcggccagtcaggggagaaccagacgatattgggcgaaaaagaggcgctgcgcctgtcgttctaccagaatgtcgcccgcctgctgcgcgcttacgccagcctggcgaatgaaatgtcggaagcgggttacaccgacgaaaaagcggaaagcattcgtagcgaagtcgctgagttcgagaaactacgctatgacattaaactgaccagcggcgatctgctggatatgaagcgctttgaacccgctatgcgccacctgctggatatgtacgttcgcgccgacggtagcgaagtgctgatggatttcgaagagttaagcctgatcgaactgattgttgaaaagggtgtggcggcaaccgctgccctgccggatgagatccgcaacaatcaggatgcgatggcggaaaccatcgaaaacaacgtgcgtaaaaccatcgtggatgaaaatccggttaacccgaaatactacggacgcatgtcgttgctgctggatgagcttattacccttcgccgccagaatgcgcttgattatcagcagtatctggaacgtatccgcgatttgtgcaaacaggttattcgcccggaacaaaccgccggaacttcctaccccgattcgatggacacgcaggcaaaacgtgcattctatgataatttcggccatgacgaagtgctggcaacccgcattgatacgacaatccgctataccaaaaaagcggagtggattggcgatcgttttaaggaacgagaactttcccgcgcgctgcgcgaagaaaccgccagctataacgtcaatattgatgacgtgcttgagcttgcccgcaagcagaaggaataccgctga

SEQ ID NO: 397635 - DNA, 1068 bp, Salmonella enterica
atgatgacatatacacaaggcaatttactggacgcgcccgtggaagcactggtgaatacggttaataccgtcggtgtcatgggtaaaggcatcgcgctgatgttcaaagagcgcttccccgacaatatgaaagcctatgccctcgcctgcaagcaaaagcaggtgataaccggcaagatgtttattaccgaaaccggcgagctgatggggccgcgctggatcgtcaacttccccaccaaacagcactggcgcgccgattcacgcatggagtggatcgaagacggtttacaggatctgcgccgctttttgatcgaagagaaagtgcagtccatcgccatccctccgctgggtgcgggcaacggcggcctgaactggtcggacgtccgggcgcggattgaatctgcgctgggcgaccttcaggacacggaaatcctgatttatgagcccaccgaaaaataccagaacgtcgccaagagtaccggcgtaaaaaagctcactcccgccagagcgatgatcgctgaactggtgcgccgctactgggtgctggggatggagtgcagcctgcttgagatccagaagctggcatggctgttacaacgcgccattgaacagcatcaacaggaagacgtgctaaaactgcggtttgaggcgcactattacggcccctatgcccccaacctgaaccatctgcttaacgcgctggatggcacttatctgaaagccgagaaacgcatcccggatagccaaccgctggacgtgatctggtttaacgatcgggaaaaagagcacgtcaacctctggctgaacagcgaggccaaagagtggctaccggcacttgagcaggtcagccagttgattgacggctttgaatcgccgtttggtctggagctgctggcgaccgttgactggctgctgacacgagaagaatgccagcccacgctggattctgtgaaagaggggctacaccagtggcctgcgggggaacgctgggccagccgtaagatgaagctatttgatgataagaatctgcaatttgccataaaccgtgtcatggagttccattgctga

SEQ ID NO: 397636 - DNA, 657 bp, Salmonella enterica
atggcttatgactacagcgccaacctcaacccggaaaaagccctgatctggcgcattgtccatcgggacaatatcccgtggatactggacaacggactgcactgcggtaacagtccggtgcaggctgcaaactggatcaatatcggcaacccggagcttatcgacaaacgcgccgggcatctggtgcctgccgggacgggcgggacgttgcatgactatgtgccgttttactttacccccttctcgccaatgctaatgaatatccacagcgggcgtggcggcattaagcagcgccccaatgaggaaatcgtcattctggtcagcagcctgcgaaacgtagcggcgcaaaacgtccccttcgtgtttaccgacagccacgcctactataactgggtcaactactatacccgtctggacgacctgagccagatcgactggccgatattacaggcgcgggattttcgtcgagatccggacgatccggccaaatttgaacgctatcaggccgaggcgttaatctggaagcattgcccaatcactctgctgggcgggatgatttgttacaacgatggcgtcaggttacaattagagcaatggctgtcgcaacgcaatctgtcaatgcccgttcacgcacgggccgggtggtacttctcatga

SEQ ID NO: 397637 - DNA, 1314 bp, Salmonella enterica
atggtggatttaatggtgagtgagcagcagtcgggtacggcggggaaagacgtgcctgcgggctttaagctgactgaggtggggtttattccgcaggactgggaagtaaagaccattggccaactgaacccatttatcacaagtggctccagaggctgggctgacttctatgtagattatggcgacttgtttgttcgtatcacgaatatgagccgtaattctatctatttggatactaaaacatctgaaaataaatttgtttctcttcctgctacctcaacagaaggaaaacgaacacaacttaataatggtgatgttttaatatctataacagcagatataggaattattgggtatatcgacgaatctattgcgaagcctgcatatattaaccaacacatatctttagttcgatttgatgatgattctattgataataaatttgtcgcatatttcttagccggtgagaatgtgcagaaaaaattcctcgcaaactccgatgtgggcgctaaagcgggaatgaaccttaatggtgtacggtcaatcatttttgccgttccaaccatacaagaacaatcagctattgctgaggcattgactgatgttgatacccttatcgttgaactgaaaaaagtcctggccaaaaaacaggccatcaaaacagccaccatgcagcaactgctgacgggtaaaacccgtttgccgcagtttgcgttaagagccgatgggacggttaaggggtataaaaagagtgagttgggggaaatcccagaagattggtcagttgtggagatgtctacggtaggtttatttggaagaggtcgagttattagtcataatgaaataaataagtcatattctcaatcgtatcctgtatattcatcccaaaccacaaattatggcatcatgggttacttagacacctttgattttgaaggtgagtttgtcacatggacaactgatggagttaatgctggtaaagttttttatagaaatggaagatttaactgcaccaatgtgtgtggtgtaattaaagttaacgatgcaaatgcacaatatatagctatagctatggatcaagaggcaagaaaatttgtatcaacaaacttagcaaaccctaaactaatgaatgggattgctaaacaggttttaatacgaaaacctaattctcttgaagaacaaaccgccatcgccaccatcctatctgatatggataaagaaattcagaccttgcaacagcgtctggacaaaacccgccagcttaaacagggaatgatgcaggaactgctaaccgggaaaacccgcttaatatag

SEQ ID NO: 397638 - DNA, 2439 bp, Salmonella enterica
atggctatcaagaaaaccgaactctactcctccctgtgggcaagctgcgacgagttgcgcggcgggatggacgccagccagtacaaggactacgtactgaccatgctgtttatgaagtacgtttccgacaaatataagggcgatccctacgggatgatcgttatcccgaaaggggccagctttgacgatatggtcgcgctgaaaggtaataaagaaatcggcgaaaaaattgacattattatgcaaacgctggcggaagagaatggcctgaagggcgttatcagcgaagccagctttaacgatgaagacaagctcggcaaaggcaaagagatgattgaccgcctgtcaaagctggtcggcatctttgaggggctggatctgtccggcaaccgggccgaaggcgacgatctgctgggcgatgcctatgaatacctgatgcgccacttcgccaccgagtccggcaaaagcaagggtcagttttacacgcctgcggaggtgtcgcgcgttctggcgaaggtgatcggcattacgcccgagacgccgcaggatgccacggtatacgacccgacctgcggctccggctcgctgctgctcaaagtcagcgacgaagcccgacgcgggctgtcgatcttcgggcaggagatggacaacgccaccagcgcgctggcacggatgaacatgatcctgcacaacaacgccaccgctaaaatctggcagggcaataccctgagcgatccgcagtggaaagaggccaacggcaaactgaaaaccttcgacttcgccgtggcgaacccgccattttccaataaaaactggaccagcggactggatctgaaaagagatccgtttgagcgtttcgtctggggcgtgccgccggagaagaacggcgactacgcctttctgctgcatatcatcaagagcctgaaaagcaccggcaaaggggcggtgatcctgccgcatggcgtactgtttcgcggcaacgccgaggcgaatatccgcgaaaacctgatcaagcagggctatatcaaaggcattatcggtttaccggccaacctgttttacggcaccggcatcccggcgtgcattatcgtgattgacaaggagcacgcccacagccgcaaaggcatttttatgatcgacgccagccggggctttatcaaggacggcaacaaaaaccgcctgcgcagccgggatattcaccgcatcgtggacgtgtttaaccaccagcgcacggtgcccggctacagccggatggtgccgctaagcgacatcgccgggaatgattacaacctgaatatccctcgctatatcgacggcggcgagccggaagatctgcacgatctgactgcacacttacagggcggtattccggcgcgcgatgttgatgccttacaggattactggcgggtcttccctgccctgcgcgacgtgctgtttgccgacgatcgccccggctactgtcgggcacaggtagaagctcagcaggttaagccgaccattctggcgcatcaggaatttaaggatttcgccacccgcagcctgctgccgtttaaggcgtgggtgaaagaggcagcgctggcggagattggcaagggcgataaacccaaggcgttgatccacgatattggcgagatgctgctggcgcagtacgccaacagcgagctgctgaataaatatagcgtgtaccagatcctgatggactactgggccgacgccatgcaggacgatgtctacgtgatcacgcaggacggctggcaagccgccgcgcaaattcgtgaactccagccggtaaaaggcaaggacggcaaaaacgtctggaaagaagcgcacgattttgagtttgacaagcggcgctacaaggccgacgtgctgccccgttcactggtggaaaaacgctgtttcccggagctggtggacgcgctgaaccgtgcacaggagcgcagtgaagaagccagccgtcagttaatcgaattaatcgaggagcaggcaggggaagaggatctgctgtccgaggcgaagaacgctaaagataaaatcacgcaaaagtcggttaatgaccgactgacctatctgaaagaaaacgctggcgacccggacgaactggcggtagtgacccgctgtctggcgttgattaaagcagaggctaatgcgaaaaaggcgctgaaaaccgcacaggaagcgctggatcgcgcggtgtttaagcattatcccacgctggatgacgcggcgatcaaagcgctggtggtgcaggacaaatggctggcgacattgcaggccgggattaaggcggagattgagcgtattacccagcaactggcggatcgcgtgaaggagctggaagagcgctatgccgagccgctaccggcgctggaagcgtccgttgaagcgttgagcgagaaggtggccgggcatttgcgggcgatggggctggtgtggtga

SEQ ID NO: 397639 - DNA, 240 bp, Salmonella enterica
atgaatgaagacgagatctatcgccgtatccggcaggcgctcgccggtgcgccgcgtaatcagtacaccgtcgagctgcatctgcaaatgattaaatatgccgacgagctggaacacattacggcaaaagccttttgcgaaggcaccggtctgagccacagcctcggcaccgagttcagcaaaatgcgtaacttaacccgtcggctgaaagccgctggcctgaacaccgatctgctgtaa

SEQ ID NO: 397640 - DNA, 462 bp, Salmonella enterica
atggctacgatccccactcaaacacacccattacttgccgttccttttaatgccgccacggacttcaccatccttgccagccactgcgaaaccttcgccgaaaccctgattgaaaacgacgatcccacgctaaaaatggcgctctgcggcagactcaacgcttgtctgacgttgctccagcccacgttgttagaacctgttccgccccatcttgttgaaagcctgaccgttgatgccctccctgcaaattccccccgtttcgatcctgaatgtactgaactttgccgctactgccttgccctgacgcagacgctggcggggcagggattttcctccgaaacggagaaacggcttagttatctgctgtatgacctgatcaactacttcgcggcggaaatgcaagccccgcgctggctgcgtaccgccgacggcgtgaagtttattgacggggaggcggcatga

SEQ ID NO: 397641 - DNA, 576 bp, Salmonella enterica
atggcgctcggtatttctctcattacgctggctggacgcggcacaacgccgatcaccgcgcttcccgtagtggccagcctgggcttcggtttctccatcggttttttcactgttgtcctgaatatggggcttatcgttctacaactggtcattctgaagcggaatttccccaaaaggcagtttctgcaaataccgtttgcgttcttattcggctcgttcattgatttctggatgcatatcgtaccgctaccagaagtgatgaccttttcctggagcatactgttcctggttctcggcgttattattcaggcattcggtatttttgctcaagttaccgccaatgtggtgattctggcgggagaaggtgccgtagtcgcgttaactaccgtgattgaccggaaattcgggcttctaaaaaccgcccttgacgcaacccttgtcctgctcgcagtcttgctctcgctgctgatattcggccaggttgagggcgtccgggaaggcactctcatttcagcccttttcgtcggtaaaacaacagatatattttttgcgatgaagaagcggcttgtctcatag

SEQ ID NO: 397642 - DNA, 159 bp, Salmonella enterica
atgaaaagacaaattggaccgcccccatacaaagacgagcaaaatatttactatgctgggttcaattcagtggtggctaccagcttgtcctcttttggttggggctggcacaatgaggcggaaatacaggtttgcgacgccttcaatcccccacagtaa

SEQ ID NO: 397643 - DNA, 771 bp, Salmonella enterica
atgacgatgagtaagcacgacttcacgcttcaactccttcttgacgctggtatttccgaaggcatgcgcgttttggatgtaggctgtggatacggtgatgtcaccttcatgttgagcagattggtaacggcaacgggagaagtcgtaggtattgatcatgacagcaatgccttgagcatagctcgcgagcgtaaagctacattaggtcagcaagatcaacctatctttatccaaagcggcctgctcgatcttccggaatcagtcggaaccttcgacgccataataggccgccgagtgcttatgtatcaggcagataccgtagcggcaaccacagcgctgacaaaacacctgagtccgggaggggtgatggtcttccaggaacatgacacaacgatggctccggctagcgtggattcattcacactgcacagaaaagcgcagagttggatccagcaaatgattgaccgtgaaggtgccgaccttcatatcgggtttaatctgcacagcatactgacgaatgccggcttaattgttgaatcagtccgtgcagaatgccttatacaaacgcctgacacaccttacagtctgggcaatatcgttaaggcttgtctgccgcgaattatcactctcggcgttgcgacagctgatgaaatcgagatcgagacgctacagcaacgtctcgacgatgaacgtagtcagtcaaccagtatatacattggcgatgtcatattcggggtatgggctcgcaagcctgtcatgagtaggccgtaa

SEQ ID NO: 397644 - DNA, 969 bp, Salmonella enterica
atgcaaacgacaatgttaggtaaaaacggcccccgcgtttctcaactgggctttggcgtcatgcagatggcgatgaaaaagccgcataacgaccagcaaagcattaccaccattcaggccgcgctggatgccgggatcaatttccttgatgttgctgatttttatggcatgggacgcggtgaatatctggtcggtcaggccatcaggggccgccgggatcaggcgtttctcagcgtgaaatgcggcgcgatgttctcaccgaccggcgctttccttggcgtggacggtcgcccgcaggcgataaaaaacttcgccgcttactcgctgcaacggctgggggtggaggttatcgatctttatcagccgtgccgcgccgatccgaacgtgccctgggaagaaaccatcggcgcggtcgccgatctgatcaaagagggcaaagtccgctatcttggcgtgtccgaagtcggtgccgaccttctgcgccgcgctcatcacatccacccggtcagtgcgctggaaattgaatactcgctggcctgccgttttatcgaagcggatatcctgcccacggcgcgcgagcttggcgtcgccgttgttccttatcgtattctggccgatggtctgcttaccggaaccgtgtcggcaaggagttctgcgcattacgccgttccccgcatggaaggcgaaaacctcgaacataatctgaaacccatagcagtgcttaaggaactggccgccgcgcgtggatgcgctccggcgcaactggccatcgcctggctgctgtcaaggggtgaggatatggttccggtgctgggtatgagccgtcctgagcgcgtggcggaaaaccttcaggcgctgcacatcacgctgacgaccgaagagctggcgatactggatagcgcttttgcgcctgatgccatcattggcgatcgctatccggcgcaggtaatgcgtcttgcggcccggtaa

SEQ ID NO: 397645 - DNA, 765 bp, Salmonella enterica
atgataaaaagattgtcccgactgctgctgctcgccttactgatagcctccgcgcaggcgcaggcggctacgttccctgatattaaacaacctcaggcgccgctcaccgccatcaccccgttagatgtttcgccaaaagatatcgacaaggcagtgaaggactggaactcacgttccgcccgcattgctaaaacgcccggtttcatcagcgccactttgtatcagtcgattctgcccgatcacccttacccgttgatcgaagtcgcccagtggcaatcttatacggcctggatggccgcgcatgaaaaccaggatcataaagccctgaccggattttaccggccaactgtcgcttatacgcatttagctacccgcgatggtgacccaacggccaacacgctgctggaacgggttaaaaaagatcccgccatcagtaaccccgaagccccatttgttttcatcaacctgatgcagatggcgcaaaaagatgtagcccccttcatcgccgactggaaaatacgctcgcaactgacccgtcaacaggcgggttcgatgggggccaccctgtacaaaaaccagttgccggacagtcgttacccgattatcaatatcagccagtggcagtcctacaacgccttcattgatgcccagaacgatgcgacctactcccggcaactggcaaaagacctgaatcaaaccgccagtatcagactgatacgcggttttttccgcccggtggcgtatcagatccagacttacgattaa

SEQ ID NO: 397646 - DNA, 1059 bp, Salmonella enterica
atgaaaccagagtatttgagcagaaaactgatggcgatattgtttgccgcctcgttgctacccgccacggcgtcagccgcgcaaaccctgacctacagcgaccatgagccgctggggggaatgcgtacacgttttatcaatgatgtctttttcccggcgattgaaaaggagtcgaacggacgtctgaaaatagaggcgcactggggcggtgagctcagcactggttacgaggcgttacgcaatgttggcaaggagaaaaaggcggatatggccgtggtcgtccctgaatacgctgccgacgcactccctctgaaccagatattcaaaagctttcccgtcggtccctccggcgatcggcaggttgccttttttcgccgcgcttatgtcgatatcccggcactccctgctgagttgaagaaaaacaatgtggtagaggtctttctcgccaccggttatccgcagtccttttttagcaccaaggccatggctaccttgaatgatctcaacggcggcacatggcgttccgccagcttctggcaacgggattttctgcaacacgcaggcgcgaagccggtaaccatgccatggggcgaagcaacctacaacgcgctgaaaagcggcgctatcgacggcatgatgctgaacgtggacagcggctacgatctgaaagcgtatcagttcgctccccatgtgttgatcgccaaagatctgtggctggggcatctctacattgtggcgatgaacaaagatacctgggactcgctttcccatgaagatcgagctgctattcaacgcgccgctgagaccgcgtatcaatccctgggttcggtgatggaccgcaatttcaacacccaaatagacgatttacgcaaagtcggcgcaacggtgcgtgttctgcaaccgcaagaggtcgcgcaatgggcaactgtcaccggttatcgggcggcgcaggataagtgggtaaaagaacaggaagccaaaggcgtcaacgatgcaggaacggtgatggcgcaggttagctccatcatggatgaaacgatgcaacaaaagacgcactaa

SEQ ID NO: 397647 - DNA, 801 bp, Salmonella enterica
atggttcaaccttttattgtccacaccgaaaacgccgatctggcctgctacaaggaaggcagcggcccgttgctgctgctgattgtagggggtaatggcgatagcggtcgctttattgcgctgtcggcgcaactggccgatcgctacaccgtcgtgcgttacgatcgccgggccaatgcccgtagcagcggcgacacgcaggccgagctggatatggcgcaacaagggcgtgatgccgccgccgtcattcgcgccgcaggcgcggagcccgcctatgtcttcgggaacagcgccggagccaatattgcgctgaagctgactcaggatcacccgcaactggtacgcggtctggtcgatcatgagccgccagtcaccgactttttacccgaggccgaagcgacaccctggcgggcattttttgaccgggtgtacggcacatatctgaccgaaggcggcgcggcggcaatgcggctgttcgccactaccttcgtcggcatggagcagatcgctgctgcaccgggcgatcaggatggcgatttcgagcggtttctggcgcatgaatttcaggttatcaaccattttgttccggatctggatgccttacgccgtggcggcgtgccgatggtcactgctgtgggccgtgccagcggcaatgcgttttatgcgcaaacggcgcgcgagctggcgcagcaattgccctgcccgtgcattgaagtcagtggtcatcatctgagctacgccagcgaaccggccatgtttgccgatgagctccatcagattttgctgtcgttgaggaaataa

SEQ ID NO: 397648 - DNA, 582 bp, Salmonella enterica
atgcaaaattatctggaagatcgccagcaaattaccgatttactcaccggatggatccaccgcgatctgggggaatgggatcagttgcgttccttgtttcatcctgatggcaccatcgaaatcacctggtttgaagggttagccagcgattttgtcgatggctcaatgcgcatgggcgcatcggatgtgcgcaccaaacatctgatcggtacgccggtagtcaccttcaatgcccgcgcgacaaaggccattgtcgaaaccaacgccatgattatcggcgagaacgtgaagctggatctgggctgcatcggccacaaccgtttttacgatatggtggaaaaacgcgatggcgtatggaagctgttccaccgccagagcatttacgatatggcaagtttcactttcccgctcggtgtggttgagattgaccaaagtaccgtggcgaaatatccccgtgaatacgccgcgctggcgtatctgctggataaaagcggattcccggtccagcgcgtgtttgccacccgtggcagtgcgcttgagcaacagatgaaagtggatggcaagcgctggctggcggcctga

SEQ ID NO: 397649 - DNA, 888 bp, Salmonella enterica
atggaactacgtcacttgcgttattttcttaccgtcgcggaggaaggccattttggtcgtgccgccgggcggctgaacattgttcccccggcgctcagtatgcaaatcaaggcgctggaagaagaactcggtggcccgctgtttgtgcgtaccagccgaaaagtggaattgaccgaagccgggcggttgctcagggtcgaagcgcagcgcacgctggagcaggcggaacatgcccgacggacggttcagcggtcaatacgcggtgaaatcggccatgtgcgtgtcggctttgccggtaacgctgtctttagcggcaggctgacgaatgacctgcgtgcctttcgcaaagcctatcctgatgctgatctggtggtgcgtgaagtcgccccgctgttgcaggctgacgccatcctggcaggtcagctcgacattggttacgtccctgaccacagtaaaattcatgattcagcgttggtggcggagcagacgggtatctggcgacgtcaggtcgcaatggctgatgaccatccgctgaccgctcaggcgtctctgacggtggcgatgctggcggcggaaccgctcattttttacgatacgcatggtgctgacgaacctctttacacggcccttaccgctattctgggacatatcccgcgtatcgctcactgtaccgccagtactcttagcgtgctcgctctggccgccgccgggcaggggctggcgctggtgcctgagccgctgatgcatgtgaccatccccgggctggtgtaccggccgctggatgcgccagaactggcggccaatctgatgcttatcagcaggcgagaagagaataatggtgccgtgcaggcttttctgaggatagcgcgtgaaaacgcgggtatgtga

SEQ ID NO: 397650 - DNA, 462 bp, Salmonella enterica
atggctactacccccatccagacacacccgttacttgccgttcccttcaacgccgccacggacttcaccgtcctttccagccactgcgaaaacttcgccgaaactctgattgaaaacgatgatcccacgctaaaaatggcgttctgcggcagactcaacgcttgtctgacgctacttcagcccgcgctgttagaacctgttccgccccatcttgttgaaagtctgaccgttgatgccctccctgcgaattccccccgtttcgatcctgaatgtaccgaactttgccgctactgccttgccctgacgcagacgctggcggggcagggattttcttctgaaacggagaaacaccttagtggcctgttgtatgaactgatcaactattttacggcagaaatgaaagccccacgctggctgcgtactgccaacggcgtgaagcttatcgacgaggtggcggcatga

SEQ ID NO: 397651 - DNA, 222 bp, Salmonella enterica
atgaggcaaccggactggcattccgccgacattatcgcggcgctgaaaaaacgtggcacttcgctgtcagcgctttcccgtcaggctgggctggcatcatccacactggcaaatgcgcttaaccgccgctggcccaaaggagaaaggctgattgccgaagcgctgggcgttacgccagaacacatctggccttcccgttaccgcaaacctgaatacttctag

SEQ ID NO: 397652 - DNA, 348 bp, Salmonella enterica
gtgaaaactcaggcctccgtcgcgatgttctgcgacccggtgtttgcagaggtctgcaccggtaaacggaccaaccgtcctgataacaggtgcttctttcaggttgtgaagcgtggcgctgtcaacgacagcatagggcaagggggagactacgtcagtgctactggtgcagaaaggaaaaactgtttttgcgtcaaaaaggttatttgcgagcctgcactgccgcgcttcgcttgtcttctcccgaccttccaccagcaagagcgggcagaagatcgggagagtctgttttgttctagaagtattcaggtttgcggtaacgggaaggccagatgtgttctggcgtaa

SEQ ID NO: 397653 - DNA, 204 bp, Salmonella enterica
atgaatcctatttttaaattcgcatttatttttattgtcaatattatatttttaataaatgcttcagccacaacgatggacaaagataaatttgtggaagcgaacggtatcaaaattcattaccttgagggggggcgagggaccgccgctgttattgattcatggtggaggactgacggcgaaaagctggcagggattagctaa

SEQ ID NO: 397654 - DNA, 705 bp, Salmonella enterica
  misc_feature (689)..(698): n is a, c, g, or t
atgtctggctttaaaaaagactttctttgggggggcgctgtagccgcacatcaacttgagggcggctggaatgaaggaggtaaaggcgtcagtattgcagacgtaatgacagcgggcgcatatggcgttccgcgtgaggttaccgacggtattattgaggggcgtaactatccaaatcatgaggcgattgatttttatcattcttataaagaagatataaagttatttgcggagatgggttttaagtgttttcgtacttcaattgcctggacaaggattttcccgaatggggatgaaatagaacccaatgaggaagggttgcaattttatgatgatatgtttgacgaatgtctaaaatataatatcgagcctgtgattactttatctcattttgagatgccatatcaccttgtaacaaaatatggtgggtggcggaatcgtaaaatgatagagtttttttcgaggtttgcccgagtagtttttagtcgttaccgaactaaagtaaaatattggatgacttttaacgagattaataatcaagttaattttaatgaaagcttttgtccgtttactaattcaggtattatttattctgaacatgaagatcgctatgaacgtgagaaaatcatgtatcaggcggttcattatgaattagtcgccagcgcaatagcggtagatgtggggcatgnnnnnnnnnnctattaa

SEQ ID NO: 397655 - DNA, 471 bp, Salmonella enterica
atgattaacaggaatgttatattcgccggggtcattcttatcgcagggatagtcatcggcgtagtgatctactggcatgcaacttacgcgttgaaaaatttctcctgtgaggggcagctaacgttattaaataaaaaaacgtcctatgatttattaataaactttacgtttgccgatggcaccggtctctatgaggccaccggacgttataaagatcagtatggcaatgtggtaagtaccagtaataaggtcgtgttcgattattggcgcaaagagaaaaatatttatttaatctcgaaagaaaccaacgaactgccggccaccacgacgccgcttatctcatggaaacctgattttttccgtaaacgtcatcgcggtattactttccaggtgatccaggaaaacaccgagggctatttattcctctacgatcatactccgctattctattgtactttgcataacagataa

SEQ ID NO: 397656 - DNA, 789 bp, Salmonella enterica
gtgaaaaaagtaattattatcaacaacatagttgtttttgaatccgaaaagaaccgtcttacgccgctggctgactatccgaacaggggcgtcacgctccacgcgccggtctccgcctgccttttgttattattacagcataaccaccagcccgtgacgcagaagtttttatttagcgaggtatgggaaaaaaatggcgccattgtgtcaacaaacgccatttaccaaagtattgctttgctcaggaaaggcctaagggcggcgggcctgacggaagatattattattacattgcctaaagtgggttttaaagccgacgccacgataaaaatcgttccggagcacagtcttgttacaacagtgtccgaggttaaggaaaaggcgctctctgacaaatcttcgcctctgctccctgaacagcatcaccccgcgccgaaaaaggcgttttttcatccactccgcctgttgattgccgccagcggcgttgctatcttactgtatcttttttatcagtacctacagccgggatcaggctatacgcattacacctacactggaaaaattcatgactgcgagctctattcatcgtggtcaggaaaagaaaaaagcacaaatgtatttcagcagatctataccagccagaatctctcctgcccgcccggaagattcatctatatgacgctaaataactcgcaatcaggcacctctgttttagtgtgcagagagcgtatcgattctccgcaagctaaatgcaaagcgttattttttatggggaaatacgatgattaa

SEQ ID NO: 397657 - DNA, 366 bp, Salmonella enterica
atggagtatcagttatacggattcattcttaacgaagaggtcttttttgatatcaagaaggccagagtattcagattgcctacaaataaaacggaaacggttattttattctgtggcgttttttttaaccgtaccatgcttaatccgcgacaggagtgtgcatcacgagatgaattactttataacgtctgggaaaagaatgagttaagtgcttcgacgcaacggttatgtaaagttataaatagcctgaacgaaaaattaaatgcgcttggtctatccgaaaaagcgatcgttagcgtcaaaggacggggctatatattgaggctggatgatgtccagccgctgtataacgtagttaatgaataa

SEQ ID NO: 397658 - DNA, 1926 bp, Salmonella enterica
atgaaaataaaatctttttttctgaatctaaaactcaataagaaaatgtttcttgggtttttcattatgatcataataatgattgctattatgtcctccggcctgctgggtttaagtcaaattcgtgagcgcgtcgataaaaatgcaataagtatagaccttctgaatcatctgtcagccgcgaaattaagtagaattagttatgaatattccggcgatgtggcatttgtaaaacaaaataagaaagcgatggatgcgttatcccacaatcttgagcgcttataccaatttcagtggtctgatgacggggtggcattactgaataaaagccaggcggctctgaaacaatgtttcgctggcagagaagtgttcgacgtggtgatggcgaaaaagcaagctctacaaaaacgtcttgatagccatgatttttacctgaaatcgacggaattgcatcgctggagttatgaccagatcctgccgccggatgagaggatgagaatgtcgcaactgagctttgcgatgagcgatttagattcgttgctggacgaatatcaggaattacccacagaggcgcaacagcaagagatcaaaacccatattgcggaaagcattgcgtatgccgaacagctccttccgctgttaagtaccgatcggcaggcgtttgtccgctccgctatccagcagatgcgtaactatgctgacgacgtcgcgccctaccgtcatctggaacaggagctgaagcagatttcggataaattagccgcagatgcaaaggagctggcgacgaatatcaacggtatccatcagctgatgcaacaacgggtcacggaagtttctctggcggcgaagtggcaaatggaactggtggcgtccatcggcatctttgttggcattgttctggcgtggctgattacgcggtcgattacgcttcccttaatggagacgttacgtctggcggaacagattgccgaaggcgatctcacacacgatctgcagaccgggcgcggtgatgaaatcggcttactgatgcaatcgatgtcgacaatgaataaaaacctgaagagcattatccacgatgtcagagagggcgtggagtgcgtggcgcgctcctctggtgagatcgcgtcgggtaatatcgacctttcctcccgaacggaagaacaggcggcagcggtcgtggagacggcggcgagtatggaagagctgaactcaaccattgcgctcaacgcctcaaatgcgaaagatgcgctgaaattgtctgagagcgcggcgaaaaaggcgaatgaaggatgccagatttcgcaggcggttattgaatccatgaagaacgttcaatccagctcacaccgcatttcagagatcacatcggtgattaacggaatcgcctttcagaccaatattctggcattgaatgccgcggttgaggcggcgcgggccggagaacaagggaaaggctttgccgtcgtggctggcgaggtgcggaaccttgcccagcgtagcgcccagtcggcaaaagagatcgaggagttaattgcgcaatccgtggaatatgtcgattgcggattttcacaagtggagcgcgcaggggtagcgatagcggatattgaactatcggttacgcagatgcgcaatatcatgagcgatatggccgtggcgacggatgagcaaagccgtggggtgtctcaaatcgctctggcgatggcggaaatggataccacgacgcagcagaacgccgcgctggttgaagaatcttccgcagcggcaagctcgctggaagagcaggcgcttaaattagaaacggcaatctctgtttttcgcgtcgccgctgacggatcgaccacgccgcgaccaccgatgaagagtaaagccattcagccccgaacggtaagctctgacgccgccgagggaagctgggtaaaattctaa

SEQ ID NO: 397659 - DNA, 273 bp, Salmonella enterica
atgaaacttgccgccctcgctctgacgctgatacccggtatcgcgatcgcctcctcatggagctcgccaggctttccgaggttctcggcgcaggaaaccggacgctttaccagccagtccgcgttaacaaaccacgctgacgctaaaacacggatacggttttgtacgccagtacggcgacgatactgtgatggtcgtctgggcgggccgccgctaatcgtgacgctactggtcccctcgcgtaccggtagccccttcaaaacaaaaaactaa

SEQ ID NO: 397660 - DNA, 168 bp, Salmonella enterica
atgcttgaatgcaccaataaagccagtatccgtaaacgtaagcttcccgcagcactggcggtctggctgagaagcaatttatcctgccagaaaagagaaaacggcccaaagaaaggaccgttcgaatcgcaaaaactcagtatcccgttcactcaaaacattaagtga

SEQ ID NO: 397661 - DNA, 213 bp, Salmonella enterica
atgtctaataaaatgactggtttagtaaaatggtttaactctgaaaaaggcttcggcttcattacgccagcagatggtagcaaagatgtattcgtacatttttctgctatccagagcaacgattataaaacactggacgaagggcagaaggttgagttctcgattgaaaatggcgccaaaggcccggcagcagctaacgttatcacgctgtaa

SEQ ID NO: 397662 - DNA, 234 bp, Salmonella enterica
atgagcgaagtggaccttcaaatctggtacccggcacagctactgccagtgaaaattattcttggcaaagccgtgctggctgtaggtaaacagggccgaccgattaatacccgaactttgctggaataccttcaggtcatgcaggacaaacaaaaaaggcgggatgagaaaatcgccatgcagactgcgattgatgttctcagggataatcagcgcattaacggcagacgttaa

SEQ ID NO: 397663 - DNA, 675 bp, Salmonella enterica
atgattaccaccgcaatatttcccggaagatatattcagggcgctaatgctattgagaaatgtctgggaaatgaattagcccgttttggtaaaaatgcgatgattcttgaggatcccattgttcacaaaaacattggaggaaaaattaccgaagccttgaatcccaacgttacgtttgaacttgaaatatttaattgcgaatgctgtgatgaagagatcgagagaatttctacctcagcacaggcatgttcggcagaaatgattgtgggtatcggaggcggtaagacactggatacggccaaagccgttggcgccaaattgaatattccgattatcgttattcctactcttgcctccaccgatgcgccatgcagttccctcgttgtgatttataccgctgaaggtcagttcaagcgctatatgatgattccccataacccttcgctggtttttgtcgattctcaagtgatcgccgacgcacctgtgcgttttctgctttctgggataggcgatgccgtagcgacatggttcgaagcggaagattgtcgcattaaaggtgcaggaaacatgaccggaaggcctgggccaatgtccgcctacgccctggcaaaattatgcttcgatacgttgctaacctatggtgaacaggcagtttctgcatgtcgcatgcactag

SEQ ID NO: 397664 - DNA, 201 bp, Salmonella enterica
atgaaacgatttaaacaaatggcagcaatgctgttttttgcattactgaccgcgggttttacgtcgtctgctatggcatcatcgggtagtggtggtggcccatgggattttgatttttcgggtccatggcttttttgtaagctacaaccccctgatactctgcaattaccgccacctcttggtgagtattgctggcattaa

SEQ ID NO: 397665 - DNA, 177 bp, Salmonella enterica
atgtccctggccgaaggtaacctccggttgctcaaattcgttcctgacgaatttgtcgttcacttgccgcgttactcggcctgcggcctcgcctctacgggccagcgcaaacactattcaaggcacaagcgccttgtcctgcaactcgaattatttagggttaagaggattgcgtaa

SEQ ID NO: 397666 - DNA, 162 bp, Salmonella enterica
atgatgattagcactgtcgtacctaccaacaataacattaagaaacatgggatgaccaaaaagcgtaccctggtaaaatacggcatactctcgctggcgctggcgctggcgctggcgctggcgctggcgctggccacttcagtaacattcagcgcagtataa

SEQ ID NO: 397667 - DNA, 198 bp, Salmonella enterica
atggatcccgaagttgaaattgatgatgatacctatgatgaatgccgtgaggtgctatcacgcatacttgaagatgcatacactcaaagcgggacattccgcagactgatgaattatgcctacgatcaggaattgcatgatgtagaacaacgctggttgctgggagccggagaaaaactttggaactaccgtaactga

SEQ ID NO: 397668 - DNA, 2274 bp, Salmonella enterica
atggtggcggctcgtctgctgggatgtcaggaaaactcagaggcagtgatacaaattcatgcgccagtgacaacgctgccggcgttattacccccctcgctgacggatctggtgctggatggctgtacggccttgcgtgatatcggtcatttgccggcaggtctggaacgcctgagtgtggtggggtgcacctcgctggaagctatcagtaccccgctgcctgaaggtatctcgggaatttttatttgccactgtccggccctggcccgaatagaaggcgaattacctccacagctgcatcggatggtgtacgtcaatggatgcaccgcactggatgaggctcagcgagaattcctgtcatttccggttgataaacatggtcgttccagtctgagtcgtgctgaattacaggcggatatccggtattttgcggcaaacaggcatgaaggtgaaagtgtggaagaacggaatttttctgaatgtgattttacatacagcgatcttcatggactcaacttatctaaggtaaatatgagtcattcagatttcagaggggcagacttgaccgaagtaacattaacccatgcagcagtcaaagagtgtgattttacatcagccactttaacggatgctgttctggacttcagtaatctgaatcagagtaattttacgggcgccactctgacgggagtgagtctgtatgagacctcgattgatgacgtcgatttcaccgacgctaatctggagagagctcagatgggaggggcgtcttttgacgagagttatccggtcgttaccggtgcgcgttttaaaaatgctgttttgtgtccggggatgcttctggaaggcgcggttttaggtatggcagataacagtcctccacccaataccagtttgattcgtctggctgacgcatggctccctgttcctgaggaatgggatcgggaagcgctagaactctttctggacaaggctaacaggccggaactctttttactgaatacaatagacagcatgggtgatcaatatgccggggagaaagtcagaaccgcagagcgactggtaagaacattacagtcttccggggtggatgtttcctgcgtcggactttacctgatggagacgctgggcaaacctgattaccataccagcccgctgatacaggagtggcttgtgccgctcagtgacgcattctttagctctaatattgatgtggtaaactcaccgggctcttggctcggtagcaccgggctggcatatctgatggcggagtattttgttcgtcacccggaaaaaatgcagtctcataacggcgcatttattaaaacgatgctgcagggaatgtatgatgaagtatcatgcccagatctgtctctgatatgtcaggagatatacacagattgttatctcccgactgacgcggtggctccgtatgccaggcaggatgatttcgggaaaatggacggttccggtgaacctgactgggaaagtcaggatgcgtttaactgggtgcttctgtcctccccggaagagaatagcgtcatgatggtgtctgataatagtttgagtgaaatgcttgagcctgattttgacactcactggcggtccttttttttgtaccgggatggagagcttcaggaggccagtggttatcagcttgaccatctgtttaatgatgttttccctgtgttcagtaaagcctatcagtctttctgctcggcacatgagttcgggcgaattctggatatattacttcctgagggggaagtgaaagagcagttccgaacggcagccttatctggtgcctcagatgtcaaaatggtggacgatgactcacagttgaagctgggtgagatttttgaaccttacctggatgactggttgttacaggaaggacacattcagcagataatagactgctatgaacttcaggaggtgtccggcagtgaaaaagcggagactttcttttgtctgggggcggcattttgccgttattcgtccagtgcagtattcggtaccgaatgggagtcaccgcagatactgagggggtatgccagtggtctgctggaagaagctcaccgacagcatccggcactgtttgccgctgcagattttacgccggaagaaaggatgggcgatatccgtggacggctgcggggtggggatggggggcattttacctgtacggctgtgctgtcagatatactggtagagcacgcagagaaaaattttccacaacggctggccacgttgtatccgatggcatggcggtga

SEQ ID NO: 397669 - DNA, 132 bp, Salmonella enterica
atgacattatttaagaaaattaaacactatctgtctggtggtgttaaatccgtcgaattgcggctggggccaacagaaatcttggtgtgtgataataatggcgttattcctgagcgggcggcagggttttga

SEQ ID NO: 397670 - DNA, 2556 bp, Salmonella enterica
atgaatgcagacgcatacaaaaaaagaacgacgttcagtcaaatcgcctgctttgttgccttgcagtgcgtcttttctggttataacaccgtattggcccgtgaatatttcaacccggcgttgctgggtattgatggaccgggaaaagaacttaccgacctttcagcctttgaagagggtgtcggtcagctccctggcacctatcgtgtagatgtcattgtcaacagaacctctgtaggcgtgcatgacattgattttgttatgcagaaagacgtacacggcaactcaacgctgcaaccctgtgttagcgtcgataccctccgcgaattcggcgtccgtaccgaccagtttcctttgttggccggatcaggtgactgtgcaaacattgctgttattccgcaggccagcgcggaattcgcctttgagcgccagcaactgctgttctctgttccgcaggcggccatcagcaaccgcgcccgcggctacgtttccccggagcggctcgatgaggggattaacgccctgcaactgaactacgattttaccggggcaaacacgcaagcgcgccacggcaacatgtctgactccgacagctattatctcagcctgcgaccggggctgaacatcgggccatggcgcatccgcaactacagcacctggaaccgtaataccagcggcgacagtgcccaggagagctgggactcgctctatacctacgcccagcgcaatattatcgcgctgaaaagccaactgacacttggcgacagcaccgcgccgtctgaactgttcgacagcgtgccgttccgcggcgcgcaactggcctctgacgatgatatgttgcctgatagcctacgcggttacgccccggtggtacgcggtatcgcccgcactaacgctcaggtgatcatcaaacagaatggttacaccatttatcaaagctacgtttcgccgggggcatttgaaattaccgatatgtacccgaccggcagcagcggcgatcttgatgtcacgattaaagaagccgacggcagcgagcagcatcagacggtggccttcgcttcgttgcctattttgcagcgcgaaggacggctgaaatacagtctgaccagcgggcaatatcggccatatgatagcgatatcgacaaaaagatgtttacccaggcgacggcgatgtacggcttacccgccgggtggacgttatacggcggcgggcaattctctcagcactatcagtccctgctctccggcatgggtaaaaacttcggcactctgggcgcagtctctgtggatggcacgcaggcctggtcgaagcagaaagaccaggataaagaaagcgggcagtcctggcgcgtgcgctacagtaaaaatattctggaaaccggcaccaatatctcgatctcaggttatcgctattccacctccggttactacaccttgtcagaagtgcttgatacctggcgcgataacaactggcagaccaataacgatcgccgccgcaaccgggcggagatcacgttgaatcaaaatatcggcaagagtctcggttccctgtcgctaaacgccatcagcgaggattactggaatagcgaccgcaaaatgcgctctattggcgtgggctacagcaataactgggcgggtgtgacctggaacctcaactatagctataaccgcaacacgacagaccaggacaataacaacaaggtttacgaggaagatcagctcttctcgctgagcataaacatcccgctcgaccgctggttaagcaatagttatgcctcctatagtctgaacagcagcaaacgtggagataccagccataccgtcgggttaaacggctctgcgctggaagaccgcaacctgaactggaacatccagcaaagcgaaaccaaccacggcgaaggtaatggtggctatgccagtcttgattatcagggcacttacgcccgcatgaacactgcctacagctacgatcacgaccaaaggcgcgtcagctatggcattgaaggcggcgcggtggctcatgctcacggcgtgacgctcagccagtcgctgggcgaaacctcagcgctggtagaagcgccgggagcatcaggcgtcaccgtcagcaaccagaccggggtcagaaccgatttccgtggttacaccgttgtgccgtatgtcacgccataccgtgaaagcaccgtatcgctggataccggaacgctgcctgacggcgctgacgtggccttaacgtcaaaagttatcaccccaacccgtggcgcaatagttcgggcgcattttgatacccgtattggcaagcgcgtgctgatgacgttaatccgtagcaatggagaagcggtgccgtttggtgccactgcaaccgtcaatgatgccgctaactctcaaggtttcattatcggtgatgctgggcaggtttacctgaccgggatgcctgaaagtggcacgttgcaggtgaaatgggggaaggaggccaataattcgtgtcgggcgacctttacgctatctaaagcggataacgccagcggcctcattgagacaagcagccgttgtcagtaa

SEQ ID NO: 397671 - DNA, 996 bp, Salmonella enterica
atgatcagaaaaactttattaagtttgataccactctgttgcttacttggctgtaatactgcgatagcggattttttcggtcagtacaatatgcacacgctgccttatagattaagtcctatatccataccagagacggtcggtggcacaagcgagtggactgataatggtagcatctattatgaaacaacctactctgatgcttttggcgcttccattgtactcacgttcaacggcacattaatgagtgatggaaaaacctttgcgacgaataaccccggtgtagggatccagtataagttacacttgtacgataccgctggtttaacaccatcgtcagatattacagagatgccatttcgctatgatatgactggtcacgcgttcccccctgtattctggggagggaactatcttcatctctattatcgcttagttcgactaacagagatggtgcccgcagggaagattacagcgctgccagacgtttatgtcgcttttacaaacgcccccgaagatagcgatcacccaggggctagtggattattattatccggcatcaacagccaacctaaaatagttgcttgcaacattaatgcgccgtcggaaattaagctgccgacactttatggtaataccataacaaatggcgcccagaatattactgaagtgccaaccataaccctggaaaattgtcccggtgccattgatggaatttcatataacttttctgcggtatatggcgcacatgaagcatccaacggtgtgcttaatactgttactggggaaggttatgcggaaaatgtttatatacaaatacaaaacgccgatgggactgctcataaagttaacaatcctattgcgctcagcgattataacggctctggtaactataaaatccctgactttaaagtagcctactacgtcgatgatgctgaaactgtcagatcgggtaatgtaaaaacggccatcgaactagaagtaacctataactga

SEQ ID NO: 397672 - DNA, 522 bp, Salmonella enterica
atgaaaatcacctataaaaaaacggtaatcgcgtttatcctggcctctgcggggggattttctgcaaccagccaggcagtaaatattgacattaccggcaaagttgtcgcttcgccctgtgtagtcaatggcgataatcaatccctcgccgtgaatttaggtgacgcgattcaggctgactcactggccaccagcggcagcgggaccacatgggcggatgccaccctgaaactgaccggttgcccggcatcgacctcctctttcagcgtgacgtttgccggaacccctgacaccgatacgaattattataaaaataccggtaccgccacccatctgaagttagaactgacggatgaaaacggcaccgccgtctacaaaaatggtgcgaagctggaaaatatcgcgatcccaggtaccactcacgcttatgacctgaaaatgcgcgcccgtgcagtatcagacggcaacgtcatgccggggacgatcgtgggtcaggtgcaggccacctttacctaccagtaa

SEQ ID NO: 397673 - DNA, 525 bp, Salmonella enterica
atggcgcaacagataagcaaactgctccccgtgctggcctgcctgtgggcggccagcagtattaacatcgtacaggctactgatattaatcttagtggtaccgtggtcgcgtctgcctgtaccgtggatatcggtacgaaggaacagacggtcacattcgaacaggcgcgcgccgttgattaccccaatgctggcgacaccagcgaatggcaggattttgaacttacgctctcggcctgcccggcatcaaccacgcaggtgactgccctgtttagcggtgatgctgacaacgatgataataccaagttcgccaacacgttgggcgatgccagcgggatggcgctacagataatgaccagggatcacgtcaccgggatctcaccggctggcgaactgacggtaagtgttgacggcaatagccggcgggcggtatttccgctttccgcccggatgtatacgccaacaggcgcagtaacggccggggagttcaggacgattgtccagctcaccttcacctatcagtaa

SEQ ID NO: 397674 - DNA, 2529 bp, Salmonella enterica
atgattcgcttacatctttatctcgcgctggcttcaagtgcttgcctgggaatagctacccatgctatagcccaggacagcctgtttaacccaaatttattggaaatcgatcaccctattgatgtcgatattcgccagttcaaccgttcgaattcgctgccgcctggtaattatcaggtagatgtgctgattaacgggaaattatttgagcggaaggatgttaagtttgttcaggataaaccggatgccgagctacatccctgctttgttgccgttaaagatgtcttgtcttcctatggcgtgaaggttgatgccgtaaagtcattgcagaatattgatgataaagcctgtgtggatcctgtgtctctcattgatggctcgacctggttgcttgatgccaataagctggcattaaatattaccatcccacagatctatttgaacgccgccgcctatgattatattagcccgtcccgctgggatgagggtatcaatgcgatgatggtcaactatgacttttctggatcgcatacggttaaatcaaactacgactcagggaatgacgatacttattaccttaacctgcgcaacggtattaacctgggagcatggcggctgcgtaattatagtacgttgagtgcctcgggcagtgatacggaatatcactcaatcagcagctatatccaacgagatgtggcggcattgcgtagccagatcatggtcggcgatacctggacggcgagcgatgtgtttgatagctctcaaattcgcggtgtcaggctatataccgatgatgacatgctgccatcgagtcagaatgggtttgcgcccgtggttcgtggggtggcgaaaagtaacgcgacggtcatcatccgccaaaataaatatgtgatttatcagtctgctgtaccgcagggcgcgtttgagatcaccgacctgaataccgccagcggcggcggcgatcttgatgtcactattaaagaagaagacggtagtgaacagcactttactcagccttatgcgtcgctggccatactcaaacgcgaaggccagaccgattttgacatcagcattggggagatgcgcgatgaaagcggctttacccccaatgtcatccaggcgcagattctgcacggtttaccgtggggcttaacattatacggcgggacgcagattgctgatgattatactgccgctgccttcggcatggggaaagatatgggtgcgatcggcgccatatcgtttgacgtcacccatgcgcgttcacacttcaatgacggtgatgatgaaagcggtcaatcctggcgttttctctattctaaacgcttcgatgaaacggacactaatttccgcctggtgggctatcgctattcaaccaaaggttactataccctcgatgagtgggcgtcacggcaggataatagcgacgatttttgggtgatgggtaaccgccgcagccgcgttgaaggtacctggtctcaatcgtttgacgacggctggggaaatgtctatttgaccctcagccgacaggaatactggcagacagatgaagttgaacgcctggtgcagttgggttatagcaatagctggcggcaaatatcatggaacgtatcgtggaactataccgattccgtcaatcggtatacgggtaaccagaattatagcggtaacgataatcacgatgatgccgaccatgaacagatcttcatgctgtcagtttccattccactttctggctggttgagtagcagctacgtcaactattcaatgacgcagaataaccataatgagagcactatgcaggccggggttggcggaacgctgctggaagggcataacctttcttacaacgttcaggaatcgtggaccagtacgccggaagatacctacagcagcaacgcaagccttaactatagcggaacctacggcgcggtgaacggtagctatgcttacagtcgcgattcgcaaacgcttaactacggtgcccgcggcggcattctgctgcatagcggcggcgtcacattttctcaggaactgggggaaacggtcgcgttggttgaagcgcctggtgcggatgggctatcggttgaaaacgccaccggcgtagcgacggactggcgcggctatacggtgaaaactcagctcaatccgtatgatgagaaccgggtggcgattaacagtaactattttgctaaagcgaacatcgaactggataacaccgtggttaacctggtgccaacgcgtggggcggtggtgaaagctgcatttgtgactcacgtcggctatcgtgtgttgtttagcgtcttgcaggctgatgggaaacctgcgccattcggcgcaatggcgacggcaacactcgaatccgggaccgtgacaggtatcgttggagataatggcgaactttatctgtcagggatgccactggaaggacatttcactgtaacaggacaaaaaacatgtactgtggattatcacttagcggagcagaaggataatgaactcatgcaaatacccgttatttgtaaatga

SEQ ID NO: 397675 - DNA, 687 bp, Salmonella enterica
atgatgacacgaataattaaaatgtttttttcggtggtggtatttttttataccatgcagtcttttgccggaattgtggtcggcggaacccgcgttattttcccaggtgacgtgccggatgctactatctctgtttacaataaagaaactacattaccctatctgatccaggtgtgggttgatccttttaataaagacgataagaataagccaccttttactgctattccaccagtatcccgccttgagccggggcaagagaaagtactgcgtattgttaaaattgctggtgagttacctaaggatcgggaatctgttttctggttgaatgttaaaaatattccaccatcaagtaaaaagaaagacaccagtacgcttgaaatagctattaagacacgaattaaactattctggcgccctgctaccatcaaattaacaccgggaaaagccgtggagaaggtaaaatggcataagcaggggaatcagttagtggtggaaaatccgaaccctattcatattaacatcatggatgtttccgttgatgataaatatgttcctcttaatatgatccgcccttttgaaacattaaccctggccctgcctgtgggggtttctggtcattcgctggtatggcgttttattaatgattatggtgcgattagtgaacctgtgaagcaggcgctttag

SEQ ID NO: 397676 - DNA, 579 bp, Salmonella enterica
atgaaacttaatttaattgcaagcgcgttagttttgtcctctacaatatttgctggcaatgttctggcatctgacggtaccgttcactttcgtggtgaagtcattgacagcacttgtgaagtaacgcctgaaactgcagaacaaaacgttgatttaggtaaagttagcaaaacggcattagctcacgtgggggataccgctgcacctaccgagttccatatcgatctgaccgggtgcccggcaacgtatactaaggctgccattcgttttgacggtgttgaagcttccgatggcaacggcgacctggctatcggcaacccgatagcaacgggtgccccaggcgattacaccggcggcggtagcgacgcggtaatggcaactggcgtagcaattcgtatttataaccaagctgataactctcaggttaaactgtacaatgattccgtgtatagcgatattgatgcctctacgggtatggcttcattaaagtttatcgcacgttacattgcaaccaatgctgtcgtaacgccgggtactgctgacgccgattctcagtttaccgttgaatacgtgaaataa

SEQ ID NO: 397677 - DNA, 567 bp, Salmonella enterica
atgttccgtgaagtcaaagtagctcaaatggctgcttatctgctccataaaaggggtggacgcatggcatatgttaaactcatgaaattactgtacttagcggatcgcgagtacatgatatcgtacggtgattccatgagcggtgaccgtgctgtctctatgaaaaatggccccgttctctcattaacctacgatttactcaaaggtggggcacctgaagacgcatctgcatgggatgaatggatcgctggagagtcaaactacgaagtatctataaaaaaacctgttcgcgaagatattgaggatgtttttgatgagctgagcagggctgactgccgggtactggatcgagtattctcagagtttgggaagtatacccgctttgagttgtgcgaactaactcataaaatctgtcctgagtggcaggatccccatggttcttccattcctattaatccgaaatctgtatttatggcttcgggaaagacggaagaagaggctgaagaactcgtagctcggatgcgtgaacgtcatgagttgcaggtattcagtgcacaattgacatga

SEQ ID NO: 397678 - DNA, 585 bp, Salmonella enterica
atgatgcgtttgtatacccctcctctcgcggcattgatttcagggctggcaacagttctgaatatcgcaccactttatgccgacaccaacgtcgattttacagctaccgtgcagaaggacacttgccagattacgactgacggcaatggcacagtcaatttagcgacagtcggcccgagttactttgccgatggcgtcaccgcggaaacagactacaagggcggcaaggaatttctgataaagctgataagctgcccggttagcgacggagaaatcactaacgtcacgttcaacttcttaccgcaaagcgggcagttcgccaccggtaatcagcaggtgtttgccaatgatttaaccccgtcagatggtggtgccgataatgtcggtgttgttattttcaccaacgactcgccgcgtgttaatgtgctgaacaccgacggcacttcacgcgccatatttaacgcgcaaacatacagcgacagccaatggacgttttacgcacgaatgcagaaaattattagcaccgacggcgtaaatactggacttgtacgtagcagggtaatagttagtgtttattatcaatag

SEQ ID NO: 397679 - DNA, 1248 bp, Salmonella enterica
atgataatgataacaatggaaaaaactaagataaccacagtctgtctggcggtggtcgcgctactgtcgccaccagcttatgccaccacctatattgttggtgaagaaatgcccatgcctcccaacaagagtgtacatgtagacccgccacagaatgatggtactccaagctgggtcaaaaaaatgtcaagaactgtagctgtacatacccaaggtacgagtcccagtttgatagtaaaatatgactggtcaggaggacatgattcattaaatcccgaagccggtaaaaccggggcgctttattgtagaaatgacggaaacgacacctctctggatgtggctcatggttacggtaatccttatggcagtgtggatggtcatccaatatggaaaaccaacatacaaggtttatatttcgccatggaggttatcaatgtttttataccatttactactaatcttaaaccatcgagtaaattctggttaagcggaccatttgagatcagcggcacagcaaccgacgagtcatgtaaaaattcaagctcaggtaaagtcattataatgggcggtgttcaactggggttcaatgtttatctctatgctgataatacctttacaccacagtcagttatttcttacctacaattccctaagagcggttacgatttccgcgtttataatcaaaatgctggaggtttagggagtggtcattcgatctatttcacgttagatctcaccggttttaatatgacgtggccaacgtgtgccgccaacagcgtaaccagcaatgggaaaaagggatacacggtagatttaggctcttattatccaaacgcaataataaacaatcaaaccaaaaccgtgccttttgccattaatctgatgtcttgtacctatgtgaacaatattgaaataaaactggatagtactaacatcggtactcaggataaaaccttgctcagcaatggggctacggacacgccagcgagcggtgttggggtacgaatcgaaggactgaaaaacgacgtgaacgctcagatggtgcttattcccggcgacagtaactcgatctacaaagacaccaaccataacgatggtaccgccagcggcgatagaggcgataacagcgataaaggcagtgcaacgaaggacctgaatttccaggcaacgttaaaacaagatggcaatgcaacaatcactcccggtcagtttaaagcaaccggaagattcaccatcgactacccctga

SEQ ID NO: 397680 - DNA, 378 bp, Salmonella enterica
ttgttggatattaagggtaaaattatcacaactgatgccatgggttgtcaaaaggatattgcagagaagattgtttctcttgatggcgactatttatttgcagtgaaaggggatcaggggcgattacaaaaagcatttgaagagaaatttcccctgaaagaactgaacaatccagggtacgatagttattcaacaactgaaaagaatcatggaagagaagaaactcgtttacatattgtaagtgatgtccctgatgaattgattgattttacttttgaatggaaaggattgagggaattatgcgttgcagtttcctttcgtaagaaaaatgatgatgaatatgatttgcgcattgtagaggaagaggtcggggggtag

SEQ ID NO: 397681 - DNA, 684 bp, Salmonella enterica
atgaaaaaattactgattgcaactgcggttgcattgtctttgtctgcggcagcgcaggcagctgaatctaccgccgtgttaaaagtggccggcgttctgaccaacgatgcgtgtaccccggagctggacggcggcggcgtagttgattttggcaccacatatatcaatcaactgtcggcaacagcggcaaaccagttgggttataaagatgtcaatctctccattacctgttctgtaccgacacaagtctcatggcttatgactgacgatcgctccgactcatatgtaagactgaccatcacagggggagcctggagtggtgatgagacggcatggggcaacggtcaattgttcggtgttggtaaaacgacagggggtgtcaatattggtgcctacgctgttgacatcaatagaactgcctcgacggccgatggtaaggcggccacggtgcttcaacgtggaaatagcgacacaacgaacgtctgggaggagctccccgcgaatgctacttttctcaatttcaacaatgaatacacttttggcacaacgaatcagccaaccgcctttaccaccgctgttttcccactgcgcgtcgcattagccgtagataacaccgacactctggcgattaccgataacaccgctatcgatggtcaggccaccattaccctgcgttatctgtag

SEQ ID NO: 397682 - DNA, 123 bp, Salmonella enterica
atgctggcggggttgcccggcctggcacatgagcgcgtaggccggacaagcacaacgtatttcagcagtaaattaaccggcgtcagcctgtggtttatggctgtgtttacggatcaggcgtaa

SEQ ID NO: 397683 - DNA, 162 bp, Salmonella enterica
atggaaaatgagaaagctattgttaatcagcatgcaaataaaagtataggtaaaaaacattatgagagatacgattatatcgttgaaaaacgcgaggcaacaataaaatgggagaaagcaatgcagatactgctaacaaatgatgggattgctgagatttaa

SEQ ID NO: 397684 - DNA, 354 bp, Salmonella enterica
atgaataccgctaaagcggtggcggtagcggtagcggagaaaggcgaggcaataccgttaacggtgactgtcgcagatagtgctggtaacccgcttgccaatcaggcgtttactctggcgcgcggtgattcgttgaatcgggctggcgagaaggttgcaggcgtgctgaccattgaaggcgtcgcgccttttgccagtacgaaatcgttgacggcgagcggcgatacgttcaccggaaccactggcgcgaatggctccgcgacctttaatcaccagcctgatatcggacaataccgtcattcaatcttcgctcgataccatctttacggtactcaccagcccggatacggataa

SEQ ID NO: 397685 - DNA, 144 bp, Salmonella enterica
atggcaaagattaaaggtcaagttaagtggttcaacgaatccaaaggttttggcttcattactccggctgacggcaggaacgttgagttcgaaattcaggacggccagaaaggtccggctgctgttaacgtaacagctatctga

SEQ ID NO: 397686 - DNA, 801 bp, Salmonella enterica
atgtataaatatgagaaaaataaaagtaactcatttgttcgtctagctgttcctgatacaaatggtgtggctcaggggcttgtggataatagagttaagccgataactcaattgaaaaggcagagcgaagagaataacacgacgccaacaaaaaaattgtattctaatacctcaatggttaaacaacttaacagggatgaggataaaaaaccatttgtaaaacttgctcctggagtgaaagaaaaggataccaggctcaaaacggggttgttgggagaagctctggcaacagatgagaccgtcagaacaaaaaaaagtgaaaaaaataggccgccatcaaaagaggcaaaatacctataccattcaacaacatataaaaatcttattacgattataagcaatgggttagaccctaatagaggtggttccgaagttggtgcaagtgtgttggcggaaggagaactcaaggacgaatcaataaagggatctcagaatcacgttgttctaaggttcttggtaggagataaaaataattggacagaagatacagaggatcatcgaggaaattataagacggaagagctaataccacctaaaaatattgagtttctggatgtggaaagcggttggcaacctctttctagtattgatattaatatcttaaaggcattagagactgagaaaagcttggttcctgtttctgcggtaagagatgaaactcctgagtctccccaaaggactggtgtgatagaagaacgcaatttatcttcgattataatgagcccagatggaaaatattaa

SEQ ID NO: 397687 - DNA, 1380 bp, Salmonella enterica
atggctaagtcattgttaattatggggcgcagaacgcagggcgcaggttgttttaattcgccgtattcacgtattgtggcgctggatgctgatacccttgagcccgtaatagctaactggcagtatgaaggcgagagccaaattatccatggaacggcattttatgatcataactctgtcaataatctgattgtttcagcggacggctatccatcggtagcgctcaatgctggtaatatagatttcagacctggcagtattattaccgttgttaataatgataaacagttaaaacaatggggggatcgacttgttctacaagaatatcctattgacgaagatgaaaaccatgactttaaaaaagtcacgtcgctgacctgctcatttgcggtacgtaccgataatagcctttatgcctggggcaatgtggaatacggcggtcagctcaagccggatacggcagaacgtaccgatattcttaatgtgatgccctcaaatatggctggcgtgctattgggtaataatgcgccttatgttgatcaatgggggatggcaacgggcgggtatttcacgctgcctgaaaaaattgccgcgatggataatattgtggatctggtatgcaatgataatgtgcgggtggttctgaccagcgacggtaaagtgtatggctggggtaatccggatgaaggatcgttaatccctgcggatattctggctctggatgatattgcggcggtatatgtcaatgcgatgtcactctgcgcattgcggagtaccgggcagatcgttgcatggggcaaggcggaagcgggcggcgagcttcccgacgatattgcggcattaaccgatattgtacgcgtttatccgggcagcacaacttttgtggcgctacgggctaacggcagtattgttgtttggggtgaggaaggggaatatgttaatttcccggcggatattgccgcgctgaccaatgtcgttgatgtgcagttctgtcatggtggtggtaccccttctaactatgtgcttttgcttgatgacgggacggtgacggctttcggtactgatgcaagcggtattctggctattcctgaggggttaagtgaggttgcagccctgacctgcacgtctgaatattgttctgccctgaaaaaagacggaaccgtcgttaactggggtaacaatagttatctcaatgataccagggtgctggataaactggtcaacgtgcgggcggtctatggttcagcctattgcatggcggcccttaccgcagacgataccctggttatttggggttccacaaatagttacgaaccgatgacgcttatcccggatggcgtacagggaaatatttcctatatgcagccttatgaaggctaa

SEQ ID NO: 397688 - DNA, 705 bp, Salmonella enterica
atgaagttctctttcaaaaaaagcgcactggctacggtgctggcgttgtcagctacctccgttatggcggcttcaaccctggatattaaagttaccggtaagattgtaccgtcctcctgcaccccgacattcggcagcggtggtggcattgcagatttcggcaccatgaaagtatcgtcgctgaatgcaacaaccccgacgtcgctgccagacacaaaagaagtgccaatcaccatcacctgtgaggaagcgacgcgaattggcgttacctttaccgatgcccgcaagtcgtctgttccgactactaaatttgatagcacgggttttaaatatttaagcaacgagataaggtattactttggcttgggtatgtacggtgaacaaaaaatcggtgcctatgcattgggtattgatgtcagagaggggggaattactaacgcggcaggtgaaaccgggcttgtggcatactattcgcctaacgggggagctacttggggagtgaaagataacaactttatgcaaattgataacactcacagcgaaatattctcctttggtaaaagggagactaatgccccagaaccacagacaagagttgactttaaggtcgacgttgaggcaattattaacccaaccaacgatctgcatatcacggatgaagccacgcttgatggtttaacgactgtagagctggtttacctgtaa

SEQ ID NO: 397689 - DNA, 684 bp, Salmonella enterica
atgctgcccgttaaaaaaacgctgctttgtgcctgcctgttggcttcattccagacgctggctgccggaatggtgccggatacctcgctattgctgattaatgaagaagagcaaggcgccagcatggacgtgaaaaacaccgacgatactgcccaactgctttatacccgtattgttgacctgccagaggatctgcagcccggcctgattgttacccagccggtggtgcgcgtggaggccggtaagattcagcgcgtaaggtttgttttgaaaaacaacaccgaaaaattaaaagttgagcatttaaaacgcgttattttcactacgatcccccagcgcgaaaaaaataaagtcaaaatggttttcagccagaatcttcccgttattattcatccggcgggtttagaggtgaacattgagccgtggaaagatctgcgctggcaaataaaaaacgggacattaagtgtagtaaatgacaccccttacgttgttcgcatggagcagaaagttaaattattaccctctggtactacattgaaatttgcaagaacctatattctgcctggcgaaacattgaatgcggaggcgacgagtaaaatatccgctctggataagcaggtagaaatgtatccggccacccgctatgggtataaaacagatacgtggacggcagaaattaaataa

SEQ ID NO: 397690 - DNA, 2424 bp, Salmonella enterica
atgttaaacaattcctgcaaaaagggaatgctggcgttttgtctgagtgcgattgcttttggtattcgggccgaaattgttccgacttcagtgccgacaatggagcttgcccgtgcgatatttgatactgatgatctacgagaaaatggcctggaccctgccattgccgactactattccgtggcaccgcgatttacgccgggtgtgcataatgtcaccgtgatgattaacggtaagaagcacagcattatgccggttaaatttaatgatgaaggtattccgtgtattgatagtgactttctggataatgccgggttattaaaaaaattaaaacgagaaacctgcccccaattgaagcagtactggcctaccgcgacggtcgagtcatcccctgaaattgaacaaatatcactggtcgtgcctccaggcgctgtcgaccccgacagtggcaggcaggtggcggatgttcgcggcggccatgcggcgatgcttaactattccatgtttggcacccattatgactacgataacgataaatccgatcggtttcagtcatccttcgagctggggtttaatgcgggtgactggattgtgcgcagttcgcagtttgtcagcgatggcagcgatcaaaaactcgaaactgaatcgctttatacctacgcgcagcgcacctttaccgactatggcgtgatggttcagggcgggcagatcaatattgccaacagccgctttagtatcccgagcatctatggtgtacagcttatgccggatacgacgttgctgccgcgtggcgacagcggaattgccgttactggtattgcccgctattcacaggctcgcgtcgatatccgccagggcggtcagctaatttactccacgctggttcctgctggtccctttacgttaaacgatgtgccgattgctaacctcaataccgatttaaacgtcacggtgacggaaaccgacggcagcgaggatcatttcaccgtctcagccagtacatttcgcagtaaccacgtcgggaaagcgccaggcttttctatggccgtggggcgcgcgcaggatatggagacgaattttgaacagccgtggatcgtttcagcgtcagacggctggtctgttaataaccgtatgaatttcctcgcgggaatggtcatggcggataaccactattacggtttctccggcaacattgatacggttcccgtacaaaacatgtatgcctcgctggggtttctcggctcgattgacaatctctctcaaacggacggcaacaaaaccacgcttgatttaggttactccctgccctggggagtaggcatttcgttagggggcagttatggcacgcctgattaccgtgagatgtcggaactttacagcgacgacgataattattcgccaacgaaatacgacaccaatgtgggtatcaactggagcagcctcagtctggggcgtttttcgctcagctactatcgcaacgaaacgtggaacagtgattatgacagccgccgcattatctcgtcatggtcgcagtcgtataaatactttagcgtcagcgtgaactgggagtcagatctcagtcgtggagatgagaatgatcacgatatgttttacgtgaacatctctgtcccgctgggcagaacgggcgtaaccaccaacacctggtatcgtgaaaacgagggcaaaagctcctatggcacccgggcaatgggttcgcttaatgatgacaaccagtacacggtaggtgtctctcgcgatcgcgatcagaacgtcaccgactgggatagttcccttaacagtaaccttcactatacatcgcttgcggtggcggcaggtggcgacaacgacagcaacaataactattcggcatcgctgagtggcggcattgttgcctatgatgacggggtgacgttctcaccttatcctgttgcggatacctttgctgtggctaaactggataagcctgttgcaggcatcgaaattggtactcctcgcggcccagtctggaccgacaaatggggcagggccgtcgtgccttcgctggcgccattcagtgaaagctcagtagaaatcaatacccagagtttgcctggcaacctggatgtgaagaacggtcgtgcggtgattaaagcctcgcatggcgccgttgcgaaatgggagttcaacacactcagtcagcgtcgtgttctgctttcaattatgcgcgccgatggctcaccgttaccgaagggcgtttcgatcttgaacgaggcgggtgaatacatcacctcagcgcctgaagatggtgtgattttcctgaatgatatctctgcgagccatcaactgtatgccaaaacggaagaagggcgttgcaagctgagtttcaccttaccggaagccgatccgaagaagttttacgaggagataaacggaaaatgtctctaa

SEQ ID NO: 397691 - DNA, 612 bp, Salmonella enterica
atgtctctaattaaccagggggtgggagcaatgaaaaaacgcaattttcttaagttaatcgtgctggcagggctggtgtgcagccatgcgccactggtggcggcggaagagggtgattgtcagatcctgtcttcgacaaaaagtgtcgactacgggcgattccgtaaagaagagatgagaaaaggcagtgcggaacacgccgggaaaacctacgcaggttatgcttctgtgacgcgcgaattgcaggtttcggtgatgtgtcccgataagcataaaatccggctgttcattgatggcccctcccgcgcgaaccgggcttatcggtttagtgatagcggcgcgatgtcggttacgttgaaaaatgcccgtgttgatggcatatcggttcaactggcttcggtctcccggggggaggtgcaggtacagggcggatcgtcggaaatttcgctgttacccaatatggccgccgcagcgacagatgggcaggaagtgacgggcaatcagttaaccacgacgatggcgatcaccacgtatctttctgataatgccttcaaaaccagcaatatgacggatcttgaagagaattacacaatctcttttgatctccagtag

SEQ ID NO: 397692 - DNA, 1278 bp, Salmonella enterica
atgaaaataaaaggactccgatggtggataatcggtctggtcgcgctaggcactgccattaactatctggcaagaagttcacttagcgtcgccgcatcgacattatttactgagctacatattactgaacaacaatactcatgggtcattatgtcattccaaatggcctatacattagcacaatctgtctgcggatatattttagactcgattggcttacgtattggtttctttattttcgccctcgcatggtcattcgcgaacatggcgcatgcactggcgattaactggcagtcgctggcgttctgccgcgggttgcttggtttgagcgagtcagctgcgattcctgcaggtatcaaagcgacatcggaatggtttccttctaaagaacggggaatagccggtggtttgttcaatattgggacatccctcggcgcaatgctggcgccgccaattgtggtatgggcgattatttacttgcactggcagtttgcctttattttcactggttcattcggtcttatttttgcttttttatggctatttttatatcgtccgccagaaaaacacaaatggatatccgaagaggaaaaacaatacattgctactggccaggaaacagaattacaatctgatggcgataaacgtccaccgctgaaatcgctgcttaaacagcgcaatttctggggcatcgccataacccgttttctgtcggatcctgtctggggaacgttaagtttctggctgcccttatatttaatccaggttcgcgacctgccattaaaagagatcgcgatgtttgcctggctccccttcctggcggcagatatcggttgcgtagcaggaggcgtgctttctaatctgttaatcacaaagtttcatgtcacgacggtcaattcccgacggataggcttcacgattggcgcactactcatgacttctctgtccgccgtcggttttgtggaaaatgtctactttgccatcgcattaatcagcctcggcggcttcgctcaccagatgctttcgaccatggcgatgacattagcttccgatctgttcaaaaagaatcaggtcgccaccgtcagtggtatggcgggatccgccgcctggttgggacagctactcttcacaatggtgatggggttgctggtgcatcagattggctacacgcccttctttattgcactcagtattctcgatcttatcgctgcagccattatctggataacggttatcgatccacagcgcgccgccagagaacccattatcacaacctga

SEQ ID NO: 397693 - DNA, 2076 bp, Salmonella enterica
atgagcctggttgacgaaaccatccttgacgcgctgacgcatgtctcttttccgaaaggtttcgttcaggcggaaccttcctccgtcgtgacgatcgataatgtgaattatcccgtctggcagaccgatgcgctggtcgttggcactggtgccgctgggctgcgtgcggcggtcgaacttcaacgtcgcgaacaaagcgtattgctggcgacagcgggcctctatatggggacttctgcctgttctggttcggataagcagacgttatttaccgcggctactgcaggcagtggagacaacttcaccaaactcgcggaggcgctagccagcggcggcgcaatggatcgagatacggcctatgtagaagcggtggggtcgttacatacgctgggcggattacaatatctcggtctggaattaccggaagatcgctacggcgcaattctgcgttatcagaccgatcatgacgaagccgggcgcgccacctcctgcggcccgcgtacctcgcggctgatggtgaaggtactgctggaagaggtaaaacggctgggtattccgctcttaaccagcgcgaccatcattaaactactgcatcagcgtgacgaatctggtgtcgatcgcgtcgccggcgctattctggcgacaggttcgcgcgcctggaatccatctggactcgccattgtaacatcgccaaacgtcgtcctggccactggcggccccggcgaactttaccgcgacagcgtctacccacataaatgtttcggttcgctggggctggcgcttgaagaggggataacgctcgctaacctgacggaaagccagtttggcataggtacgccacgtagtgcttttccgtggaatttatccggcacctacgtacaggtgattccctatatctactctgtggatagcgaggggaacgagcataactttctggccgactactaccgtaccacccaagaattggcgtcgaacatatttcgcaagggctatcagtggccgttccatgcgacaagagtgctggactttggttccagtctgctggatatggccgttgcgaacgagcagcagttgggtcgcagtgtatacatggattttctgcgcaatcccgagccagtgccaggcgacttacctttttcgctcaaacggctggacgaagacgttcaggcttacctggcgaacaacgacgcgctagcctcactaccgatcgaacgcctgcaacggatgaacccgctgtctatcgcgctatacaaaatgcatggtcatgatctggcgcaggaaccactgcaattcgccatgaataaccagcatatgaacggcggcatcgaggtcgatatctgggggcaaacctccctgcccggctgctttgcggtcggtgaagtggccggaacacacggcgtaacccgccccggcggagctgcgctgaacgccgggcaggtctttgccgttcgtctggcccgctatattgccgaagcgggatggcgagggaaaaacggtggggtagaggaactcgttactgccccactcatgcagatcaacgcaacaatccatcaggcgctacatagcgcgacaggccgagcgctatcaagtctgagagaggaaatacaggcgcggatgtctgattacgccggatttatctgtcacgtggaaaacatcaaacaagccgcacaggatgcgcggaatcttctggcaagcctttctcatgacgcactctcgattcagcatttggccgaaatcccaggacttttcatgtggcgccaacagactctggcatcggcggcaatactgaccatgctggaggagttcgttgctgccgggggcggaagtcggggcgcacgaattattcttgatccacagggctcctgcctgccattaacccgccacggtcccttctcgcaatggcgttttaggccagagcgagaagaagacaaaaacacgaaactgacgattcgttatcaagagaacaaatttatatttaatcaaaaaccattaaggaacttgcctgatttaaaagataattattttgaaaaaaattggccagattttctttgcggtaaaatatatcgcaaaaaataa

SEQ ID NO: 397694 - DNA, 1542 bp, Salmonella enterica
atgaacaaagtaacaacagccgaatctttggccgcacagattcgtgatggcgcaaccattgctatcagcggcaacggcggcggtatggttgaagcagattatctgctggcggcagtagaaaaacgcttcctggaaacaggccatccctgtggcctgacgctgattcattcattgggtatcggcgatcgtgactgcaaaggctctaaccgcttcgcccacgcgaaaatgttgaagcgggtgatcgccgggcatttcacctggtcacccaaaatgcaggcgttggtgaagaatgaagagattgaagcttactgtttccctggcggggtgattcaggcgctactgcgcgaaatcggcgccggacgaccgggattatttacccatgttggtcttggttccttcgtcgatccgcgcaatggcggcggtaaatccaatgcccgtaccaccgaagatctggtagaactgatagagatcgatggcgaaactaaactgcgctaccgtccgttaaaaatcgattacgcccttatgcgcggcacctatgccgacgcgcgcggcaacatcagcctggaagaagaagccatcaatatggacagctactcgatggcgctggcggcgcataacagtggcggcaaggtcttcgttcaggttcgcgacgtgctggaggcgggcgccattgcgccgcgtaacgtcaccctgccggggatcctggtggacggtattgtcgaatatcgcgagcagccgcaaacctacctcggcggctacgacctgaccatcagcggccaacatcgccgtctctgttccagcgatgccattgagctggtcagccatccggtacgccgtctgatcgcgcggcgcgcggcgcgtgaactggttgcaggcgcgtccactaacttcggctttggtattcccggcggcattcccggcatcgcgctacgcgaaggcgtgccgtaccaaagtttatggttaagcgtagagcaaggcgtgcataacggcatgatgctggacgatgcgctgttcggctgcgcacgcaacgccgacgccattctctcttcattggatcaattcgaattctacagcggcggcggtatcgacattaccttcctcggcatgggcgaaatggaccagcacggcaacgttaacgtctcccacctcaacggcaacctgattggcccaggcggctttctggaaatcgctcagaatgcccgcaaagtggtgttctgcggcaccttcgacgccaagggcagcaaaattgccgtaacgccagatggtctgcacatctcgcaatccgggcaaattccaaagctggtcaccgaagtagaaaagatcaccttcagcgccgattacgcccgccaaagcgaacaagaagtcctgtatatcactgaacgcgcggtgtttcagctcacaaccgaaggtgttgagctcatcgaagtcgcccccggcgtcagtattgagcacgatattctaccctatatggccttccgaccgattatcaatcaaccgcgtctgatggatagcagcctgtttacccctatggaggaagcatga

SEQ ID NO: 397695 - DNA, 777 bp, Salmonella enterica
atgaatgaacaccccgttctgtttagcagaacggcggcttcctgccgcctgacgctgaaccgcgaagataaatgtcacgcgattaatgaagagatgatcgaattactcgatcattatttaagtgaaatagaaaatgacgccacgctgcgtctggtggaattaactgccaccggagataagtttttctgcgcgggcggcgatattaagtcctggtccgcctactcgccgctggatatgggcagaaaatggattaagcgcggcaatgaagttttttcccggctgcgtaatctgccgcaactaaccgtcgccaatatcaacggccataccatcggcggcggcatcgaactcgccctgtgctgcgatattcgtatcgctcgcccaacggctaagttctctaccccggaagtgacactcggcatgatccctggctggatgggcattgagcgcgtccttaatcaggtagggccggtggttggacgccagatgctgatgctgggcaaacgccttaacgcccaggaagcgcagtccgcaggcttaatcaacgaagtcatcgaaaaagagcaggtggatagctggatggtaaatcagctcaataccctggaaaaatgcggtccggttgccctggcgcatattaagcaactgattctggcgctggaaaataaacacgctgattactcgcaccagttgctggccggattaatgtccgcaactcaggattgccaacaagcaacccgcgcttttgcggaaaaaggcaacgtgagcttccggaaccagtaa

SEQ ID NO: 397696 - DNA, 846 bp, Salmonella enterica
atgagagatctgttgcaacgccccgacttgttcagcatcaacaccgcaacgctcggttataaaacgccgctgcccgccattattgacgcttgtgcagaacgtggcattggcgccatcgccccatggagaagagaacttgagggcgaaaatttatcggacatcgcccgccaactatcggcaaacaacatggcggtatccgggtattgtcgcagcacctactacaccgcccccacgctatcggagcgcagaagggccatcgacgataatcgccgggcgctggacgatgccgccatccttaaagccgcttgctatatgcaagtagttggcgggttgccgcagggaagcaaagatttgtatgacgcacgtgagcaggtgaaatatggcatccgtcagttgctgccgcactccagagaggttggtgtccctatcgcgctggaaccgctgcacccgatgaccgccgccgatcgctcctgcctgtgtacactgcgtcaggcgctggactggtgtgatgaactcgaccctgacgacgaatatgggctcggcgtcgccgtagatgtctaccatgtctggtgggatcccgatctggccaaccagatccagcgggcgggaaaacgcattctggcgttccacgtctccgactggctggtgccaaccaccgatctggtcaatgaccgcggcatgcctggcgacggagtcattaatattcctgctattcgccgcctggtggaaaacgccggatttaatggctcagtggaattagagatattctcgccacacaactggtggcaaaaagaaatgaataataccctggatattagcgtcgatcgcatcgcgcattattgctaa

SEQ ID NO: 397697 - DNA, 792 bp, Salmonella enterica
atgaaatcgaataatcctgttgccgttatcactggtgcggctcgcggtattggcaaaggttgcgcgcttgaactggcccgtggcggattcaacttactgattaacgatcgccctgatacggtcagcgtagaaaagttaaaagcaacgcaacaagagtgcattgccgaaggcgtagaggtgatctgttttccggctgatatcggcgatctgtcattacatgaggagatgctggatgcggcgcaaaatcagtggggacgcctggattgtctgctcaataacgcgggtatttcggtgaaaaaacgtggcgatatccttgatctgcaacccgacagttttgatgagaatatcaccatcaacacccgcgcgccgttcttcctggcgcaatcgttcagcaaacgactgctggcgcagcctaagccggaaaacgaattaccacatcgctcgattatttttgtcagctccatcaacgccatcatgctggcgatgaatcgcggggaatacaccattgccaaaaccgccgtttccgcagctgcccgcctatttgccgctcgcctgtgcgaagaacagatcggcgtgtatgaaatccgtcccggccttatcaaaacggaaatgacgatcccggcaaccgcttactatgacgaactgatcgccaaaggcctggtgccgtggggacgctggggatttccggcggatatcgcctcaaccgtgcgcgcaatggcggaaggcaagcttatctacacctgcggccaggcggttgctatcgacggcggcctgagtatgccgcgcttctga

SEQ ID NO: 397698 - DNA, 663 bp, Salmonella enterica
atgtggggacgtggcatgtatattgataccagcaatgcgcaaagcctgaaggaaaaactccttttgtgcgcggtgaatgaatttgcagaatatggttacgaaggcgccagggttgataatatcgtcaaggctgcggagtgcagtaaacagacggtgtatcaccattttggcaataaagaaaatttgtttattgaggttctcgaatacacctggaatgacattcgtcagaaagagaaagcgcttgatgtgtcggggctttctcctgcgcaggcgattgagaaaattatcgattttacctggaactattacattgctaatccttggtttttaaacattgttcatagtgaaaatcagagtaaaggcgtacattacgcgaaatcaaaacgcctgccagaaattaactattcacacctggagttaatggcttctttactcgaaaaggggaaagcattaaacattttcaagcaggatatagacccgcttcaggttaatattaatattgccgcactgggtggatattatttaataaaccaacatactctagggctggtttaccacatcagtatggtttctccccaggctttagaagccaggcgcaaggttatcaaagagacaatcatgagctggcttcttattgataaggcttctatctggcgcgaataa

SEQ ID NO: 397699 - DNA, 252 bp, Salmonella enterica
atgattaatgaaatagaatttaacgtactaaaagttatggctgaaaaagacaaagactggaattgttatcttcttgatcgggtactttctgtaagagatattccaggttttggtaatgtagtcagaattgttaatagcttggttactcaaggttttgtagaaatcattgatatcgcaaatgctactcaacctgactatcgggttactgatgaagggcgtgagtatgtaaaaaaacgtcattcaagagaatag

SEQ ID NO: 397700 - DNA, 777 bp, Salmonella enterica
ttgatccgtatatgtctcactgcggagtacaatacgctgtttgttcctgcgccgaaaccacagactcaaacccttaacagcgctggtgtaggccgactgctggcggccggaggaatttataatggcaacatcgagggattcagggacactgcagaaaaactgggcggtgatgccgtcaaaggttacgatcagattcttaatgagaaaacggtcagtacggccattatagcggcctcaattgccgcaggttatgggcttgggaggatggagttaagttcgacgataagaagtcttgaaaagctgaggcggattgaaaccaagggggtatcattagggggtagcaacaccgctgataatttatatcgtcggactagcaatactgaagtcttttcagatctgaaagtgcctatgcagatgcgctatgttgaacaggctgcacgtgaaggtgggataggcttggggggagttaaagtgagaattatcagggattctgacctaaaaggtaagaatatctatggttatactcaccctaatggtgatattgatttgtacccagatgcttttacggatattgagcaattaataaaaacattaggccatgaaagaacgcatactatgcaaatctatctctttaagcatccaaatacatatgctgatgatgcaatcaagatgaatagagaattgatattgaatgaaaaagccgcccatagtattgaggatagcttttggcaattttacctcaataataagactggaaagctagaggagtacaaatag

SEQ ID NO: 397701 - DNA, 429 bp, Salmonella enterica
atgtttttctcagtgggcgtcgagacgccgaaagatgaagacaccgcctacggcatgatcgttcctgcgttttcagcttacgattacgggtgcttttccgccgctgacactccggaccagattggaccaatggcgaaagaggcgatcctgatggtcgttgaagacctcgttcaggacggtgtcgctgtcagcgatattaaagatgccggctatctggtttacgcagccaatccggattacagggatttcgatagctgggtaatgatcgaggttgatttatcagagttcgagggcaagcctcagcgaatcaatatctcgctgcccgatacactaataaaacgcatcgataacgctgtaaaggccggcagctcataccgggatcggagtcactttattgccgaagcggcgaggcgcgaactgaaacaatag

SEQ ID NO: 397702 - DNA, 459 bp, Salmonella enterica
atgaataaatcaactctcttttcaaacgcctggaacattgcacgcactgcggcctctcagttcggtggctctgtaaaatcatatttcgctgaatctttaaaactggcttacgcacagatgtccgcaccgaaagagctgacgattgaatcctgtaagcggctgggtggcaacctgtgggagaaaaatggaatgtgccgcgtttatttcaacactgacattgttagcagcattattaattttgattactcaacgtacaaaaccggcaacatcagcatcgcttcactcaatggctccagcatcagcaacagccgcgcatccagcattcgcagcatgttaagtactacaaaattctggtttgatgctgccgacggcaaagtccgcgcccgcggttttgactctcgcgacctgtctatgagtgccgtttgcaaattaatcaaatctgccgtactcgcagcataa

SEQ ID NO: 397703 - DNA, 390 bp, Salmonella enterica
atgaacaatatagaaaaactggaaaaagtcggtctcgaactgtttggcccgaactggattaccccgatggcgcgcgttattggcgttaacgagctgactatccgccgttggttaacgggcaaatctcgcgtatcaaccactattgccagtgagttgcctgacgctctggcgcgtaaattccagaccgttctggatattgccaattccgacagggtgcgcggtgatgatgtgtcaatcgagatgatcgcgaaaatcgccgatcgttacgagttttctgacgaacaggatcgcagggccgctattgacgaaatgaataacgcggtttacgaggttacgtatctgtctaatctggagtcaatcgcgaaaaaatgggagaagcgccatgcctag

SEQ ID NO: 397704 - DNA, 672 bp, Salmonella enterica
atgcctagtcaccacacacaactatttacacggttaacgaggaaaaagatgtaccctcccgatgttaatgcgtgcctggcaatgccccagggggaatttttacaggttctgattgatggactatctgcaatcgcagaacaccggataaccagaattgaattcgcgaaaatgtcaggattatcacaaaaaaacgtttattcgtattttgcatcacctaatgccagagattttcgggcgttatcagatgaaatgagaattgcaataatctggaggattttcacagaaaatccttatcagcaatacgaaaatcaaaaaaataataagatcatgcgctcacatttaggcgggtcgaaacttttcatcgtaaatggggagcttctttcaataacccaggcggcagtaaagctgggctattccagcagcagcgcattaggaaaacgaatttcagcagaaaaaattgagcctggcagcgatatcagcaccctacaaaacaaaagaccaggagagacagcaccaaaattattcgttgtaaatggtgttgaaatgaatattactaaggcgtctcgcgttctaggatatgccaccccacagggactggggaagcgaatcaaaaaaaaacgggcttcgccaggtgcggatatatcaacctacaccaaatggacaccgtggtaa

SEQ ID NO: 397705 - DNA, 906 bp, Salmonella enterica
atgtcgcactcgcctctctcgccacaaaaccacctcgccggcgccggaaaaatctacccggatatatggcgaaaaattgacgctatcagggagagcgccgggtggccagcctggtgttttgcaccaatatccgaaatatataaatgcgtgcgcgccgagtgggcgggccgggcggatcttcataatatggcggcggatatcgcccgactggccgggctgtcagcgtggcgtgccacgcaggggatctatcagttcgacccggatttatattccgcactaatcactacaccggtagatcgcctccctgctgaggttttgacgctcctccctgagtgggggatctacgtcgaaacgccggaccggggtaacatctccggatttttcgcgcactgtgagtacgacccccgcactaaatcgcctgaattacgattgctgctgaacgtaccggacaacctgataccgatcgcggttccgattattaacggagcgttatcagacgctatcaatcagatcgtgccgggcgccgggaataacctggcggaaacctgcggcccgctgatttcgctcgtactgtatatttgcagcgtttcggcagattttggtcactattcagcgtacaggccgacgccagttaaaacaaaacgaggttatcgcctgtttcctcccgacgcaccgacggtagtcaaaactggcggcgaggttggatcaatactccgggccagccgggcaacctggcagcgtcagattcaggccgggccaaccggcagggtaatacaaccgcacgtcaggcgcgcccactggcacgggtactggctggggaatcctaaaaaattccagatcaggtggatgccccctgttctggttaaaggggatgcacctgcctgttatacccggcaggtgatatga

SEQ ID NO: 397706 - DNA, 585 bp, Salmonella enterica
atgaatgcagcaattgccatttccgacgtatccattcatcaagacaccgagggccgttatagcctcaatgatctgcacaaggcatctggtggcgaacaacgccatgagcctaatcgctggatgagattagaccaaaccaaagaaatgattgaagtgattataaatgcccagatctgggcatttgaacccgtactctcgcgtcgtggctgccgtggcggcacttatgtctgcaaagagttggtctattcatacgcaatgtgggtgagtgcagaatttcaccttgctgttatccatgcctacgacgcgatgatgaccgcgcagcatcagcaggtacaaccagcgtgcgctggtggctatgaagttgttacctcatttagcgaagaccacaagcctctttacagccggatagcgcagcctggcgaattcatgtcaacactggagggacacaccgaaatgctcagacgcgccggatacgttgtaacccactgtgatgatctggagctgttgacggtggctgatttggcaaaaagagcgggcgaggcgcggcagctcatgaataaatggctggctataacaaatagctga

SEQ ID NO: 397707 - DNA, 582 bp, Salmonella enterica
atgactacccaaatcatcatttccgacatatccattcatcaagattccgaggggcgctatagcctcaacgacctgcataaagcatctggcggggaaaggcgccacaggcccgtttattggctcaactctcagcaaaccaaagaattaatagaagaaattgaaaaggtcggaatcccgaccttttgcccaatcgaatcaaaacggggctgtaagggcggcacctacgtctgtaaagaactggtttacgcctacgccatgtggattagcgcagcattctcactgagggtgatccgcgcctacgacgcgatgatgaccgcgcagcatcagcaggtacaaccagcgtgcgctggtggctatgaagttgttacctcatttagcgaagaccacaagcctctttacagccggatagcgcagcctggcgaattcatgtcaacactggagggacacaccgaaatgctcagacgcgccggatacgttgtaacccactgtgatgatctggagctgttgacggtggctgatttggcaaagagggcgggcgaggcgcggcagctcatgaataaatggctggctataaacagctaa

SEQ ID NO: 397708 - DNA, 240 bp, Salmonella enterica
atgattcgcaaattattatttattatttgtatgtttattggtacttctgcttttgccgaagataatatattaatggcaaatataacaccacaacaattcatgaaaatttataataaagatatcggaaccctcgggaaggcatacaaaacagccaagataaaaagcacaaaaaaatcagatgacgggaccatgattcagtttaacatagcccccccaaatagcaggtatgggctgggttaa

SEQ ID NO: 397709 - DNA, 273 bp, Salmonella enterica
atgggctgggttaactcatcaggcaagttaacctctgtaatgtggttaattggcgggaaaggccttgacgcaagtgacgccctagtctcgttatgctccatggttgacgcgctggacgacagcctaaccctaaaagacaccgggccattattgactaactatatcactgatgatctggactcaactccagttgagtttcaaaccgaaaacaatacctacaaaataagcaaatctgacgcttacgggataatgcttcaggtatcaccgctctga

SEQ ID NO: 397710 - DNA, 285 bp, Salmonella enterica
atgagaatggcaaaccctgcccgccctggcgaaatcatcactgaaacgctggaggatatgcatatcagcctccggcagtttgcaaaggcaatggagatcgcaccttctacggccagccgcctgatttccgggcatacggctgttactcccgagatggcgctgcgtctcgccgccgttatcggcagcacgccggaaacgtggctgaaaatccaggctaactacagcctggcggaggctcgccgcaccacggacgtcagccacctgcaccgactttcttttgcataa

SEQ ID NO: 397711 - DNA, 603 bp, Salmonella enterica
atgacttcccgtcagcgcagggcgcatcacgccgcactggcgacggtcgccacgtccacgcacaaacgctggctggggagatttaccccgttgaccagcgtccagtcagcctggatcaaatccctgttgtgtctgtggggggagagtattcgaggtggagctgttccgagagcaccgcacggacaggcgtgctggcgatcactgaaaggggtgcactggtctgacgcggcactggtgcgattcactgaggcgctgtctcaggcgaggggggagggattcaggggcgatctggcactggcacgcgctcaggcaatcctctggcctaaaacgcacgttagtattatcgacgaggcgctaacgagtgacgacgccgattttatggaggcctgcgtgctggaggcgttcgaacagactgacccggtttatataatcggagtgagctattacacgacacgaaaaaaaatatctgacctgacgcgggatattcagcaaatagcgccctggctgacacctaacgaggcaagaaagcgcgttcgctggtgcgtggagatattccgggcgcgggtttttctgagcgcccgcaaagcgttaaggtctgattga

SEQ ID NO: 397712 - DNA, 645 bp, Salmonella enterica
atgaaatgcaaagttgaagggtgtgaacgagaatgcaagcactatcccggcaagggaatctgtcaaatgcattacttccgaatgatgcgctacggaacctacgaactcacaaaaaacggcaaaggtaaattcaggcagagaaattctaagggttatcaaatgctcaagatgccagaacacccattagttatggcaaatggttacatttatgagcaccgcaaagtcgtttacgatcgttatggtgaagcgcttcctccctgcgagaaatgcggcaaggtagtcacatggaaaactgttcatatcgatcacattgatgaggtagttgacaacaatgacgagtccaatctgagagtgctttgccgggcatgcaatgtaatgcgatcccgtatccacattgctgagcatacgaaaaaagggcggtcatccatcacctttgagggggttactaagacggcctgtgaatggtcccgtgaccctcgagttatggtttcttcaccaacaatcattcggcgcataaaaaatggcatgagcgtggaggaggcacttttttctctgaagataactcataggcatactcgagcaaaaaccgtaattcccgtctatggggaataccaaggaccaaggaaaaagcaggtgtcggcatga

SEQ ID NO: 397713 - DNA, 630 bp, Salmonella enterica
atgagaaagccaacccgccgaacctgcaaaatctgcaaagagaagtttatcccaaaatatccaaatatctggtggtgctgccctgaacacggcttcgagtacagccaactcctgttagccaagaagaaactggctgtcgaacgcaaacgcaagcaggaagcgcagcgggaacgccgtgagctgaaagtcaggaaggctgcattcaagactaaaactcaatgggataaagaggcccagtccgctttcaaccggtacatccgtatccgtgatgagggaaagacgtgcgtcagttgtggcaattcgctcatgggcaagagcaactacctgacaggcagtgccattgatgccagccattaccgttcccgcggcgccgcctcacatctcaaattcaacgtatttaacgtccactccgcttgcacccgctgcaaccggcagttgagcggtaatgctgttgagtaccggatccgcctgattgaacgcatcggccttgagcgcgtagagcgactcgaagctgacaatgatccacgccggttcgacattgcctacctgaagcgcgtgaaagcaattttttcccgcagggccaatgcactgattaagcgccgccaaaaagtacaggggagtgcagcatga

SEQ ID NO: 397714 - DNA, 234 bp, Salmonella enterica
atgagcaaatcactgcaaattaagtgcctaaaagataacgaagggtggtggacagaaggtgaaatgtatccggctcgtgttgttgccggtggcttcgttcaagttggtgatgatgacgatccgaatggagaaggctggagcgcttctccgattcagtaccgggaggatggttcgatcctgtatcagatcggaggcatagaaggtgaggttttgtttgaggtggccgcccaatga

SEQ ID NO: 397715 - DNA, 408 bp, Salmonella enterica
atgaatatgaaaaagatgtcgatcggcgaacgaatccgttaccgccgtaaagagtcaaaaatgactcagaaagctttagctaaagcccttggtttatcagatgtttccgtttcccaatgggagcgagatgacagcgaacccacgggtaagaatctttttgctctaagcaaaactctacagtgttctcctacctggattttgtatggagatgacgagcaaaatccagaacctcctctttttgtcacgcctgagctcgatgaaagacaaaaggaattgttagatcttttcaattcactgccagaatctgagcaaaatgcccaactttcaagcctaagagcaagggttgaaaattttaataagttatttgaagaaatgttgcaggcaagaaaacgcctgaaaaaaacataa

SEQ ID NO: 397716 - DNA, 375 bp, Salmonella enterica
atgaaacctgaaatttttgatagccagaaaggtaatgaattagtaagtactgacgaattcataaaattcatttatagttttaatagcaaacttacatgtcctgtatgtagacaaggtttatgggatacgcaaggcttggtaaagattgaggcggtggaaggtgaaccccctgttgatgtcattgaatctcttaattactctagatatatagctgaggaggataggacaaatgcctatccgggtgggctacctctctttcgagtaacctgtcataattgcgcatacattatgctcttttcatataaaagagttagggcactaattgcaaagcaagctgaggaagcggcgcaaaagaaagggggtcatgatgcctga

SEQ ID NO: 397717 - DNA, 300 bp, Salmonella enterica
atgcttggaccacgcgtagcaagacttgaatcggacgttgagcatatcaaggtgagcctagccgatatacgggccgatcttcgagttctgagtggcaactcttcaataatgcagcgtgatactgctgtgattattcaaaagcttgtagatattgaaaccgccatttcaaaaaaaccgaatgttgactatatcgaatccaaaattgtcaaatgtgcaaataaacaaatcatatgggcattcggcattttgcttgccctcttctctgccgcaaccggtataattctcaagttcatagcttaa

SEQ ID NO: 397718 - DNA, 156 bp, Salmonella enterica
atggaaaagattgatttaggaaacaatgaatcagcagtatgtggagtcttccagaacaacgacggcacctttactgctctgacgttctccaaaagcaaaacctttaaaacggaagctggcgcacagcgttggtttgaaagaaacactcgcgattaa

SEQ ID NO: 397719 - DNA, 138 bp, Salmonella enterica
atgaaaactcgcttaatcaacctgagacaaatccagtgggctatcgatgctgtatgtaataagcgcgacctagagtttgtcgttagctgtttcaacgcctgcatcgatcgcggcgagatgggccacgccattaagtaa

SEQ ID NO: 397720 - DNA, 300 bp, Salmonella enterica
atgaacgcttacgctatttacgacgctattgagcaacgccgggagcacgacgacgtactccgcaatctgcgtgaagagaaagagtctgaactggcaaataacctggagggaggcttatcccagcatctttttgaatcgctgtgtgttgagcatttacagcgccggggagtcaacaagctggcaataagccgcacttttgataatgacgttgagttccaggagcgcgccgccgagtttattcggtacatggccgagacattttcccggcatcaaattgatattgaattagaggataaatga

SEQ ID NO: 397721 - DNA, 381 bp, Salmonella enterica
atgaattacgatccacgcaatatagagcgaaataaacgtatacggaaattaacagataaggcgaaaacagtcgggcatataacacccggagaggcgctccgcctcctaggtggagtgacaagagaaacaataaacaaatacatgaaagccgcagccgctaccggagaggttatctacgttagccagcgtggactatttcgagatgaagcctgtctgtctgggtttattaaaaatagccgggccatccgcaaacagactccccgttacagtccgaaaactgatattgagaaatcaatatttcaacagtgccgggagagtccagctatgcgccgcgtactggctgtttatggcgtcggtgatcttcggggtttgtttgggtga

SEQ ID NO: 397722 - DNA, 708 bp, Salmonella enterica
gtgcataaacccgctttccgggtcggtggtgctgactttggtgttcttaacggcggctgcgttttcgggcgtcttttttacgccgggcagcggctttttttcgtgctgtttcctgtcggcctccaccgcggcattgagctgctccagatattcactcaccccttccggacgctgctcattcaccgtcttacgcgggttcgcattcgccttcaggtgcgtgctgtcagtgtagaggacgcgcccgttcgccatcccctgactcagggcctgctccacgatatggtcaaaaatctgctggaatacgtcgctgtcgttaaagtggcgaatacggttctggctgagggtggacgcatccggcactttctccgtcaggcccatgcgcaggaaccagcggtacgcgacgttaacctggatttctttaaccagacggcgttcggaggggacaccgaagagataccccagcagcatcatcttaatcaggcggaccgggtcaatggcgggtctgccgttgtcgggacagtagagatgagccacggcatcgcggataaattcaaagtcgatggcggcgtcaattttacgcaccagatggtcttcagggacgagttcgtcgagggtgatggtttcaaactggtactgctggggggagggttctctgagcatggcggtcagtccgttttttgcactgaccttattagatcaaagtcctga

SEQ ID NO: 397723 - DNA, 1302 bp, Salmonella enterica
atgatgaaacttaatataattgcgactgtcttacttgctttttcagtctcaactttcgctattgattatcctgtattgaccaacaccagccctgagcaagtgggttttgatagcaaaaaacttaaccgacttgatggctggattcagaatcaaattgatgccggatatcccagcatcaatcttctggtgataaaagataatcatattgttctacaaaaggcctggggctatgccgaaaaatatgacggttccactctgttagccagtcccattcgggcgaccactaacacgatatatgacctggcttcaaacacaaaaatgtatgccactaactttgcattgcaaaaactggtatatgaaggaaaaatagatgtcaatgatttagtatcaaaatacatccccggctttaaggatatgcctggtgataaaatcaaaggcaaagataaactccgcatcattgacattcttcatcacgtagccggctttcctgccgatccacaatatcccaataaaaacgtagccggtaaattattctcacagagtaaaagcactactctggagatgattaaaaaaaccccgctagaatatcaacccgggtcgaagcatatctacagcgacgtggattatatgattcttggttttatcattgaatcggtaacggcaatgccattagatcgctacgtcgaaaccaccatttataaaccgcttggattaaaacataccgtctttaacccgctgatgaaaggcttcacgccgccgcaaatcgccgcaacggaactacacggcaacacgcgtgacggcgtgattcacttccctaatattcgcaccaatactatatggggtcaggtgcatgacgaaaaagcctggtactcaatgggtggcgtttcaggacacgccggactcttttctgacacccatgatatggctgtgttaatgcaagtgatgctcaatgggggcggctacggtaacgtgaagctattcgataagaaaacggttgaacagtttactcgccgttcgccagaagacgctacctttggtctggggtggcgcgttaacggcaacgcctcaatgactcccacgttcggggtattagccagtccgcaaacgtatggacataccggatggaccggaacgctgacgtctatcgatccggttaaccatatggctatcgtgattttaggtaacaggccgcactcgccagtagcagatcctaaagtgaatccgaatgtttttgtcagtggattattacctgcggcgacgtatggctggattgttgatcagatttatggcgcattgaaataa

SEQ ID NO: 397724 - DNA, 618 bp, Salmonella enterica
atgatgagctatatcagaaaaattaaagcagatctggacaactataccggaacagagcgaaaaatagcgctgtatatactacaacacattgattcctttaaggattgctcatcgcattctctagcttcaacgttaaatattgctcagtcttctatttcaaaattcgctcaaaaattaggaacgcgcggatttactgatttgaaattattattgattgaagaaaatggcagagcaaaagactcaagtagaggtaaaaatcttcacgctacaattcagagtgatgatccttataatgtgatagcagaaaaattaattactgaaaaatatgcagcattaaaacaatccattgaacatattgattttgtcaattttgaaaaaattataaaaattattcactcatctcgacgtatacaaattacggggatcggtgggtcagcattaactgcgaaagatttagcatttaagttattaaaaattggttataatgcaatatgcgaaatagactcacatgtacaaattacagtggctcagtccttgaaaaaacaggatttgcaaatagttatttcctactcaggtaataaaaaagaaaggccaatggtgcaaaaattattgcgataa

SEQ ID NO: 397725 - DNA, 657 bp, Salmonella enterica
  misc_feature (559)..(568): n is a, c, g, or t
atgtgcgaaagtatattaagaaactactcttctaacaacaatgaagctattctgaaaaatagtcaggaattatttactgagtcaatattaccttctgaaactgagcttgaattattcagaccgttaacatctggagaggtcaagctggcgcaaagtatatttagagatgtcattaactatgacagagtaaagatatattgtgaccgtaatcactcaagagcgcaatcgaaagttataaccaatactcgaaatggtgaggttcttttgagtataaatgaatatagaactgatttttcatctggctacgataattatcatgattctgtaagatatcagcatttatttatattcgccatgtcatttgtctggcaatattatcggcatgactcttcttttcatgataatacatatgtatcaacaccttgggtctcgtatgactttgaaaaaattaactttattttttactctttggagcaacaagcggcaattattgctgactactggttactgaaaaagtatgatctttttgaatatgaaaaattaagtagttatcaaaagnnnnnnnnnnaaatacgagtctattttggggatgtgcactcaagttttatgatattattaagaggtttcttgctggatatctcctctataacatgctga

SEQ ID NO: 397726 - DNA, 330 bp, Salmonella enterica
atgcagaagacgataacgcggcacgtatgggaagaggcaaaagagaaggcgaacgcgctgcggctgacgaaatggggaaaaaaggtgtacgcacggcgtaaggaaacggtggagcgtagcttcgcggacgcgaaacagcatcacgggcaccggtatgcgcggtaccgtggactgatgaaagtgcagatgcagtgcctgctggcggcgacggcgcagaatatgaagaagatggcgctgctggcgctgttttacgggctgttaatgatgctgaaacggtggtcagaaaggcttcagtggtcgatatggtctgagcaaagcatggcagggtaa

SEQ ID NO: 397727 - DNA, 228 bp, Salmonella enterica
atggtcacaaaactgcagatctcatgcgctgagccggtaggtgtctgcggtcacgcagctgccgagctgcgccgcttttctcgcggcgtcaaaaactattcccgcatcaaaccaaatttttacctggtgatccgcatcggtaggcgctggcgcttgctgagtaaaaacggcggcaaggtctggtcactgatgacacatgaaaaatacaacgttgagagcaagaaatga

SEQ ID NO: 397728 - DNA, 780 bp, Salmonella enterica
atgtcacacccgccgatctgcgcggattcactcaagttcacttctttgccgggattggtgtttggtcatatgccctgcgccgcgctggctggccggactccagaccagtctggacaggttcttgcccgtgccagcctttcagcccggcaggcaagggaaagggatttactgacgagcggcacttatggcccgccatgcattggttggttgggcagtgcgatcctgtcgttatctttggcgagcaatctgcaagcgctgacgcaaatgactggatcgaccttgtacaagcagacatggaagcaatgggatatgccttcggggcgtgtgcgtttccgtctgcgagcgtcggcgcaccgcacatccgtgacagagcttactgggtggccgacaccaaccgcgagcaatacaaagaatgcttaccaggacgcgcagaaagtcattgcgcggaggcttgctggccgtcagtcgaacttacaagattttgcctgtctggcgggatggcctacaccagcggcaagggatcacaaaggggggtatcaggggggcaggatgcgcaacgggaagctgtcaacggacactctggatgtggtggcacagatagcaggcccggcccggttaacggtttctggggatctgctgactggttgttctgccaggatgaaaagtggcggccagttgaacccgaacttgtcccgctggttgatggggttgcctccagagtgggacgtcttcgcgcctacggaaacgccctcaacgttgaagcggcaacagcgttcataa

SEQ ID NO: 397729 - DNA, 135 bp, Salmonella enterica
atgaatgcaatcgcgctggccgtcgcaactggttgcgtcggctggcgtgattctgcgggtgcgggcggcaaagagcccgcgggtaccgtgctgtcatttctgacagtgtattccggcagacactatcacttttga

SEQ ID NO: 397730 - DNA, 897 bp, Salmonella enterica
gtgagctcctcccgtcacaacaacttaagcctgtttagcggcttcggctgctttcacgatcacggcgaaggcgtcagctttcagagaagcgccgcctaccagcgcgccgtcgatgtccggctgtgcaaacagctcggctgcgttggacgcgttaacagaaccgccgtactggataatgacctgctcagcgcggtgctgatcgtcaacctgacggctgatggggagcgcagctttacctatctggtgcatccgggggctgatacctacgtttcgccgcaggatttgccgccgttcaggcagtacgaatggttttacttcagctcaattggcctcaccgacagtcccgctcgcgaagcgtgtctggaaggggcgagacgcatgcgagaagccggtggctacgtgttattcgatgtcaacttacgcagcaagatgtggcgcaataccgatgaaatccctgaactgatcgcccggtccgccgcattggcttctatctgtaaagtctcggcagatgagctgtgccagctcagcggcgccagccactggcaggatgcgcgttattacctgcgcgatctgggctgtgacaccaccatcatttcgctgggggccgatggcgctctgttgattaccgccgagggggaattccatttccccgcaccgcgcgtcgatgtcatcgataccaccggggcaggcgatgctttcgtcggcggactgctgttcaccctttcccgcgcaaattgctggaaccatgccctgctggcggaggccatcagcaatgccaacgcctgcggcgccatggcggtaacggcaaagggcgcaatgaccgctttaccgtttcccgaccagctaaacacttttctgtccagccattcgctggcacaagccatgaccgtgaaataa

SEQ ID NO: 397731 - DNA, 147 bp, Salmonella enterica
atgaccctaatgatttctccaggaattatcaacgttattgtgtctatcaaaaatcagatactctcgagctggaattcgttgagacggctaagtgacgtaagtgtgttcctgagcgtcccaatcgcggcggatgtgaataaaaagtga

SEQ ID NO: 397732 - DNA, 300 bp, Salmonella enterica
atgaaagagcaattcaccaccacggtgagagtcacaggcaagggggaggccaaagcgcgcgcctttgccgatgccctgaaccacgttcaggctgcggtgatgaaagcgtccccgcatatcttactgcgtattgagccacaggatgtgcaggttgttcaagcgcgtgaaacggtgcgcaaagaggcctttctgtttttctttttgcgccgggaaagacgcaccttcagcgtggagctggacgtgaccgtcaacgtgactgccatcaatctcgacaaggtggatttcgtcgcgaaacgctga

SEQ ID NO: 397733 - DNA, 165 bp, Salmonella enterica
atgacctatgagctggagtttgatccacgcgcgctaaaagagtggcaaaagctgggtgaaacggtaaaaaaaagttccgcaagaaacttgtcgacgtgttgtcaaatccgcgggttgagtctgcgcggctgcgtgaactgccagattgctacaaaatcaagctga

SEQ ID NO: 397734 - DNA, 312 bp, Salmonella enterica
atgcagcttgcgcgcctgctgccggagccggaagagaagaaaacatgtcccatccgtaaaccgctgccttcgcaccttcagcgcgaagaaaccgttatcagacctgacgcctgcgcctgcccggactacatcccggcgcagttcgtggtgaaacgttatgtccgcccacagtacggctgcgacggttgtcagcgcgtggtgtcaggcctccttcccgcacagattatcccgaagggcattcctgaaccgggcttggtggcacaggtgctggtcagcaagttctgcgaccgtcagccgctgtatcaccagtag

SEQ ID NO: 397735 - DNA, 204 bp, Salmonella enterica
atggggcggaatacgtggctgttcgccggatcgttgcaggcagggcatcgtgcggcagcggtgatgagcctggtggaaacggcgcggctgaacggcatggagccgtatggctggctgaaacaggtactggagcgtctgccttcattaccggaagagcgactgcacgaactgttacccttcgcgaaaaatcccctgaataactga

SEQ ID NO: 397736 - DNA, 417 bp, Salmonella enterica
gtgttcccctcctacagtgaattgcaggtgcagctctcgaaccatccgcaggatgaaaaagcctcgcgcagtaccgtcagccgggccttgctgatgctacgcctgacgcgctggctcagcctgtgccataagacgcgggatcgggtatccgggcgcatcctcgggaatgtctatgcgctacacgataaaccgctgagcgtgctggacgctgtacgctttgatgccagctacctgctggcaacgctgcgcaaggcacaggacggcgagttcaatcagtatcggcgcggtaaagcagcgataccggaatctgtgccgccagtggtttcagatccagaaggaccggcaaagccacgcaaaaagcgggatatcagtaagttggttgcggagatccgggcgcagtgtctggggagtggctga

SEQ ID NO: 397737 - DNA, 615 bp, Salmonella enterica
atggcttactctttagcccaaacgttctataacgattatcctaaaaaaccgataataaactccgaaccctgctatgaaatgatgggatacagtcggggattatatggccgctttagccggtcagaagtacgtaaagcagcctggcagagcgtgttatccggtgctaatgcagggattacgtatggggcgcatggtctctggagttggcatacccgggatagtgtttacggaacaaccatgggtgaaggatttttaccgccttatacatgggatgaagcactaaaattcccaggggctgctgattatgtctggctaaaaaatatgtttacacggcataatctttggttcctggtgccttattatgggttgcatcattgccatgaacaaatccgggctgccaggcagggggagctgattctggtatatgttccttataatattgagattaatattgaatgtgataatacattcaatcgtgtcactgttattgaactggagagcaagagacaaacggaaagcgaaatgactcgcataggggagttggcatcaatcccgatgacctcgtttaccggtgattgtctgtatgttctacacaatggctcttttaccctctga

SEQ ID NO: 397738 - DNA, 972 bp, Salmonella enterica
atgtcaaagcaggatgagcagcgcttgctagtgaagatcgccacgctttactactgcgaaaacaaaaaacagtcggaaatcgcctcactgttaaacctctcacagtcctttgtttcccgtgcgttgacacgttgccagaaagaaggtcttgtaaaaatcactgtggtgcagcctacaaacatttttgtggagctggaaaaagcgatggaagagcgttttggtattcgccaggccattgtggtggatgtgggagaacaggcggatagcacgcaaattaaacatgcgattggcagcgccgcagcacactatgtggaaacgcgagtccgcccggaagacttggtggggatctcatcatggagtagtacgatccgttgcatggtggatgaaatgcatccgcagaacgttcgtgcttccggggtcatacagttactgggtggcgttgggcctaatggcaacgttcaggcaacgatcctgactcagcagttggccgcgcatctgggctgtccggcatggctgttaccgtcgcaaagcatcgaacattccgtggaagaacggagccgactggtgaacagtcccgatgtcgccgcagtcgtggaaaagtttgatgaagtagatgtagctatcgtgggtatcggggagctggaaccttcacaattgctgaaaaactccgggaactactataacgaaaccatgttgcagttactggcggaacgtggtgctgtgggcgatatttgtctgcactactatgatgcagcaggcaagccagtgttgagtaaggatgaagatccagtgattggtatggagcttgagcaaatccggcgttgtcagcaggtcattgcgctggcaggaggtgtggaaaagagaaatgctatttgtggtgctctggcaaacaattatattgatgtcttaatcactgattatcctaccgccagaagcattatgaaaggccatggcaacgaggtaaaacgatag

SEQ ID NO: 397739 - DNA, 831 bp, Salmonella enterica
atgaatccgttttcactctcaatcaaagagttagaacaaaaggccagagccattcgccgccgcatcatcgtattaaatgcggaaagcccagccggtgggcatactggtgcagatctgtcgcaggttgagttgctgactgcgctttatttccgcattctcaattgttcaccagctctgaaagagagcaacgaacgcgatatctatatccagtctaaagggcatgctgtcggcgggtactattgtgttctggcggaagcaggatttattcctgtggactggctgaaaacttatcaacatgcttactcgcatcttcctggacatccagtgcggcataagacgccgggcattgaactgaacaccggtgccctgggccatgggttacccgttgcggtaggtattgcactggcagcaaaacgcagtggtagcacacgccgcgtttttgtggtgaccggtgatggtgaactggccgaaggcagcaactgggaggccgctctggttgccgcccactataaccttgataacctattcattattaacgacaaaaataatctgcaattggctggagcaacaaaagacatcatgaataccgatccgcttgacgaaaaatggcgggcttttggtatggaggtgaccgagtgtaatggtaatgacatggcagatgttgtcgttactctcgaaggtttgcagtcgcatggtaaacctcacgtgattattgctaataccacaaaaggcgcgggtgtttcctttatacaaggacgtccagagtggcaccaccgcgtaccaaaaggagatgaagttgaactggcgctggaggaactgaaagatgagtaa

SEQ ID NO: 397740 - DNA, 954 bp, Salmonella enterica
atgagtaatagcgaacatctcgccactgtgatggtgaaggcctttattgatgctgttgaccgtggcgtggatctggtaccggtagtggccgactctacctcaaccgccaagatcgcaccttttgttaaaaaattcccggaccgtctggtcaacgtaggtattgccgaacaaactctggttggcgctgccgccggcctggccctgggtgggaagattgcagtcacctgtaatgctgcacctttcttaatctctcgtgctaacgagcagattaaagtcgacatctgctataacaacactaacgtcaagttgtttggccttaactccggtgccagctatgggcctctggccagcacccaccactgtattgacgatatcgcggtactgcgaggttttggtaatattgaaatctacgctccgtcaagcccagccgaatgccgtcagattattgattatgcgttagagcatgtcgggcctgtttatgttcgtcttgatggtaaagctcttccggaactgcatgatgaacattaccgttttgtcccaggaaaaattgacatgcttcgacaagggaatgctattgctctggtggctatgggatccgttgttcacgaagcggtcagtgctgcagaacagctcgcagaacaagggattgaggcatccgtgattagtgtgccgtcgattcgcccatgtgataccagccagcttctggccctcctcgaaacacatcaggcagtagtcagcgtcgaagaacacaatgtgaatggcggaattggcagcctggtggcggaagtcctggcagaggccgggagtgccattccattacgccgtctcgggattgccaacggcggatatgctatcgcggcggatcgtaccactttgcgcgcgcatcatgaaattgatgcggccggattggtgaaaaacgcaacggcgctctatcaacgccagcaacaacaataa

SEQ ID NO: 397741 - DNA, 1419 bp, Salmonella enterica
atgtcccgaatcccacatactttgacgatgggcattatcgtcggcaaccgcggttttttccctagctatctggtgactgaggcacgtgaaaaggctaaaacacttttcgctcgtcttggcattaatactattatgcttaatgatactcagaccgaactggggggggtggaaactcgacaggatgcaaaaatttgcggcgaattgtttcgcgcccaccgcgatgatatccacggagtggtagtactgttgcccaatttcggcgatgagaaagccgtcgctgaaaccttgcgcctgtccggactcaacgtgccggtactgatacaggcagaagaagataacctcgacaaaatggggctggcaacgcgccgtgacagcttctgcggaaaaatatctctgtgtaacagcctgcgccagtacggaataccgttcaccctgacgacacaacatgtgtgcgctctggacggtgacattttcgctaacgatcttcaacgtttttcccaagtttgtcgtgtggttagcagtatgcgtggcgttcgagtcggcgccattggcgcgcgtcctgctgggtttaacaccgtccgttacagcgaaaaactgctggagcgtctgggcatcgccgtcgaaacgctcgacctgtcggagatttttacccgtattgaacggctgcatgacaatgacattcgtgtagatgaaaaacgtctcctgctgctcgacaatgccgatgccagcgctattccggcagataaactggtcaccatggccaaactattcgtggtgatcagcgagtgggtgagcgccaacgatatcgacaccactgcaattcagtgctggacttcgctacaggaaaaccttggtattaacgtctgttctattatgagcgttatgtccggtcaattgatgccaagcgcctgcgaagtggacgtgatgggtgccctctctatgtacgctctggcgagcagcaacctcagtccggcttccattgctgactggaacaataactttggcgatgaccgtgataaatgcgtgctgttccattgcggtaactttgcgtctgccagtctcgaatcaccgcatatgggcaccgctgatatcatcggaaccacggtgggtaaagaaaatacctgcggtgctgtacacgggcggatgaagagtggtgagctgacttacttccgtttaagtactgacgatctttccggcgaaatcaaagcttacgtcggcgaaggtcgctcagtgaatgccccgctggacaccgtcggttgccgcgcagtcatacaggttcctcggctggaaagtttgctgtcgtggatctgtaataacggttttgagcaccatgtggcaatgagccattcagccagcgcggaggtgttgcacgaggccttcacccgttatcttggggttaatacctacctgcatcagtga

SEQ ID NO: 397742 - DNA, 1515 bp, Salmonella enterica
gtggccagcaaagagatcatcattgccctggatgagggcacaactaatgccaaggccgtcgcgctggatgcgcgcggtaaggtactggcatccttctctcgaagtctttcaatcagcacaccccgggaaggctgggtggagcaacctgcggatttattggtcgaagcatctgtcgatgttttaacacaagcgatcaatgctgtcggtgccgggaatattgccgcattggccatcagcaaccagcgcgagactacggtcggctggtaccgccacaatggtcgccctattagcgcagcaataacctggcaatgttcgcgaaccgccgatttttgccaggcactcagaaaccagggggcagaggcgcacatcaaagcagtaaccggtctcccgattgcgcctttgttctctgcctcaaaaatgcgctggctgctggagtctgtacccaacggcacggaactggcagggcgtggtgagatttgccttggcaccgttgatagctggctgctttggcaactaaccggtggtaaggcattctattgtgactattccaatgccgcgcggacgcaactgtttaacctacataccgcccagtgggacgatgagatgctggcgctgtttggtataccacgtaaggcccttcctgagatccgcccatccagcggtttatttggttataccagcggctgcgcagggatccccgacggtattccgctgatggcaatgattggcgactcccatgcggcacttttcgcacacggtctcggcagtgcaggtggcgtgaaagcaacttatggtaccggctcctccgtgatggcaccggttagctccgcgcagtccgacgtggatacgctggcaactaccgtggcctggcatgacggggagcagctggtttatgggcttgaaggtaatattccccacaccggggatgctgtggcgtggatggtggaaagtactgggctcgatttgctgactccgtcgaaactcgcacagcagttaagccagctgcctgcatccgttgattcaacgcttggtgtctattttattccggcgttaaccgggctcggtgcaccatggtgggacgaaaacgcacgaggaatgattcgtggtctcagtcggggagtaaaacgtgcgcatctagtgcgtgcggcactggagtcgatcacataccagattgctgacgtggtgatgaccatgcatcaacaccgtgattttaccttaacggctctgatggtagatggcgggccgaccaaaaacgactggctgatgcaatatcaggccgatttactcggttgcccggtcatgcgtagtgatgtagcagagctgtcggcgataggggcggcattgctcgcccgtaaagcgcttctgaacctgacaacgccagagctacggcagtttttaccggagcatattactttccagccagatttggagaggcatggtcggttgcagacacgctggcatgaatggcagggctcagtgtttattgcccggcaacgtccaaatgctgatcgttaa

SEQ ID NO: 397743 - DNA, 546 bp, Salmonella enterica
atgtctcaggcaatacagcagcacccagctatcgcaatgacccgccaccccttattcctggcgcgagccaacgcattaaaaccccatctttattcataccctgtcgcgccgacaggaaaaattcagatcaccggcacgccgaatcactggcaggcaacgccatgcggtaatctcgaggcagtgtatgaacaagctctggatacgggcgactcgctgattctggattttggcacccattgtgttggttatctgcgttttatctgccgcgcagtaggtagtccgccggacgccccggtccatcttacgctgacgtttggcgaaacgttgggcgaagtcgtggagcctttcagcgattatcagggctggctgtgtagtagttggctgcaacagcatcaccactatcttgatgttttgcctgcgcacgttcagttaccacgccgttattgcttcagatatctgaaaatcgatgttggtgaacgatgttacctttcgccatcatgcgctggtacaacgctgcctgtatctttttgccggcaacacgcgtga

SEQ ID NO: 397744 - DNA, 141 bp, Salmonella enterica
atgcagccgtttcaaggtgatttggtgtcagttgtgtataacgcccatgagttattagttcgtggcacggtatcaatcgtgtttttttgtgagagtcagcttgtggttcgaggatacaacaaaattccccgaccactatag

SEQ ID NO: 397745 - DNA, 1020 bp, Salmonella enterica
atggctgaaaataccccccctacccaagcggctcgcgaaaaccatttcgttgataatgagcaggttgtcacattaaaacgtatttcatggagtgcggtattcgctggcgttattatttcgatggtggtttatctattacttgcaattttaggtaccgcaatcggtgcgagtactatcgatccgcttaaagagcaaaatcctcttgatggcttggggattggagctgctatctggacaggcttaagtatgttaattgctattgctgttggtgcctatgcaagtggacgtctggcccagagagaaggtgcattacacggcctattaatgttcggcgtaaacacgctattttgtgcctggtttgttcttgctgtagtcaacaacacagtcagcggaacaatgaatgtactgggggcaggactgcaaactgtcggcagtgggctgacagctatggcccctccggttaaggatatggttaaacaaaaaatggatcaaaataatatcaaccttgatagtttacagaatgagctggaaagcacgttacgtcagacaaataaacccgaattacagcctgaatatcttgaaaataaagccgaaaatgaaatcaataatgcgcaaaatcaggcagacgaaaccgctaatcatcctcagactgcagacactgatctcgccagctttattcaggggttaattagccgtaatcaggatactttccaggctgccgatcgcgatgctttaaaaaatatcatcaaggcacgtacgggtaaaaatgatgaggaagctgaacaagtcgtaaatcaagccgaaaaaacctatcaacaggcacgggctaaataccaggaagtaaaacaacaggctgaacaacaggcgcgtgaagcgggagaaaaagccgctgcagccgcagctaaagctagctggttcaccttctttatgctgttggttgaggccgttcttgctgcggctatgggcatgtttggtcgtcgtacccaacctcatacagcagctacccgttatcactggtaa

SEQ ID NO: 397746 - DNA, 174 bp, Salmonella enterica
atgcctgctaatgaacgtcttttccgggaaaagctggattatctccggcgctatggaaaacggatagcgcgggaaaatccccggctggaaaaattccttgccagtcagggcactgaccctggggtggagttgggtttgatctgtaagcacagaccacgaccatcaaacagataa

SEQ ID NO: 397747 - DNA, 1782 bp, Salmonella enterica
atggcggtggaaaaactgattgtcgaccatatcgacacctggaccacggcgctgcaaacccgctccaccgccgggcgcggcagctcgggtaagattgacctgtacggcattaaaaagctgcgcgagctgattctggagctggcggtgcgcggcaagctggtaccgcaggatccgaacgatgaaccggcgtctgagctgctgaaacgcattgcggcggaaaaggccgagctggtgaagcaggggaaaattaaaaagcccaagccgctgccggagattagcgaggaggagaaaccgtttgagctgccggaggggtgggagtgggttgcattacaagaaatatgctcattagaaaatggtgacagaagtaaaaactatccgaataagtcaacactagtagaggcaggaataccatttgtcaacgcaggtcatcttgaaaatggaaatatacgacaagaagacatgacattcattacaccagaacattttagcattctccgttcaggaaaattcctcgatggtgatattttattttgtcttagaggttctctaggtaaatcagcaattgtacaaaacctatcaggagcaattgcttcatcactagtaatcgttcgtgtttttaagcctacatttaataaatatattcatttatatttcgatgcgccattatcttatgattttataaataaatatgataatgggacagcccaacctaatctggcagctacagatttagctcgttttttagttccattaccaccactagatgagcagtctcgcattgttaataaaattacggagctaatgtccctctgcgaccaactggagcagcactccctgaccagcctggacgcccatcagcagctggttgaaaccctgctaaccacgctaaccgacagccagaacgccgatgaactggccgaaaactgggcgcgtatcagcgagcatttcgacacgctgtttaccaccgaagccagcattgacgccttaaaacagaccattctacaactggcggtgatgggtaaactggtgccacaggacccgaacgacgtaccggcttctgaactgctcaaacgtattgcgcaggaaaaagcgcaactggtgaaagacgggaaaatgaaaaagcaaaaaccgttgccgccgattagcgataaggaaaaaccgtttgaactgccggatgggtgggtatggtgccgcttgggtgaactagcccttaaatccgaggctggctggagtcctcaatgtgaaaatacaccaagatcgggagagcaatggggtgtactgaaaatcagtgccgttacttggggtgaatatcaaccagaggaaaataaagccctgccagctcacttatcacccagagaagagtttgaagtaaaagaaaatgatttcttaatttctcgcgcaaatacggctgaacttgtcgcccgctctgtcgttgtcccggaaaaaacacctggtaaccttatgctcagcgataaaattattcggttcgaattttcctcattagtcagcgctcactatataagcctggtgaataactctatattttcacgtgagtattataaagaagtagctggaggaacaagttcatcaatgaaaaatgtctccagaaaccaggtttcagagttactaattggtttacctggatataatgagcagttaaaaatcgttaaaaatatagctaaatatattcagatatgtgaagttctaacttctcaaattaaatccgcccaacaaacccagctccacctggccgacgcccttaccgacgccgccatcaattaa

SEQ ID NO: 397748 - DNA, 774 bp, Salmonella enterica
atgtctgctcgccaggtatgtcaaaattttttctgcggcgctttagctctgtttcacaaatatcgacaaaatgctttgctggatgccaccatcgcacttatcaatggcgcatctctgacgctgaccagtatcggacgttatttaccaggtactgctcaggtcaaaaataaaataaaacgtgttgatcgtttgctcggtaatgtgtctcttcatcacgatatccccctgattttcagaaatattatttccatgctgacgaaccgactatcactgtgcgtcatcgctgttgactggagcgggtatccctctcaggagtatcacgtactccgtgccagcctgatttgcgatggacgttcgctacccttgctgagctggatagttccttcggaaaaacagcaaaacacaaaggtacagcaagcttttcttaatactcttttcgaggcggtaaacccaaaagcaagggtcatcatcgtcacggacgcagggttccaaaatgactggttccggcacataaaatctctcggctgggattttatcggacgcatcagaggcaatgtccggatgcgtttggacagcaagggggaatactggttccggcgtcaggaattgcaggccagtactaaaccggaatatctggggccgggaatgcttgcccgatcaaaatatacccgatgcgatggtcatttttatttgcataaaaaagaaccgtggttaatattcagtagcacaaacaactttaagccgcgagaaatcatgaagttatacagtcgctga

SEQ ID NO: 397749 - DNA, 480 bp, Salmonella enterica
atgtcccagcccttcgatttcgataaagcgcttaaagcactccagtctggtcaggcactaaccggcaaggacggtgttttaacaccattaatcaaacagttaaccgaagcggcgctggccgctaagcttgactctcatctggctcaggacgttgaagccaaccgtaaaaacggttccggcaaaaagaccattaaagccccgacaggcagttttgaactgacaaccccacgcgatcgtaacggcacttttgagccacagctggtgaagaagcatcagaccacgttgtccgatgagatcgaacgcaagatcattcgcctgtttgcgctgaggatgagttatcaggacatcagccgggagattgaagatctctatgccttcagcgtttcaaccgccaccatcagtgcggtaaccggcaaagtcatccctgaactaaaacagtggcaacaacgcccgctggagaaggtttaccccttcgtctag

SEQ ID NO: 397750 - DNA, 660 bp, Salmonella enterica
gtgctggcgctgaatctggagggcaaaaaggaaatcctgggcctgtatctgtcggaaagcgaaggggcgaacttctggctgtcggtattgagcgacctgcaaaaccgtggcatggaagatatcctgatcgcctgcgtggatgggttgacaggcttcccggaggcgataaacagcatttatacgcagacagaagttcagttgtgcgtcattcaccagatacgcaactcgattaaatatgtggcgtcaaaacaccacagagcgttcatggctgacctgaagccggtgtatcgtgcggtgtcaaaagaagcggcagaaacggcgctggatgagctggaggcgaaatggggccagcagtatccggtggtcctccagtcatggcgtcgcaagtgggaaaacctgtcggcatacttccgctatccggcgaatatccgcgaggtcatttacaccacaaatgctatcgaatcggtacatcggcagttcaggaaactgaccaaaaccaaaggtgctttcccgaatgaaaacagtctgttgaagctgctttacctgggactgatgaacgcacaggaaaaatggacaatgccaatccagagctggaatttgacattgtcgcagttagctatttattttgaagggcgactgaataatgtgatgacgctgtag

SEQ ID NO: 397751 - DNA, 321 bp, Salmonella enterica
atgaaattttttttgtcagtgctgttgatatttttattactgtcttctatttcttatggaaagttgaatgaatgtttttctgaaaataaaaataattattttgtcgggaatgaggaagtagtaagaaaattaactgaaatatacgttgaggatcgctatggtaaagaacatgcacaacgggaaaaaccttataatattagtgataaaggggatttttggcaggttagcggtagcatagatcctaatgcaacgggaggtgtgtttttaatagaaatagataaagtaaatgggcgaattatatcatttactcatgggaaatga

SEQ ID NO: 397752 - DNA, 846 bp, Salmonella enterica
atgaaaaatcagctggagccgcgccctgagccggagaggaaagtacatctttaccactgcgaccaccggggcctgccgctggcgctgataagccaggatggtgacatcagctggcacgcagagtatgacgaatggggtaacgtgctgcgggaagataatccggcgcagctggagcagctgatacgcctgccggggcagcagtatgacgatgaatcagggccgtattacaaccggcaccgttactacagtccgggactgcgacggtatatcacgcaggatcctatcggattagccgggggatggaacctgtaccagtatccgctgaatcctattgagaaggtggatcctctgggcttatctgcatgggaggatgcaaaatcgggggcatgttatgaaggagtttgtcgactgttctctgctttcatcggcccggataaatttgatagtacagacgatgcagcattcgaagcattgagaaaaataaatggacattcaatatgtcaaggtgtcgaatatgcaggtttagtgtgcaaaaataatgaatatttttatacgccacctcaaaaaggaaatgaggatacttcttatccttttgacagtccatgcccgagtggaacagaaatagttgctatgtatcatacacacggctcagatagtaatggtgtatataaagatgaggaattttctccgactgataaagatttatctaaaagaaaaggtattccgaattaccttggcacacctaaaggatcattccaaaaagtagaaccaaatggtgatcaacctataaataaatccggcttgccaagtcaatgcagaatacatacaaatggagaggtatattga

SEQ ID NO: 397753 - DNA, 351 bp, Salmonella enterica
gtgatgggatctactgcgacaacgtactctttaaatgcgaaaagtatatcagagcttaaatataagtctaagcatggtaatgcagaagcatcactgagactacatcaatattatttattcactttgaatgatatagataaccaaatgtattatttagataaagctgcaatgcaggggagttcaatagctcaatataattatgcattttttctatcatataacgttccggaatatcataaatattataatttagataaggctatttattggatggatatagctgcaaaaaatggtaatattgacgctggaaataagttgcaagaacttgaaagcattaaaaaaaagaaataa

SEQ ID NO: 397754 - DNA, 333 bp, Salmonella enterica
atgacaaaagccgccgcccaccgcacgctggcggagaagctccagcaggatgcgggaatgaccttcgtgcaggaactggtggcgatgctggacgggctggaagccgaattgcggcaaagtgatatcagcgctgaaaatcagcaatggctggcgcagtgcggcttaacgccagagcagatgaagaaccagatggagccggtgtacataccgctgtgtaaaatccatctgtaccactgcgaccaccgggggctgccgctggcgctgataaaactggacggcaacatggcatggcgtgcggaatatgatgaatggggcaatcagctcagtgagtga

SEQ ID NO: 397755 - DNA, 594 bp, Salmonella enterica
gtggacgcagggtacttcacggcagcggtctgtcacctgacgcaggaaatgggcgttgcgctggtgccggggtaccggcggccgaataaagggcagaatgcgtaccagaaaaagcacttcaggtatgacccggataaggatgtgtacgtgtgtccggcaggggcagagctgagttacggcaccacggaccgcaacggctaccggcattaccggtcggacaaagcggtctgcgcggagcgtgataactgcacgaaaaacagccagatgcggaagacgataacgcggcacgtatgggaagaggcaaaagagaaggcgaacgcgctgcggctgacgaaatggggaaaaaaggtgtacgcacggcgtaaggaaacggtggaacggagcttcgcggacgcgaaacagcatcacggacaccggtatgcgcggtaccgtggactgatgaaagtgcagatgcagtgcctgctggcggcgacggcgcagaatatgaagaagatggcgctgctggcgctgttttacgggctgttaatgatgctgaaacggtggtcagaaaggcttcagtggtcgatatggtctgagcaaagcatggcagggtaa

SEQ ID NO: 397756 - DNA, 792 bp, Salmonella enterica
gtgagaactgttgattattatctggcaatattaaaacagattctggaatttgctttcaagaataagttaattgcagataaaccatatgacggtgtgaaacgattacagaaaagcaaaaccaaaccagatccgctattgaaacatgaatttcaagaattaatggcaacctcaccagacaagcagaaaaacatgtgtacaggtctgcgtccgggggagctttgcgcgttagcgtgggaggatattgatctgaataagggcgaggtccacgttagccgcaatctcactcaggagggtatttttggccctccgaaaaccaaggctggttacaggacaattaaactcctcagccctgtcctggatgcactgaaagcgcagaaggcgataacgggagatttccccaaagtttcgatcacaatccacctcagggagtttggaaggacggaaaatcagaaactgcattttgttttcatgccacacgctgagaaaggcaagcaggcgccgcactattctgtgagctccatcgtatcactatggaatgtcgcagtgcgtagagcggatatcagacgccgcccctaccagacgcgtcacacatacgcttgctggctattgtcagccggagccaaccctgctttcatagctacccagatggggcatgaaaacgcggagatggtttataccgtctattcagcctggatacacgcgctcgacggggatcagatagaatttctgaacgagaggattgggggatacactaccgcccctttttcgcccctattgagtaaggccatgtag

SEQ ID NO: 397757 - DNA, 333 bp, Salmonella enterica
atgtttccgactgaagttgagttgcacaatggtaatatcagaatcagcttctactacagcggtacaagatgccgtgaagtattgaaaggctgggttgtgtccaactcaaatataaaaaaagccagcaacttacgcataaaaatactaagcgaaattcagtttggaacgtttgattaccgcgcaacctttccgacatcaaaggcggctaaaaaatttgggggaaacagtccggcgtcatcgttcggcgagcaggcaaaatcatggtatgaaaataaaaaattgagctatcccctaacgcctctcgcagttacgactctacaatcaatatgttga

SEQ ID NO: 397758 - DNA, 153 bp, Salmonella enterica
atgaaagaatcgcgttccgtagcgtgggttgaaggcgttcattttaaacgagtgccactgactgtaagtaatcagccagaaaatgcagacaaaaaacgcggacttatttggtataactatccacgtattaatcagttgattcaggagtcgtaa

SEQ ID NO: 397759 - DNA, 834 bp, Salmonella enterica
atgaaatcaaaatctgtattggaaagaaatctacatctgtaccactacgaccaccgtggtctgccgctggtgctgattgccccggataacacggtggcctgccgttcggagtacgatgaatggggcaacctgctgagtgaggagaaccttgagcacctggagcagctgatacgactgccggggcagcagtatgatgaggaatcggggctgcattacaaccggcatcggtactacagtccgggtcagggacggtatatcacgcaggacccgattggactggagggaggatggaatccataccagtacccgttaaacccaattcataaagtcgacccattagggctgaaaacgttaatactagttggtggcgcaacaacaggtaatccattcggacatgctgctttagcttttagtggtcatggtgtttatagttatgggacaaatactaaatttggttcaaaaacgacagattatttagcttcacaattgagttatagagatacaactttgtatgaattgaatacaacaccagaacaagaaaaggaaatgatgcaatatataaaagagaattatagtaagataggtgattactcaattctgcatcatgattgtgccactatggtactcgatgctatgtctgctgccggtgtgttcagagattttattatatatgccattgctaatggtgggaaacctgcccagcttcctaccactgtaggatatataggctctatattatcgggtgggaattcagtgcattatccacaaggagcaccattatcacctgttcttgctcattataatccaggtgttggagtaggaaatgagaagtaa

SEQ ID NO: 397760 - DNA, 789 bp, Salmonella enterica
atgctgttcgccatgaaaatattcatgactgagcaacaaaaagctgaacttgagcgccttcatgattccagtcgtgataagcgggtttgtgatcgcattaaagctatccttctggcttccgaaggctggagttctgcgatgatcgctcaggccttacgtctgcatcaaaccacagttgatcaccatatcagcgagttcctgaacaaagggaagctgaagcccgaaaatggtggttcggacagcaaactcagtgctgaacaaaccgcgttgttaatcagccagttatccgggcatttgtttcaccatacccatgagattatcgcgtttgtcgcccggacatggaacatcgttttcagcgttccgggaatgaacaagtggctgcatcgtcacagtttcacctacaaaaaaccgtcaggcgtccctcataaattcagtgaagagaagcaaaggcaattcattgaatattatgaggaactgaaagcaagcgtggatgatgaacctgttctgtttattgatgctgtccatccgactcaggccactaaaatcagctatggctggatacgcaaaggtcagaaaaaagcggtaaaaacgacaggcagtcgtacacgtctgaacatgatgggcgcgctgaacctgaacgcactagcccacccgctaatctgcgaatataaaaccattaatgaatataatgtatccctttttttcaatgagatacgaaaggtgtatcctgattataaccagaaaatccacgtcattctggatggagcaggttaccaccgttcacagtaa

SEQ ID NO: 397761 - DNA, 690 bp, Salmonella enterica
gtggcgatcgtacctggcgttggcctggcgcttggctacctgcgtaacgatctggatttgaataatcatctggatggccataataagatagagggcaattactacagcgtctatgccaactggaaacagttactgtctgatacgaagcattggggctggttcgcggatgcggtatttacttacggtgatatgtcttatagcagcgatgggcgtgacggacatctttccgctggcggagattacgacggacgtagttggttagctcagagccgcgtcggcgcgcagattaacgctacccgccagacctggctgcggccttatttaaccatgggttatatcaacacccataccgatagttataacgatgactacagcgatgttagcagcggtaaacaagacggcggctttgccggggctggtatgcaggcaggcgtaagctacccgttacataacgtagaagtgaaaccgtacgtggagctggcttacgttgggcaatttggcgcagagacggatctccataccgacgattatcgttttgccggtcaaaatcttaacggtggtaacgccggactgggaatagatgtgaagttttcagaaaagtggagcgcaaatacccgtatcaatacgcagtttggtcacgatgttaacaacgaagtaaatgcttatatcagcgcaaaatatcagttttga

SEQ ID NO: 397762 - DNA, 300 bp, Salmonella enterica
atgtttcccgaattcggcggcgactcttccatccagaccgataattttatgactaaacgcgccagcggcctggcgacttaccgcaataccgatttcttcggcatcgttgatggactggatcttaccttacagtatcagggtaaaaatgaagatcgcgatgtgaaaaagcaaaatggcgacggcttcgggacatcattgagctatgatttcggcggcagcgattttgccgtcagcggcgcttatactcactccgaacgcaccaatgagcaaaatcggcagcgccgcggtacgcggcgataa

SEQ ID NO: 397763 - DNA, 303 bp, Salmonella enterica
atgaaaaagagcactcaggcaatagtggtgagtatcatcgcatcagcatctgttcacgccgccgaagtttacaataaaaacggtaataagcttgatgtgtatggaaaagttaaagctatgcactatatgagcgataatgacagcaaagatggcgatcaaagctatgtccgttttggctttaaaggcgaaacgcaaattaacgaccaattgaccggctacgggcgctgggaagctgagttcgccggtaataaagccgaaaatgattcgtcccagcaaaaaaccgcctggcctttgctggcctga

SEQ ID NO: 397764 - DNA, 1146 bp, Salmonella enterica
atgcttaatcacaatgaaggttggtggcagggaaaaggcgcagcgttgacggcatcggcaattgtggcgcaaccacgcttgtggcaggaaggattcactctggttacggggcaaaaggacgccgtttctgctttctggcagcggtgcgatacacaacggcgcatcgtgatcaccggcgctggctcgtcgctgcttgccgcccgttcctgcgttaactggctgcgaagcgtatccgaccgccatattgatgttattccggcgacggatctggtgctgatggctgacagcattgccgacgatatcgttctggtttcggtcagcagctctggtaataccccggaaacggtaaacgttgtggaaaagcatttgcaggcctggccgcagacgccgcatatcgcgatcacgaataacgcgcaaagtaagttggcgcagcttgccagccaacatccgtccgggctgtttattgccgttcctgagggaacctctaacgggagctttgccgccacctctgaattcacgatcccgatgtggtatctcatgctgcagctggcaccgaaccgctggcaggagctggaaaacgcgctgctggtgctggtgcgcagcgccaactatttcctgaaaacctacgcggcggacattgagcaatgggcggctcagcctcgcgataatatggtggcgatagggtcgctgtcgttgaaagcggtggcctgtgaaaccagccttaagctgctggagatggggaacggacgcatcatgacggcctggcattcgatgcttgaatttcgccatggtccgaagctgacgattaaccgtgatgcgacggtgatcggctatattgccgcgcgcccggaaatcgaacgctacgatctggatatgatggcggagctgacccgcgagcgcagcgcatcggcgcagattatcggcattggccacgacgagctggccgagggcgcagtgacctgcaatcgctattaccatttcgcgtgccctgaactggctgatatgcatgagtcattcgccacgatgctgtatgttctgtttgcccagttggccgggctgtatcgggcgatcgcgctgggcgtcacgccggataacccttcccgtgacggtaaagtggcaaaagtcgcgaaagtcacggtgtattaa

SEQ ID NO: 397765 - DNA, 732 bp, Salmonella enterica
atgaagccagtctatgttttgattcgcgacacgctaagacgcgatattcaaaatcaaaaatatcctgttggttccctgatcccttcagagcgcgagcttgccgaaacatatcaggtcactcgcgcgacggttcaaaaagccattgcacatcttgagcaggaaggcctggttaaaaagatcgtcggtaaagggaccttcgttaaccgaacctttgcgcagcctgtctatctgctgaatcccgaaggcaaaaacagcgcgctgggggtcactcaggagctcagtgaaaaaacgaccattaccagcaagctgatttaccatgttcagcaacccgccggtgagcatctcgccacccagtttggcgtgtcgcccgacgaacccgtccatgccattcgccgcgtccgcttgtttgatggcgttccggcgctagttgaagacagctatattcccctggcgattgtcgacaccattgatgacgacacgctggaaaaccgctcgctgtatgccttcattgaaaacgcctgccagcaaaagatcggcggaacagattctgaaatttcagccaacctgtttaatcaggagatggcccgccttctgctggtgccggttaactccccgatgctgcatattaaagaacgcacctggcttgctgatggtacggtctttaactattcgtggagctataaccgtggcgatctgttccgcgtacacagccgtaaaattcttactccctga

SEQ ID NO: 397766 - DNA, 1314 bp, Salmonella enterica
atgaccaagaaaattaaagtggtcactatcggcggcggcagctcttataccccggagatcgtggaaggttttattcagcgttatcacgaactgcccattggcgagatctggctggtggacgttgaggccggacgcgagaaactggaaattgttggtcatctggcaaaacgcatggtcgaagcagcgggaattgattgccaggtgcatctcacgctcgatcgccgggaggcgttgaaggacgctgattttgtgacgacgcaattacgcgtcgggcagcttgaggcgcgcattaaggatgagcgtattccgctgtcgcatggtttgattggccaggagacaaacggcgccggtgggctggcgaaagcattacgcaccattcccgtcattttggatatttgccgggatatggaagagctgtgcccggatgcctggctgattaacttcaccaatccaagcggcattgtcacagaggcggtactgaaacacagccggattaaatgcgtcggcctgtgcaacctttcccagtcgatgcagcgcatggtcgcggaaatcctgggtgtagatcgctcccgtttcatgctgcagctggtcgggttgaatcactttttatatggcacccatgtttatatggacggcaaagatgtgatgccggaggtgctgaagaacctgcgctacgacagcgtgcataagccgaagaatattcccgatattccctggctgcaggagcagatccagcatcttggcgtgatcccttgcccctatcaccagtattactacaccaccagcgatgtactggaaaaacaactgcgtgaatacaaagagcacggtacgcgcggcgaagtggtgaagggcgtggagcacgaactcttcgaactgtacaaaaacccgcaactgcatgaaaagccgaaacagctggagcagcgtggcggcgcctactattccgaagctgcctgcgagttaatcagcgcgatttataacgacaaaaacatgttgatgaccgtgaatgtgcgcaataacggcgcgattcgctcgctcccggataacgtcgcgattgaaacaacctgcgtgattgggcgctacggtgcgattccgctaaataacgatccgctgcctgcaacggtctccggcctggtgtcactgatgaagtcttgggaggagatggcggtagaggccgccgtaaccggggattatggcgcggcgctccaggccctgacgctcaacccgctggtgccatcaggcaaagtggcgaaagtcgtgctggatgagcttctccaggcgcaccgtgagtatctgccgcagtttttcagggagtaa

SEQ ID NO: 397767 - DNA, 1329 bp, Salmonella enterica
atgaataacttcactgcattaatagaaagacgattattgccaatggcaatgaaaattgaaggcaatgattacctgtcggcgataaaagatgggtttatcaggattatgccttttttaatcatcgggtcttttttccttttaatcgctaatttgcccatccctggttataacgaatttattatcaggctgtttggcgaaaaatttatcggccagttgaattatattctggatgccacctattccattatggcactgttggttattgtcagtaccagtattagtctggcaaaacgctggcagctgaatgaaatatcctgtgcgttaatttctctggtcagtttcctggttatcacaccttataaacttccccaggaaaatggtggggcaatcagcgatgtgatcccggtttttgccctcggcgcgcaaggtctgtttctttcgttaattgtgacgctggcggcggtgagattataccgccttttcgaccatccccggttgacgattaagatgcctgacagcgtccctccggcggtatcgaatagtttcagttcgctcattccgtcctttcttatcgtcctgctgttctggctgctgcgtctggtttttgaaatgacgtcatttggcaccgtgcaggagatgatttttaacgttctgcaggcgccgatgatgaagttagggaactcgctgccttcgcagatggttgccgagttttttatcagcttcttctggttctttggcctgcatggcgattccatcgtcaccgctataatggggccaatctggcgctctctgacgctggaaaatctgcaggcgatgaaaaatggcctgccgccggtgaatatcattacccagcagttcagggatgtgttcttaatctgtggcggaaccggatttacgctggcgatgctgcttgtcatgctatttaaagccaaaagtaagaggatgcgcgaaattgctaaactggcgactcctgcagccgtctttaatatcaatgagccgattatctttggcgtgccaattgcgcttaatccggtcttgctgatcccctttgttctggttccggttgtcttgtgcgttattacctatagcgccatgtcgtgggggattctgcccttaacgtctggcctggaagtaccgtggacaacgcccatatttattagcggttttttaatctgcgggtggaaagggatgctattccaggcgctgaatctaatcgtggcgatggcaatttattatccctttgtgatgacgctcgataaacaatatttacgcgatgaagtcgaacagcatgaagaatgcgcaacagaatctctcgtagcagaaggttaa

SEQ ID NO: 397768 - DNA, 306 bp, Salmonella enterica
atgaagaacatcgttttatgttgtgctgctggtatgtccaccagcatgttagttcagcgtatgctggatgcagcgaagaagaaagggattgaagtggcgattaaggccgtgccggttgccgagtttaaagacaatattgctacggcagatatcgtcctcctcggtccgcaggtgaaatacgagcaggccaaattacaggcgcaggctgaccctttgggtaaaaaagtcgctgttatcgatatgatggattacggcatgatgaaaggtgaagccgtactggacaaagccctcaaattaatggagtaa

SEQ ID NO: 397769 - DNA, 318 bp, Salmonella enterica
gtggaagatttagaatcgatcatcatggagctgctggtgaatgctggcgcagcgcgtagttctgccctgaccgccctgcaacttgcgcgcaaaggtgattttgaggccgccgggaaggcgatggaagagtcgcgcgagtttgtgaaacatgcgcacaccattcagacacaattaattggccttgatgaaggcaccggtaaactgccggtaaacctgatcaccgttcactcccaggatcacctgatgaacgcgatggttatccaggatctggctggcgacatgattgaactgtatcgccgcattcccctggtagagtaa

SEQ ID NO: 397770 - DNA, 942 bp, Salmonella enterica
atggatgaggccacgcaggtcaggatgatggaatccgcaacaggtactccgcacgatgccgtttttaaacaatttttaatgcacgtcgataccgctcgtgattttctggatattcacctgcctgcggaattacgtgcaatctgcgatcttgatacgctacagctggcgtcaggaagtttcgtcgaagagaacctgaaggcgcagtattccgacgtcctgtattcgttaaatatgcagggagcgcctggctatctgcatatattgattgagcatcagagttcgccggataaaaagatggcgtttcgcatgatgcgttacgcgattgccgctatgcatcgccatcttgaggcgggatacgaacaactaccgttggtggttcccatccttttttatcaggggaaaaccagcccttacccgttttcactatgctggctggatatgtttgcttccccggcgctggcggagcgtctctatacccagccgtttccgctggtggatattacactcattccggatgatgagatcatgcagcaccggcggatagcgctgctggaattgctgcaaaagcatattcgccaacgagacttaatgcggctgctggacagactggtaacgcttttacgcgcagagtacactactgaaagtcagatgatctcgttgctgaactatatgctgcacagcggccatactgaccaaccaaacgtattctacagggaactggcgaacagaacgccgcagggggaatcaatgatgacgttggctgagtggtttgaagagcaggggatgcagaaagggattcaacagggcatccaaaaaggtgaaatagaagctgcgcgccgcgttgccgcccgcatgctaaaaaacggtatgtcgccagagctcgtcgcacagatgacggatctcacgactgatgagattgagcagctcattaactggcgctaa

SEQ ID NO: 397771 - DNA, 249 bp, Salmonella enterica
atgacagtccacagctatctggaatatgtattaactatactcggctggctcatcaacaacggtatctgggacacgattaccgcaactggcctgtttgcccttccccttctgttcaggttattttcgttatggctgaaagctcgcaaacaaagcagcaataagggcgagtttctgccgtccagtccgcagcgacagtgcgggcggcatcctacttacccgcgcaataaactcgccgtcatctcaggttaa

SEQ ID NO: 397772 - DNA, 396 bp, Salmonella enterica
atgaaaaaatacatttttttagttttatttttattgtgtggttgttctccggtggacgttgaaccagctaagcaggaagttaatagctttcatgacttatatcaggcgggaaagtacactgatatatatataattacttcaagcgattttcaggctgctacatctgaaaaaaaatttatcgacatcatgaacgaagcaaaagagaaacaccttggaacttataaaaaatcgacacttaaaactgagagaattactcatagtttattctcaaacaatgaagtttcattaatatatttctcagaatattcaaagagaattgtccaggaaatttttgtttttgaactcgaaggcaaaaaagtaaagctaaaaagttatagatatgattcaatcaattaa

SEQ ID NO: 397773 - DNA, 522 bp, Salmonella enterica
atggagctggcgaacctgtggcttcgtgacgtggacttcacacgcggggtggtgaacgtgcggcagggtaagggccggaaggatcgcgtcgttcctgtgggcggtgaggcgctggcgtgggtggagcggtatctgcgcgacgtgcgtccccggcaggcagcgcgggccgacagcgggcacctgttcgtgacaaacaagggcacggggctgaaacgcgggacgttgacctggctggccgggcaggtcatccgggagaaggcgcggctggacaaaccgggtgcgtgtcacatcttccggcactcgatggcaacgcagatgctggacaacggggcggacacgcggcatatccaggcgatcctcgggcatgaaaagctggagacgacgcaggtgtacacgaaggtggccatcgcgccgttgcagcgggtgcatgagaggacgcacccggcagagaagcggcggaagaagaaggcagcggcggccccggagcagaacggaggcgtagcggaaccggagagcctgtaa

SEQ ID NO: 397774 - DNA, 507 bp, Salmonella enterica
atgactaaacctcagtctccggggcgggaagccctttatcttagccgccagaacgagaacgccacgcagcggcagcaggtgatcgcgtggctcacccatcttgaggcgcggggttacagcccgcgcagcaccgaaggctaccgcgagcgggtgctgccgttcgtgacgtggtgcgaggagcgcgggctgctgtacgcgccgcaggtgagcctggaggtgctggagagttaccagcggcatctgcgcggctaccgtaaagcggacggcaacccgcttgccgtgaacgggcagttaagccgcctgagcgccctcaaaaacctgttccgctggctgctgaaacgccacgttatcctgtataaccccgccgatctgctggaactgccgaagggagaaagccatctcccggcgcaggtgttcagcgagcaggagacgcggcaggtgttgcagagtctggacaccgaaaaggcgctgggtctgcgcaaccgggcgatccttgaggtgttgtga

SEQ ID NO: 397775 - DNA, 1896 bp, Salmonella enterica
atgcaggacgcggcaggtgcggaagctgtcgatccggtggcaccggatgccgcgcctgcggaggttttacccttagctgccggggttgcggcggtgaaggcggcagcatcgcccgcacccggcgtggtggtggaagcgttgccgggcggggatctgcaactggctgttgaggcgcagcagtggcgcatccggggcctgtccagcgtgaaagccggatcggggacgatgaaggttaacgctcaggtgatcgacacgcagagcggcgtgatgttcgccgacagcgtggacatgatgagcgcccgcagcagccgcgggtatgcgcgggcagcagcggcagagctggggctggctgagggcgacctgcgtcgttcgctgggtaaagtgctgctggcgctggagaactggcaggcgaccccggagccggagagcggcgcgccggaaatgtccccggaggatcgggaggcggcgcttgagctgctgcgctcgccggatctggcgggccgtatcgcgtcggacatggcggcgtgcggcgtggtcggtgagtcaaccaacctcaccgccgcttaccttgccgccgtcagccgcaagctggagaagccgctggcggtgctgatccagtcgtcgagcgcagcgggcaagtcgtcgctgatggatgcggtgctgaacctgatcccgccggaagaacggatgcagtacagcgccatgaccgggcagagcctgttctacctcggcgagaccaatctccagcacaagatcctcgccatcgcggaggaggaaggcgtgcggcaggcggcgtatgcgctgaagctgttgcagtcggacggcgagctgaccatcgccagtacgggcaaggacgatgccagcggcaatctggtcacgaagcagtacacggtcaaaggcccggtgatgctgatgctgaccaccacggcaatcaatgtggacgaggaactgctcaaccgctgccttgtgctcacggtaaacgaaagccgtgaacagacggaagcgatccacgcgcttcagcgttacgcgcagacgctggaagggctgctggcctcgaacgagaaaagctacatcacgcagttgcaccagaacgcgcagcggctgctgcgcccactgaacgtggtgaacccgttcgcctcgcagcttaccttcatgagcgacaaaacgcgcacccggcgtgaccatatgaaatacctgacgctgatccagtcggtagccctgctgcaccagtaccagcgggagatcaaacgggtggagcatcgcgggcaggtggtggaatacatcgaggtgacgcgggaggatatcgcgcttgcgaaccgtttcgcccatgaaatactgggccgcacgctggacgagatgccgccgcagacgcgcaaactgctgttgctgatacaaaagatggttaacgaggcggcagcggcgcggaacggcaaaccatgcgaggtgcgcttcacgcggcgcgagatccgcgacttcacgcagtggagcgacaaccagttgaaggtccactgcatgcggctggcggaaatggaatacctgcttgtgcatggcggcagtcgcggccacctgttgcagtacgagctgttatgggacggcagcggcgacggtgcgcacctgtgcggcctgatcgaaccgggcgaaaaagacgggtatgattcacgcaagttggggttggatgaaagcaggttgcccttaagttgccccaaagatggggctaagttgggggatgaaaaacaggctgaaaaccgtgccagtgctggcccggatgcgccgcaagttggggacggtgaaaaagcactgttcccggcaggaaagaaaacgtcacatcgtagtcgtaccaccacaaaagcccgaccttcgatccgggacagcccggcagtgaacggcacactatga

SEQ ID NO: 397776 - DNA, 330 bp, Salmonella enterica
atggctgaacacgattctaacacagcgcaagatctggctcactgcgagttttattcttacgttgacttccgttcgctccatttacatggcgaatggatggcacgggccgggtttattgacgggatgcccgtcaagatccgggttatgagagattgtattattatcacaccgcagcacacccgagaactctttggctgtattgaaggaatgagcgttacccgcattaacaagaagaaggtgatacagtggttaaagacatttccgggggcgctgaatgataccggagatattccggtgattaagcgcgacaggatcgacaacgggatttaa

SEQ ID NO: 397777 - DNA, 219 bp, Salmonella enterica
gtggcgaaacggcatcatgtcccggttatcggcatcgccggcgtactgggagacggcgtggaagtggtccatcgtcacggtattgatgcggtattcagtattttgccgcggctggcgcctttgccggaggttctggcgaacggtgaaaaaaatctttaccacagcgcctgtaatattgctcgcgtcatcaaacttggccaggacatcgggagtcgttaa

SEQ ID NO: 397778 - DNA, 663 bp, Salmonella enterica
atgaatataaagactctaactttaactttcttagcgatggccgcattgagtcatgatgttaaagggaaagaactgacgtcacttcttgctccctatgatgagtggtattttaactttttctatcctaaggcgttgcctgctcaggtaacgtatgttgaattactggatacggacggtattttttacaagtatagagcccttgatgcggcgggatccagtgagacaactatagcaaagtggaataataatcttaatggtggtattccctcctttaataaagctaaaaatccgccacagtttattcatttctgctgggattcagtgattgataaaaaggtgtatgaaacccgaatcacctttagcggtacggtctggaaaatgatgctgacgccttatccctcggtaggtaatccgcgtgaaaatgactatcaccgctttatgctgataggactggcgccggaaggaaaagtgcgggtctggctggaaaatgacaataaacctaatattccgcttaccggtgagagcgtgattttaattgaaacggtatcgggaaaggatttaaaaatgtgcaagaacataaccaaccatcctgatggatatatctattatggagacacaccggactttatcaaaggtaaaaagtacccctacggcgagtggtaa

SEQ ID NO: 397779 - DNA, 834 bp, Salmonella enterica
atggatggctttgatccgcatgacagcaataatctacaggttaaacttgctctgccgccgggtgtggcgaaacacgtttttcacctgacggcaaagcatgaatgccgatataatttttgccttaatagcgtcaaagagcagtggcctgaaatgagcctgcctggcgctcatgccgatatcggcggcgggtacaatccgcttgaggaggagtatctttttctgacccggcctgcaatgcaaacggtctcttcagatattcctgtgcaatcgacagacgtttatcgccgtaccgtccgagaggccgaacgattacatacccatccagtcctggcccctgtacttccttccggcatattgaaaattgaaagcgatattgacgagtgtataccttctgaccaataccacaaccgcaaaaaacgcgttgccgcagcggctacttttcggcgcaccgtcagtaatgactggtcaaaggttactttacgagtgatgtatgaggtggcaaaagaagcagggataatttttgctgagattgacagtaaaaacaaagcgctggcgtttaatcctgaacttaatacgctgagcgagcgcgtaattttctttgctaaaaaatcacttttatcgggtcatcaagaaaatatgttatttgatcgggatgaactaaaaatcattggtaaatatatccattgttctgcgaactggaatgcggttaattataatataaaaagtcctgttatatctgaagtggctatttttgattcgttcagttttgtcaaccgccctgatgataactggattcgtactatttataatatgtccgggaaaaaattaaaatga

SEQ ID NO: 397780 - DNA, 243 bp, Salmonella enterica
atggacatcatatcgcaaaacaaatgtagttcactgggaatgctttccggcgttattccgctgattcttggcattttccatttctcttttggccccttcgcctccccgctgcccaagctggagagcgtgattgcggaacaggtctccgcggtcaaaaaaggaattattgctggattaaaaggggagaaaccctccgttatcgcgcaaaaaaaacaccttttatatcaacaaaatactggataa

SEQ ID NO: 397781 - DNA, 252 bp, Salmonella enterica
atgtcttatgcctgtaaatgcgatttctttgtacccaatgaaaccgaactggaaatattaacggggatgccggttgattcctgcgatcgtattcgtgcggcggcgcgttcgctggtggataaagggctgaacaatattattgtcacgatgggcgaaaagggcgcgctatggatgacgcgtggccggtcgctacgagtatgtgatggggttcggtcatcattatcaggcgcaacctgcggtggtaatgcgtaa

SEQ ID NO: 397782 - DNA, 126 bp, Salmonella enterica
atggacccggccatatttttttacaaaaatatagtgaataaacagggcaacagaaatgcccccccaaccaacactatcctgcgcttttattcaggctctcagaacattattcacggttctaaataa

SEQ ID NO: 397783 - DNA, 309 bp, Salmonella enterica
atgcgtagtatcattccccctttacgggaacgagaaaaactgcatcaggcgcagtttaatgcaatatacgttcaggtgacattgctttttggatttcgtccggaattgacattcaaaaaaaacaggcatagtaattatgataaggataccaaaaaactggcggctgataagagtgaatcttttgctggtgtgattatactacgaggtcaggtctataacgcctcatgtaaaatgaagcagttcaatcagtcagttacattgtctgagagaagttataagcggttgaatcaaattaataagcagaggtga

SEQ ID NO: 397784 - DNA, 2022 bp, Salmonella enterica
atgggctcggatgaaagccagtttccactgatcagcagcaccatgccattgaaagattattggcccctcgcctgtgaaaaatcccagcgggctatctcaacaattccgccattatcgcaacatagccattatcaaagccatcaggcactctttccgttcattgagaccctaactccactccagcaactggcaaacacgctggatatctcagcgcatggaccgcatttggtcatcctggaggacgttaccggagcaggtaaaacggaagcggcattgatcctgacgcaccgtttaatgtcgaccaataaagggcacgggctctacgttggactgccgacaatggcaaccgcaaacgccatgtataaacgcctggcagctgcttatcgcgccctgttcgccgataattccagaccatcacttattctggcacacggtgggcgagaaatgtcggatgccttccggcaatcaatctggcagccagtaggcggaacagccgaagactatgcccgtgatgatggcaacgcagtcagcgagtgccatgcctggtttgccgactcgcgcaaaaaagcgctgctggcggaagtcggcgtgggtacgctggatcaactcttaatggcggtgatgccttttcgccaccaatcgctccgattgctggggatgcgtgacaaaatcctgctgctggatgaagtgcacgcttatgatggctatatggtgaaattgctggaaggtttattgcgcttccatgccgcccagggcggtagcgctattattctgagcgccactcttcccgccgctttacgagaaaaattacttaatgcgtttagcgatggcgcgggatttatgagcgcaggtggtagtgataacgcgggttatccatggttaagccacctcacttcctcaggtctgttggagcaaccactggccacacgccccgaagtccaacggactgtagctgttaattggatacagcagcgccaggaagcactggacattatttatcgcgttgtggcgaccggacagtgcatttgttggatccgcaacacggttgatgatgcgctggatacttaccagcagttgctacacgagggaatcgttccagatcaggatcttttgctcttccacagccgttttgcttttaccgatcgtattgctattgaaaataaaaccttaaactggtttggcaacaatgcccccgtttctgaacgacgtggtaaggtattaatcgccacgcaagtcgttgaacaaagtctcgatctggactttgactggatgatcaccgatctggcgccaattgatttattgatccagcgcgccggtcgcctgcaacgccatatccgcgatgcccatgggcaacggaaatctacgcttccggatgaccgccagccaccagtattgcatattctggcccctcactggcaggagcaggcagaagagggctggttggggcaagagctaaaaggcaccggttatgtttacgccgatcatgcctgcctgtggcgtactcaggcgctgctgcgtcaatatggtgagatccgtatgccggataatgccagagcactcgttgatggcgtatacgagcagaaaattgctgcgccagcaggcttgcagacgatctctgacgttgcctttggtaaagtccttagccagcgttcggtggctgcgcaaaatttattacgttacgatctcggttacgatcgggaagccagcgactttttatgggataaagatagagaattttctacccgtctgggtgaagagagtgtagatgtttatcttgccagaaaagacattgatggacagctacgccctttagttgatgaaatagatttctgctgggaaaaaagtcgcttatccgtccgaaaatcatggtggcaaaaaaattctggtacattccaatgtccagatgaggaaacattagcctgtttcagaaaacgtcaccatcgcccttccggacagattgtgttggtatctgataccggagaagctagctattacagtaagcgttttgggttggttggataa

SEQ ID NO: 397785 - DNA, 309 bp, Salmonella enterica
atggattcttattattttaatctgaaaaatccagcaccaccccctttcaaaaatagccataaccatggcctatacatttatttaattcacattctcgacatcaatcaaattattaaaaatctcttattaaacaaacaattaaaattcaacaccacacaacaaatcaagcttttacttattctaaacgaaaaagaaattcaatcaaacactctctcatcaggaggatactcctgtctttatctcgaaaaaagtcttctcaaaaaaatttctatgcgtaaaatgtttatcagagagatgcttattatttga

SEQ ID NO: 397786 - DNA, 240 bp, Salmonella enterica
atggctcgtcgaggtgatatcaagtcagcgtttcgtgcagcgatacagattagccccgagggctataaatttttatacacgcgtgattttacacgcgaactgcggttggttgggtggtatttctcagagagggaggccaacaactggatcgaacgttatcaaaacgattttcaggacaggaccgtgcagcacacggaaaaccggttctggatgctccgcaatatggggatagtccgctga

SEQ ID NO: 397787 - DNA, 1587 bp, Salmonella enterica
atgaaaattaaaatatcaggggttttaagtgcccccacagcagaagtttgcgcgggttccgagattcaattaaaagccgtcacgacaagcaataatattattattaatgccgagtcatcttatttcgtcgggcaagatggtaaatatgaatttaatgtttatcctggacgctatgaggtttatatccagttttcagcagaagcgccgcaaaaagtgggccgcattggtgtttacgaggacagtgcgccggggacgttagaggaatatttattaatcgataacggggggtattttaaacccgaggcgttgatccagttcgaaaaagattgcgaggccgcggcggcaagcgcggcagcggcgaaatcgtcggaagaggccagcgccggtagcgccagcgcagcggcgggcagcgcagcagcggcgaaatcgtcggaagatgccagcgccggcagtgccagcgcagcggcgggcagcgcagcagcggcgaagtcatcagaagatgccagtgccggcagcgccagttcggcggcagccagtgcggatgaggcatcggccagcgcggctgcggcagaagcggcggcggaacgaactgaagctgccagcaccgatccggaggtggccagggttagcgttgaaaatgtttttactaaacgtcaaaaatttaacgagggcattgatgttaaaaccacaggctcgccgtcatcgtttgatagagcaaccgtcaccaaccatttttccagtcctaaatacagtgaatttgagggagatgttttatattcctaccgtaccggtgtagggactgtcagttactactgtccgttgattatgtacaataatcagcgcataaaattatattcatctggagggagctcgttttccggcattgagttttacctctccggcatgaccgcggttcagggggctatttatcctaacacttataaatccaggctggagctatggcataaaaccctaccagaacttgaaattaatctcccgaacgcagatccggacgggctaaaattcataggtaaagacggcgtagagcaaacgatgtaccacagtggaaatttaccgtcgtcttcagtccccattcctatacccggagaaccgggcagtacaatattgtgctcaatgaatgttagtggcggctcaaaagggtctcgagcttacgatatcgggacgcaaaaatccgggagtttgttgtgcccctgcgggttggtaccggacgcaacaggagagaccaaatttttaacaatgccgacccagtcctcaacatctctcgcaggaacgtgggcagcgtgcagcctggtgttgtacggcaccggtccctctctctgggttcgtattgatacacccgatctgattaattcaggtacaaacctgctcaaggctggcgccgggtgtaggattcgcaattgccgctacgctaacgaaaccggaactgttattgactgtgaggtgaacacaaaacgcggctggctaccgtttacggccactcctgacgattccacggagtggggaccaaaaatttacgccgctgccgtggctggagaatacggcgaggttttagcctgcggtgattga

SEQ ID NO: 397788 - DNA, 2928 bp, Salmonella enterica
atggcttcagttgtcatagccgtagcgtcggcagctctcgggtttggggcaatggccgcaggtataaccacggggatggggatcgcgctggcggttgcgtctgttgccgtaggaatggttggcaacatgatcgcaaaatcaaaaatgccctcgtacagtgactacacgtcacaaagtgaccgaaagcaggttttaaggagttcggttgcgtcagatgtagtcatttacggtcattgtgttgtatccggtctgttagttttcgcagaggaagagggtggcgagcaggatgatggggaatggctggatctggtgttggttatttgcgctcacccggtcgaaaaagtggggcaaatatggctgggtgaagacaaaattgaggatttcggcgtaaatgctgtgtggtctgtgcataacggtgtaacagagtgtgatacttatttgctaaacgcttgtccgagctggaaagaggatatgatcgggcgggatatgtgctggattcgtattagcctgaaatatgacgccgaattatttccgtatggtctacctaatatcaagatggaggtatggggtaaaaaactatacgatccgcgcttaggggttacgcaatattcagaaaatgcagccttagttattcttgattattacagaagttatcttgatgtaactgattcagaaatttattgggataacattaaatctcaggctaatatatgcggggaggcagtaacaacgccagaaggtgaaatagaacaacgttacaggctgagcggcgcttttgatttaagtgaaacaccctcggcggtgcttgattcaatgcttttatgttgcgcggctacccctgtatttattggcggtcgatttggtttacaggttggcgcttattatggccccccagaattgacaataaccgaatctcagataattgatacggtgcaaatcacatccgaaacggaactgagggaggcgacaaacgccgtctacggcacgtttatagaccccgaacaggaatacacgcaaaccgattttactcctatcattatgcaggaatggattaatgaggacggatacgaaattaaagaagatctggatctcaggtttgtaaatagcccgtatcaggccgcaagagttgcaaatatatatttacgtcaaaagcgctgtggccgttccgtttccgttcctatgaatatgagcgggttaggctatattcgcggggctaacgtttacctgagtataccaacgctaggcatagaaaattcggaatttagagtaaaggaaaatacattttctattgatggcgtgacgcttcaacttgtagaagacgatccagatatttggctggaggcaatcggccagccgttcgagcgacccgattttacgaaattgccggttaatggcgtcgcgatgccggataacctgaaatactccgcagaaatgataggcgaggtagtccaggggattttatcgtggactaattccggcgtcattgcctgcaataacgttgtaataaaaaaatctggttcggtagtttataccgtgcaagtgccggggcagtcgtgccgattaagcgggctggtggtgggaaactacacggccgaggtcagggcggtggcgctaaatggtgcggtgtcaccagtcgctaccatcgggtttaatattgacgtccccccaatcccttacgctgttgatattgaaacggggaattggtccatctcgttaaaaccgcgttttttgagcagtagcgcagacggtatcttatgcgaatattttttctcaacattaaatattcctattaatgaggttttagataaatgtaaaagcttagggtttggcgcgtcatttgtgcatagcgggctacagcctgacacgctgtattactactggatacgctcagtaaacgcctacggcaaatcagcgctctacgctgtacaggcaaagaccagttacgatccggcctcaatccttgccgttctggataacgagatcggcgcagaacacttacgcgaggaactgcgcacacaaattgcagaaaacacggtagctgttgaaacggttacgcgcgctcaggctgacaccgccgaggatttatacgccctgtgggctacaaaggcgcaggtgggcgagcacgtcgcggggttcgggcttgaggttcaaatgaatgatgacggttctataatgtcgtcatttatcgttgatgcggacgtgttcgcgattctttcccgcgccgagggagacgccggaaaaattcacccgtttgtcgttaaaaatggtgtcgtctatataaacaaggcaatgatggatagtgccgagatcgcagaggttattgctaaatatattcggacagattatttagagggcactgaaatagttagcccgtggattcacagtaaagccgcgccttatacttttgagctacgcgatgatggcacgttgatagctaaaaaggccaatattacaggaactataaacgcaactagcggaacatttacaggagaggtgcaggcatcaacggggcgttttaataactgtattattagcgagtcatgcacaatattagggaaggtcaacgcacaaaatattgacggtgatattactcaaacatatacattatcaacggagggaaacggaatatcaataccatccgctgattttgatcgggttctggctatcccgacaatagcggttacaggaggttctagaagtggtacggattctcagggtgatgtctccgtatcgcggaattgcaatatttatattaatgattatgaatatcctgtagtgtcaatttccgcaagcggatatggggcgtgtaatgtaacttcttatacacgtaatatacccaaaggtagcacactgacaattcgaatgacatctagttatggtggtcaatcagctgctaaatcagtaacaatgtttgtatttaaacaataa

SEQ ID NO: 397789 - DNA, 399 bp, Salmonella enterica
atgcgtaaaccagactggcaaatacaattaggtgcaacaatcgcggccgctattaagcggccttttttatggggtgagcatgactgctgtttatttgcggcagattgcgccgtagttgtttgtggcattgatccggctgagaaataccggggcacgtattcagacgcaacaggggcgcgtaaggcgctgttaagaaatcaccgcacgatcgctggtgtgattggtgcttattttaaagaagtgcccgtagcgctagcgcaacgcggcgatctcgttgtgctcgataccgaacagggacaggttgccggcgtggtgtggggggcgggtgtgtgggttactacgcctgacggtgtgcgctgtttacgtcaaaagccggcgcgagcctggagggttgaataa

SEQ ID NO: 397790 - DNA, 582 bp, Salmonella enterica
atgctgagcgcccctttttctgatgccatgttagaggccctggcgggcaatccatgcctggttatggccgttaaaattttgcttccctcggggccgtgtcgcgcccattccggtacaggtgacataacgattaacggcgagacttattacggtgtgggggcgctgggttcaattcagccgatccgctctggtagtgacacctcgcctactcaggtgcaactacaaatcacggggtttgattccacgctggtggctacgtttttaaacgagaaatgccggggatctgatacgtcaatatttttggtagcgatcggtgataacggataccccctcgccgctgatttattgtacgccggctttattgcgaaatcaggactcgcgagcgggaaagataatgcgatcacggtggttgcctcaaataaatttgagcgctggagcattgcgaaaccggaccgtttcactgatgagagctggcgcaagcggcaccaggatgaccgcttttttcgttacgttgcacaaatggctgaaagaccgatttattggggcagcaaaaaggacgcccctgcatttaactatgagtaa

SEQ ID NO: 397791 - DNA, 600 bp, Salmonella enterica
atggctgaaatactgcaattccccgagggggtttacccgcgtagcaatcagttttggatcattagtaactcaaaggactttgtaagcccatttaacggcagttcgcaaacagtctctttccctggcgctcgctgggggtgctcgatggagtttgcaaatctcaccatataccaggcgcgacaactggagattttaatcgctcagatgaaagctggcgctaagtgggtgcgtctgcgtgattttgccgtgtatccgcgcccggcgctgggggttcctaacgttaaagatgctggtcagctcggtgagtttgttacgacccgcggctggtcgcctaatcgaattgttttgcgcctgggggattacgtcgcgatagggcaggaattaaagcgggtgtgcgccgacgttatcagcaccgcagccggtgaggctacattgcaaatcgtgccgccgctgagggctagcccgttgcctggcgatctggtcgaggttaaatccccgtgcggcgtttttaagttgccgtcagataacgtacctaaaccccgcagacagccgggaatattcactgatgtatcgatcgattttgaagaggtcttatgctga

SEQ ID NO: 397792 - DNA, 3249 bp, Salmonella enterica
atggcaacattacgcgagctagtaattaaaatttctgcaaattcgcaatcatttcaaaccgaaattgcccgcgcctcccggatgggggaaaactactataaaacgatgcagcagggaggtcggcaagcggcggccgctacgcgagaaacacaaaaggccctggcggggatagcctcccagctcaatgaaacaaaaagcgcggccacgtcgctggctggctcgtttgctgggatgtttgccacctctcagctcatccagtacgccgacacgtttaatttaatgtcagcacgtctaaagctggcctcaacgtcagccgctgattttgctcaggcacaaagcgccctctctgatatcagcaaaaggaccagcacatcacttgaggcaaacacgcagctttattcccgaatagcgctctcgatgcgtgacgccggctacgcgtctgcagacgtggcgaaagtcacggagacgatcgcctcatccctgaaattatccggggcaagcgccgcggaagccacgtccgttattacacagatgagccaggcgttatcttctggcgttcttagcggtgaagaattccgcgccgtaatggaaaacggcgggcgtctggcgcggctcctggccgatgggcttggggtatcgatcgggcagctccgcgcaatggcaaaggcgcaggaattaacaaccgataagctgatcccgttactcactaacgtagaagcgctccgcgccgaaatggcccaattgccggcgacggtttccatgtcagcgcaaaagctggaaaacgcgtttcttacgtgggtggggggcgctgatgaggcaagcgggagtacggcagcgctggcgggcgtaatcgactccctggcagacaatattgataatgtcgccaccgcagccggcgtgctggtagcaatcggcgcagcgcgttatatggggaatctggcgagcggtgcgctttccgcatcagcagggcttgttaaagcgacgcaaagcgaaattgcgttagctcaggcgcagctacgcggcacgcaaatttcaacggccgccgcccgtgcgctggtctatcaggcacaaaagcaagatgccgccgcccgtggcactgaaaacatgatcacggcctcgcagcgcttatccgcagcgcaggcgacgttaacccgcaatatagccgcccgaacggccgcacaaaccgcgctcaacaatgtaacctctctcggctcccgtgctatgggcggggcgctgggattgctcggtggtgtgcctggcgtgctgatgctggccgcaagcgcctggtatacggtttatgaaaatcaggaacaagcgcggaaatcggcgcaagcgtatataagccagcttgatcaagtccgcgaatctatcagtagtatgagtttgccggaggcgtccgacactggcgaaaaggtcaaagcctcgctggccgaacaaaaccgcctgatcgatgagcaaaaaacaaaaataatcgaaattcaggaggcgatcgccggtcatcaatctgtcctggcaaaccctggctataccacgtctaacggcttcatgattaaccacctgacgaacgttaaagacgttacggagagtttaacgacagcgacagaacaacttgcggtagagcaagagcggttgtcgcaaatgcagagcaaagccggcgaaattcaggatacgctctcaggggtggaaaaccgccgtattgatctgttacggcaacagggagcggaacaaaacaccgtttatcagtcactgttaatgatgaacggggaaaacaccgaatttaaccggctattaggggtggggaataaacttcttgagcaacggcaaacaacggtcagtaacctggcgagattgcctgccgccacgctgtcaggcaaacaaaatgacttgatcaagaaggcccagcaagaagcggatttatcaaaatataaaggtgcggatcgcgtcaggaaacaagccgaatacgacgcagacgcggcggggcttacctcttcccctgaatatattgactcacgcaataagtatataaatagtaagttggaggcatataataactcagaggcaaacaagccagcgaaaaaggagaaaaaaagcaccgctgataaattagacgacagctacgataaaataattcagaaacaaaaagaacaactggctttagcctcggataataccgaattagctaaaatgcagtttcaaataagtagcggtgagctaggtaatttatcagattctaaaaaggaaatccttttacaaaatgccgcgcttattgatcaggagaagataaaaaaacagctcgcctcttacgagaatggcttgattgatagcaacgcccacgctaaagcgagcaacgatgcagacttgatgggggctggtgctggcgataaggctcgcgagcggatgcaggaaatgttaagcattcgtgaggaattcgagcaaaaaaacctcgatattcaaaggcagtatcagagcggggaaatatcagagagtttatataattcagagttagcgctaaataaaaaatatctaagccagcggttcgaagaacagaaggaatattataaagcaagcgatgagttacaaaaagattttctttcaggtgctagtgatggtcttataaattgggctgatagtgccgctgattattccgcgcaagcgtcagactttgttacctcggcaatgtcgggaatggttgacgctattgatgattctctaaccggaaatatatcaagctgggaagattgggcgctttcaatatcttctatgatcagaaagattctaattcaggcaatgttagttgaaggcattaaaaaaatgtctggtgctggcggtttgctggggagtattggctcttttcttggtggtgcggtcgctaatgccaaaggcggcgtttattcctcccaaagtttaagcgcgtacagcaatcaaattgttgacaggcctacttactttgcctttgcaaaaggcgcggggctcatgggtgaagcgggaccggaggcgattatgccgctcacccgcgccgccgatggttcgctaggggtgcgcatggtcggtgatagcggctctatggccgctggtggcggtggcgtacagcaaaacataacgcaggtattccagattaatgggaacggcgacacggctttacaggaggctgtagcaatgggggctaaacagggggcagaaagcgccctttcatccgtccaggtggatttcatgacaaacggtaaattacgcagatcgctgggggtctaa

SEQ ID NO: 397793 - DNA, 204 bp, Salmonella enterica
atgtgggccgaatatgaccgcctttcacctattggtgatattcgcggagacctacacgccgcgcagattgtatccgctgtctacggatcacacggggcgaaaatttctattcctgatgcgttgctaaagttcggcgaagatccccacgccaatggcgatccgtttgtcgcgctcgaggcggcgttaaccgcggcagcaggataa

SEQ ID NO: 397794 - DNA, 387 bp, Salmonella enterica
atgtctaatttacgcgatgtggcaacggccccgcttgctggtttccgtcataaagaaattcctgtacctgaatggggaggtgtaaaggttgtaatgcgcgagcccagcgccgccgcctggctccgctggcgtgaagtgttgaaagttaagggctcagacgaagagggcgaagaacccgaggtgctaagcgcagaggaacaagcatcccgcaatcttaatgcggatgtaacgctttttattgattccttttgcgatacaaacaatcagccggtatttactccgaatgatcatgatgaagtagcgaatatttacggcccggtgcattcccgcttacttaaacaggctttagacctgatctctacgccagaagagacgcaaaaaaagtaa

SEQ ID NO: 397795 - DNA, 714 bp, Salmonella enterica
atgaccgctcaatatgaaaaaacactagccacgcaggtgtcggtaacgtccaccccagcaacagcggatacgctcgacacggccgaatttcttgatctggccgcctcaattaaacaggcaacgtttactgcaggtcaaaaacaagatgttgatgtgaccgtcttggggtccaccgaacaggagacgatcaacggcctggcggcagcgtctgagatctcattgtctggtaactttttccgtaacgccgcgcaggatacgctacgtattgcgtatgacactgacgcgatctacggctttaaaattgtgtttgcctctggcgccggctttagctttcttgcggaggttcgccagcatacgtgggacgctcaggccaacggcgtggtagccgctacattctcattacgtcttaaaggtaaaccgacgaacatcaacaatacaaaagccctggggttggttactgacctcccgccaacgatgggaatcccgcttaactccgaattgaaattagaagttaaagccgagggcggcaccgcgccttattcatatcaatggttcaaaggcgaaacggagttagctggtcaaactacggcgatctttgcgaaagcctcatctgcggcgggggatgctggcgcttataagtgccttgcaacagattcagcagccacgccggccagcgtcacttctgcaacttgcgctgtaaccgtcgaagcataa

SEQ ID NO: 397796 - DNA, 330 bp, Salmonella enterica
atgaccgagagtgatatttttccgttattggctgatttagctggcggcagggtttacccgtatgttgccccgctcgatacgccgccgccgtgggtggtttttgcgctcccatctgaggcattggctgacacgttcgcaggaccggcagaatcgacgatcgccattcaagtggatgtatacgccacctcgccggatgaggcgcgggcaatcagagatcaggcccttgccgccctcattccgctggggatcggggatattcaaaaaatccccggctatgaatctgatacgaagttataccgcgccacgctggacgcgcaaatcatcttttaa

SEQ ID NO: 397797 - DNA, 450 bp, Salmonella enterica
atgattgattttagtctcgacttttccgggcttaacgatatttctaaggatctggagctactcagcaaagcggaaacaaacaaagttttacgcgattctacccgcgccggcgctgaggttgtgcgccgtgaggttgtgtcaacagttccagtgcgtaccggaaaaactaaacgaaatgtcgttgttattactcagaaagcccgccgccgtggggagatctcatccggcgtgcatattcgcggcgtaaacccggagacgggaaatagtgataacacgatgaaaaaagacgatcccaataacgccttttactggcgatttgttgagcttggaacctccaaaatggccgctaaaccatttgtgcgcccgtcatttgacgcgaaggtagacgaggctgccaaagtggcgatggaccgcatgaatctggcgatcgatacggtgttagctaaatga

SEQ ID NO: 397798 - DNA, 345 bp, Salmonella enterica
atggcgatttattccggccgcctgaatgatgccgtcactattctgaatgccaccactacccgcagcccatcgggccaccccgttgaaacgtgggagagcggtaaaacagttcacgccgaagttttgggggttagtggacgtgagcaaatggccagcggcgcagaaacggctacagcgaccgttagagtgtggatgcggtggcggggtgatgttaccgccgcttctcgcctgatgtgccttagcggcccgtttaaaggggttacgttgagtgttatcggcccacctacgcccgattcaaaagggcaaaggatggaggttttatgtaagcaaggaacggagaaatga

SEQ ID NO: 397799 - DNA, 339 bp, Salmonella enterica
gtgagtgtggttattcagttagttacgctggcgaaagttaaagagcatttacgcatagatcaggacctggacgacgctgatctgaccgacaagattgaacaggcaagcagcatgattctaaacgcgataggggctaaccgttcccaagtggtgaatgatgctggcgaactggtagacggtgagccgctattacgcgtacaggcggtaacgctcaggcttgtggggattttgtcgcgcaatcgcgagggcgaggacgaaaaagagctaaagcggggtgaattaccctggtctgttacgtcatttctcggcgatctgtacgacgcatacacaattgtttaa

SEQ ID NO: 397800 - DNA, 1521 bp, Salmonella enterica
atggatgaacgcgagttatcaataatccaggcgatcggtgaagaagttcgcgaaatactggcaggggttaaatcacaattagaaaacagtgttacgcaactggtgacagaagcggtgcaaaaggcggtggcggggcttcccgcgccggtagtgccggagctcccggatgtgccgaaactggtgacagaagcggtgcaaaaggcggtggcggggcttcccgcgccggtagcgccggaactcccggatgtgtcgaaactggtgacagaagcggtgcaaaaggcggtggcggggcttcccgcgccggtagcgccggaactcccggatgtgtcgaaactggtgacagaagcggtgcaaaaggcggtggcggggcttcccgcgccggtagcgccggaactcccggatgtgtcgaaactggtgacagaagcggtgcaaaaggcggtggcggggcttcccgcgccggtagcgccggaactcccggatgtgtcgaaactggtgacagaagcggtgcaaaaggcggtggcggggcttcccgcgccggtagcgccggaactcccggatgtgtcgaaactggtgacagaagtggtgcaaaaggcggtggcggggcttcccgcgccggtagtgccggagctcccggatgtgccgaaactggtgacagaagcggtgcaaaaggcggtggcggggcttcccgcgccggtagcgccggaactcccggatgtgtcgaaactggtgacagaagcggtgcaaaaggcggtggcggggcttcccgcgccggtagtgccggagctcccggatgtgccgaaactggtgacagaagcggtgcaaaaggcggtggcggggcttcccgcgccggtagcgccggaactcccggatgtgtcgaaactggtgacagaagcggtgcaaaaggcggtggcggggcttcccgcgccggtagcgccggaactcccggatgtgtcgaaactggtgacagaagtggtgcaaaaggcggtggcggggcttcccgcgccggtagtgccggagctcccggatgtgtcgaaactggtgacagaagcggtgcaaaaggcggtggcggctctccccgctcccgcgccggcgcttgatggtcgtgatgcgttgcaactggagatcttgccctgtattgatgagaaaaaatcatatacgcggggcacgtatgccacccacgacggtggcttgtggcgcacatacgaaaaaagtcatggcttacacggctgggaatgtatcgttgatggggtggcctcgacagaagttaagcagaccgatccgcgatcattttctgtggctgtaacccgcgccagcggcgcaacagaagagaaaacattctcaatcccaacaatgatttataaaggcgtgtttaatgccggcgaaagttatttaccgggggatacggtgacttggggtggttctctctggcattgcgatgaatcaacggcagacaagcccggagaggttggagctaagggctggacactggcagcgaagcgcggccgtgatgcgcgggggtga

SEQ ID NO: 397801 - DNA, 1434 bp, Salmonella enterica
atgcagttaaatccgtggaagcgccgcgccgcggccgcaaaagaaaagagcagcaataactttagtccggttagtaaaatttcttattctgtagcgacagcacttcctaaaaataatggggctaaagcggcagtagcgccgctcagtccgggggatggtggctggtttccgattattcgcgaatcatacacaggagcttggcagcagggcgtaacggtcagtaaagagactgtacttgccttttatgcgatcttttcttgtatatcactgatttccagtgatatagcaaaaatgccgatcaggctaatggctcagggttcggacggcataggcatagagcagaaatccggcgatgtagttttgttattgcgccgccctaattcgtttcaaaaccgtatccaattttttgaaaactggatggtttctaagctaatccgcggtaatacatatgttttaaaggtcaggaatagtaaggggaaagtgacgcagctccgtattcttgatccagaccgttgccgcccgttggtgtctcctgatggtgcggttttctatgaagtttccgtagataacattgcgggtattcagaagccggtaacggtgccggcgcgtgaaattatccacgatcgctttaattgcttttttcatcccctcgtgggattgccgccgctatatgcgtgcagcatggcggggatgcaggggcagcacattcagcaaaatagcgctaatttcttcaaaaatggcggcaagcccagcggcgtgatcaaggttccaacgcccataactaaagaaaaagcgcaggaagttaaagcgaattgggacacaagctacggcggtgaaaatgcggggaaaacagcgttactcgggggcggcgctgattacgtccctatatcaatgacggccgttgacgctcagaccgtggagcagctcaaaatgaccggcgagatcgcttgcgcggtataccatgttcccccgtataaagcaggcgtaggtgaggccccggctacagataatattgaggcgttagaacagcaatactattcacaatgcctgcagatccatattgaatcaatcgagcttctactcgatgagggtttagacgttgggaatgattcaaacgttgaattttccgtagattcattgctgagaatggacaccgagcgccggtacgcagcctacgctaaaggcgttaattgcgctgttttggctccaaacgaagcccgccgccgtgagaatcttccgcccgtgcctggtggtgcatatccgtatttgcaacagcagaactttagccttgaggcgctctctcgccgtgatgctcaggccgatccatttagtaaaacagcaacagaacccgcaccgtccgcaaaagccgcgctttcagtggttgaaaaggcgtttgttaaaacgtcattgagaggaattattcaaaatggatga

SEQ ID NO: 397802 - DNA, 192 bp, Salmonella enterica
atggcaaaaattcgatatttgcagcaggtcggcagtattcaaccgggcgaagaaaaagacgcggccgacaattgcgcccgcgtgctggtgctgatcggaaaagctgaatatgtgaccgccgaaggggccgagaatgcagttaaatccgtggaagcgccgcgccgcggccgcaaaagaaaagagcagcaataa

SEQ ID NO: 397803 - DNA, 1950 bp, Salmonella enterica
atgacgcaacagcgcgcatatagcctaattaaagttaaatcggttaatgaggaacggcgagaaattaccggcatagcgagtacgcctacgccggatcgcagcctcgatattgttgagccgggaggggttcaattcacactccccatgccatttttgtggcaacaccggcatagcaaaccgatcgggcaagtgacagaagcgactgtaacggctgatgggatattcattaaagccagcctggtgatccctaccccagatatgccgcaagaaatggtaaaccgcttaaatgaggcttggtcatcgataaaaacgggccttgttggtgggctttcaattggatttaacccaatcgaatgggcttatttagaaaatggcggtgtacatcttctcaaatgggaaatgtacgaagtttcagccgtcaccgtgcccgctaacggagaatgcacaattcaaaccgttaaatctctcgatcaaaaaattctggccgcgtcgggccaacgaaaacccgttgttaaaagctctctccccgctggcgttgcagcaccgaaaccaacagttattaaaggaaattcaatggatattgcagaacaaatcaaaagttttgaggctaaacgcgccgcgacgcaggcccagcttgaaggcattatgaccaaagccgctgacggtggccgcacgctggatgcagaggaagaggagctatacgaaacgctttcagcggagatcagcactgtagatactcaccttaaacgcctccgtgaaatggaagctcgacaggctaaatccgctaagccagttattccggccgctggtggctctgtgactgtaactgataatacccgcgcccctggcattattcacgttgaacagaaattagagaaaggggtaggttttgcccgattcgctaaatgtatggctcttgcgcgaggtgtgcgatctgaggcgttggatgtcgctaaacatttttatgttgacgatgccaggctgcaacatgtgattaaagccgcagtacagggcgcatcaacaatgaattcggcctgggcgggctctctttccgaatatcaggagtatgagaaagattttattgattatctgcgcccgctaacgattatcgggcagtttggccaaaacggtattcccgcgctccgcgccgtgcctttcaatatcaaagttgctatgcaaaccgccgcaggttcagctaactgggtcggagaggggaaggggactccactcactcaatccgggtacggtcatgcaacgttaccgcgtgcgaaagtgtcggccatttgtgttttaaccgacgaggtattgaaatcatcgagcccagccgccgatcttctggtgcgaaacgacctgggcgcggctgtcattgagcgtctggataccgactttatcgatcccaataaagcagaagtagacgcgacatcaccgggcggtatcacgcacggcattgctgcaatcacctcaaccggcgatccagataaagacggccaggctgctttgcaaaaaatgattgattctaaattgcagccttccggcgcggtttggatcatgtcttcatctaatgcgctggcgctttcgacccgtaaaaacgcgttaggacagaaagaacacccggatatgaccatgtttggcggtaaattcctcggtattcctgcaattgtctcgacggttgccggatctcttctggtgctcgttgacgctccaaacatttatcttgctgatgatggtgaagtggcgatcgatgcctctcgtgaagcgtccctggagatggtagacgccccgacacaatccagcgctatcggcactggcgctcagatggtctctatgttccagaccgatagcgtggcgttacgtgctatgcgctggacgtactggaaacgccgccgcgtagaggctgtagtggtgattactggcgctaactacagcagtactgcgacccctacaacctga

SEQ ID NO: 397804 - DNA, 1659 bp, Salmonella enterica
atgcctgaatggtctacggcgtgtcttgattgggccgcccgtatcgttgaccgccgctcaataatcccctcaccaatctttccagaaacagccgaacacgcgttaagcatttttaaagaattacgggtgactgatttacctggtcagcctacgtttggcgaatgctcagacgagtgggtatttgattttgttagggcaatttttggcggatatgacgcggaaacgggtaaacagcttatccgtgaatacggtctcctaatcagtaagaaaaacacaaaatcaacaattgccgcgggaattatgcttaccgcgctgatcatttgttggcgcaacgatgaagaacacctgattttagcgccgacaaaagaagttgcagacaacagctttaaacccgcggcgggcatgatacgcgctgacgaaacgttatccgacatgttccatattcaggatcatatccgtacgataactcaccgtgtaacgcgcagcacgctaaaagtggttgccgctgataccgatacggtatccggtaaaaaggctggccgtattcttgttgacgaactctggctgttcgggaaacagcagaaagcaaaagccatgtttatggaggcgctcggtgggcaggtatcgcgcccagaggggtgggttatcttcctaaccactcagagcgatgagcccccggcaggtgtatttaaagaacgcctcaaatactggcgcaaagtgcgtgacggaaagattcacgaccctaaaacgctggggattctctacgaattccccgagcacatgatcaaggatgaggcttatttactccctgaaaacttctacgtaactaaccccaatatggggcggtcggttgatgaagagtggctaatagacagcctcatcaaagtacaggaagaaacggacggctccctgcagcagtttttagccaagcacctaaacgttgaaataggtctgaacctgcgcgcggatcggtgggctggcgtggatttttgggagcaacaagcccgtgcggtgacgtttgcggaaattctcaggcgtagcgaggttataacggtcggcatcgatggtggcgggcttgatgatctcctgggtttttgtgtcatgggccgtgatgctgacacgcgagattggttaacctggaatcatgcctggtgtcacaaaatagccctcgccaggcgcaaaagtgaagaatcaaagctccgcgacttcgagaaagacggtgatctaaccatcgttaggcgggttggagacgataccgacgaactggcgcaatacgtaagccagatttatgaggcgggcttgttggataaggtcggtattgacccatcaggcacaggcacgattttagacgcactgatcgcggcagacattcccgctgatctggttgtggggattagccagggctggagactaaacggcgcaattaagacaacagaaaggaaactggcagaagaagtgctcattcacggcggtcagccgttgatgtcctggtgtgttggcaacgcccgcagcgagcaaaaagggaacgcggatttaatcacaaagcaagccagcggcaagggaaaaatagaccccttaatggcaacgtttaacgccgtttcgcttatggccctaaacccggaggcaaaagtacaaggtgtagatgtttttttcatataa

SEQ ID NO: 397805 - DNA, 501 bp, Salmonella enterica
atgttaacagcgcagaagcgaaaatttgctcttgcgttgatggccggggcatcaaaaaaggatgcggcaataaaggcgggttactcggagaaatccgcgcggtctaagggttcgcagcttgccaaagacccggaagtcatcgcatttattgagcgcaaaaagaaggaaaaagtagacgttgatgacctgccaacggggggaaaaaatgtttataccccagcagtaaacattccaaacgaggatcgagaagatccagatgttgaaggtttggtgaagggtgcatttgaggacccgttagattttctccgcacggtaatgaattgcccggttattgaattgaacgaccggaaagacgccgcgaaagcgatgctcccctatatgcacgcgaaaaaaggtgagggcgggaaaaaggacgccaagaaggacgccgcagtaaaggcgctggcctctaaatttggcgcgatgccgccgccgcgcctggttgctaataacgagaaataa

SEQ ID NO: 397806 - DNA, 354 bp, Salmonella enterica
atgaagctaaagacgctgcgcccacgcctggcgaccgttaacacgaaccgtattaaacccatgaatagcgagcgccgccgcgttagtggtggtgcaagggttagcgctaagcggcgaatatttcggcgcgatggtgggttgtgctgcatgtgcggcgcggtggttggcctacatgatagccagctagatcaccgtcaggcgctccagttcggtggctctaacgatgacgctaacctgtggaccctgtgtaccccatgccatgacggcaagagcaaacgcgaagcggccaccggtcagcctgatgaggtggcaatgagccgccccgccccgccccgcaatcatctgatgatctaa

SEQ ID NO: 397807 - DNA, 771 bp, Salmonella enterica
gtggttcaaaaacagattataggtaatgcggttttgtattgtggtgacgcgctggaaatactggcaacgctcgaaaaaaattcgattgattgcctgtgtaccgacccgccatacagcagcggtggaatgactataggtgcgcggcaggcgggaacaaacaaaaaatacgtgaataataacgctattcataacgtcgatttttacggggataatcgcgacgggcgatcatgggcgttctggtcaatgtgctggctcactcgctgtttccctctattgcgcgagggcgcttacgctcaggtgtttacggattggcgccagctcccactactcactgatgtgtttcagggcggtggcatgacgtggcgagggatcgtgccgtgggataaaaccaacagcagccgtgcgccgcataccggatattttcgccaccagtgtgaatacgttgtatggggtagcaaaggcaaactaagcaagtgcgaccatggcggaccattccccggcttcgttactcaacgtgtaatcccgtcagaaaagcagcacatgaccggcaagccgatcagcctgatgaccgatttaattaaacccgttcccgttggtggcgtaatcctcgatccgtttatgggtagcggctccactggtgtgtccgcgctgcaatctggccggaaatttatcgggatcgaaatgagtgagcattattttgatatagcgtgcgaaaggatagagaaagcaaatgaagctaaagacgctgcgcccacgcctggcgaccgttaa

SEQ ID NO: 397808 - DNA, 192 bp, Salmonella enterica
atgaaaaaattattactcaccgccgcgctactggcgctggctggctgtacccacacaacctacaccgaagcaacacgcgccgacggttcgaccgtaaaacacgttgctattgctccgggtacgaaaataaccacggctaacggtggttgtattgattcaaccggggcggtgacaacctgcccgacacagtga

SEQ ID NO: 397809 - DNA, 225 bp, Salmonella enterica
atgagtagtgtgacgtatatgacagatgcgagtagtgcggattatgtaccggtgcttgaccattcaaaactagaaatgaaactggctcgatatgcggcgataactggaaagtggcctgcaacgcaattagatgaattgaataaaattattgacttagcagttctaacaggaacattggatagaaagaaagttgatcaaataatcggcacgcttaatttttattaa

SEQ ID NO: 397810 - DNA, 150 bp, Salmonella enterica
atgtcgctgtttctgacaagctttattttcgaaaaaaagagtacgacgaagagttttatcaactggatggctggattgagcgttatacgcagtctattgatggctatattgggatggaaagctataccgatgccgctagcggaagaatga

SEQ ID NO: 397811 - DNA, 1746 bp, Salmonella enterica
atgctatcggaacgccagttaaaacttgtggatattcttgaacagcaaccgtgttcgctgggcgagctggcgcgacaaactggcgtttcgagcagaaccatcctgcgcgatatcgattacctcaattttacccttagcggtaaggcccgcatccagcccggtggcagtgcgggctatcaattggaaattgtcgacagacgtggttattttcagcttctgcaacgccatgataatgatgaccggttgctggcctttcttctgctcaatacctttacgccccgcgtacagcttgcttcggcgctcaatttacctgaaacctgggtggccgatcgtcttccgcgtttgaaacagcgctatgagcgcgccttttgcctttccagccgcccgggcgtcggtcatttcattgatgaaccggaagaaaaacgcattatcctgttagcgaatctgctaaaaaaagatccactgttaattcccctgccgggtattacccgagccaacatcgacaggctcaatgctgcatgtgaaaaacttaatgaattcccgctcatctcgggagagtacctggcaagtctggtgctggcagtttacgccctgcgtaatcagctctgcggatcatggccggagtgtcgatatatatcactaaaaaatgcggtagaacaagggggggtttacctgggcgaaaatgccttcagaacgctgatcggcctgctggaaatcagacaacggcaggcaatgaccatctcggccgcagcggtgaccagtttgttgaaaagtgttcccggcatcgacgcgttaaacgttatcgatacccaactggttgataatattaccggccatttgctgagatgtgtttctgccccagtctgggtaccggaacatcgccagagcagtatgcataacctgaagtctacctggcctgccgctttcgatttgagtctgcgttttatcgccctgttgcgtgaaaaactggatatcccgctgttcgatagcgacctcattggactttacttcgcctgtgcgctggagcggcaccaaaacgaacgtcagccggtcattttgttatccgatcagaatgctatcgccaccatcaaccaacaggccattgagcgagatgtcctgaattgtcgggtgatcattgcgcgaaacatgagtgaagtcagcgctatcagtgaagaaatcaccccactgttagtcatcaacaatagtcactatttacttgatgaatctataaaaaataccttaaccatcaagaatattatcaccgctgccggtaccgaacagattaaacacttcctcgcgacagcctttatccgccagcagcccgaacgtttctttttacagcagggcagtttccattacgccaatatgaaagccgaaagctggcaaagtatcattggccggatctgcggccaacttgtggcacaaagccacatcaccgaggacgaggcgctgcgcatttgcgcccgggagcatgaaggtgaaaacctgatagtgaatcacctggcgattcctcattgctggagtgaacaggagcgtcgctttcgtggtttctttatcaccctcgcgcaccctattttggtgaataacgaaccggtcagccatgtcctgatcgcctgtgccgccgccgaagcgcgacatgaactaaaaatcttcagttatttatccagcgtgctgaacagtcatccggcagaaatgattgcggggttgaaagactataaagcgtttatcgcattgctcaggcagtga

SEQ ID NO: 397812 - DNA, 1071 bp, Salmonella enterica
atgaacattgagttacttcagcagttatgcgaagccagcgccgtcagcggcgatgagcaggaagttcgcactcttctcattaatgcgctgaaatccagcgtcgatgaaatcactttcgatggcctcggcagctttgtcgcacgcaaaggcaaccgtggaccaaaggttgccatcgttgggcacatggatgaagtgggctttatggtcacgcatatcgacgatagcggctttttgcgcttcaccaccattggcggctggtggagccagtcgatgctcaaccaccgggtcgccattcggacccgtaaaggcgttaaaatccctggcataatcggatccgtggcaccgcacgccttaacagataagcagaaacagcagccgctgacatttgacgagatgtttatcgatattggcgccaacagccgcaaagaggttgaaaaacgcgggattgcgatcggtgacttcattagcccggaagccaatttcgcccgctggggcgaagataaaatcgtcggcaaagcgctggataaccgcgtcggctgcgccctgatggccgagcttttacaaaccgtggataaccctgaaattactctgtacggcgtgggcagcgtggaagaagaggtcggactgcgcggggcgcaaacctcagcggagcatatcaagcccgatgtggtgatcgtgctggataccgcagttgcgggcgatgtgcccggaatcgatggcatcaaatacccgctcaagcttggcgggggtcctggtctgatgctgttcgataagcgctatttccctaatcagcagttggttgccacattaaaagagtgtgcagaaagcagcggtacgtcaatgcagttttgcaccatgaaaaccggggcgacggacggtgggcgctataacgttatgggcggcggtcgtccggtggcggcgctatgcctgccgactcgctatctccacgccaatagcggcatgatttccgcatcggattacgacgcactgtttacgctggtgcgcgaactgctcgccacgctgacggtcgaaaaagttcgcgcgttcacagactttagtcaggtgagttaa

SEQ ID NO: 397813 - DNA, 1452 bp, Salmonella enterica
atggagtcatccttacgtttagtggcgatcaccaactgtccggcgggtatcgcccacacttatatggtggcggaggcgctggagcaaaaagcacgctcgctcggccacactattaaagttgaaactcaaggctcaagcggcgttgaaaaccgcctgactacggaagagattgccacggctgattacgttattttagccaccggccgtggattaagcggcgaagaccgtgcgcgtttcgccgggaaaaaagtctatgaaatagccatctcccaggcgctaaaaaatatcgacctgatttttacgcagctaccgactcattcacagctttttgccacagatagcagcgtgaagctaggtaaacaagaggtccagcagggcagcgtgatgagccacctgatggccggcgtttccgccgcgctgccgtttgttatcggcggcggtattctggtcgccatcgccaatatgctggtgcagttcggtttgccttacactgatatgtcgaaaggcgcgccctcgttcacctggattgttgaatccatcggctatctgggcttcacctttatgatccccattatgggggcatatatagcgtggtcgattgccgacaagcccgcgtttgccccggcatttctggtgtgttacctggcgaacgataaaggcttgttaggtacgcagtccggcgcgggatttcttggcgcggtcgtactcggactggcgattggctactttgtgttgtggtttcgcaaggtccgtctcggcaaagcgctgcaaccgctgctcggctccatgctgataccgtttgtcactttgctggtatttggcgtactgacttattacgtcatcggcccggtgatgtccgatatcatgggcggtctgctgcacttcctgaacaccattccgccatcaatgaaaatgggcgccgccttcctcgttggcgcaatgctggcatttgatatgggcgggccaatcaataaaacagcctggttcttctgcttttcgctgctggaaaaacatatctatgactggtacgccatcgtcggcgtggtggcgctgatgccgcccgtcgcggcaggtatcgcgacctatttagcgccaaaactgtttacccagcaggagaaggccgccgccagcagtgcgattgtcgtcggcgctacggtagctaccgaaccagccatcccctatgcgctggccgcgccgctaccgatgattaccgccaatacgctctccggcggtatcaccggcatgctggtcatcgcctttggaatcaaacgcctggcaccgggtttaggtatctttgatccactgattggtctgatgtctccggtaggatcattttatctggtgctggcgatcggcctggcgctaaacatttcgttaattatcatcctgaaaggattatggctgaaacgtaaagccaaagccgcgcagcaggagcttgcccatgaacattga

SEQ ID NO: 397814 - DNA, 447 bp, Salmonella enterica
atgacaacccttacagctaactgcattgacctgaatattcagggaaatagcgtttatgccatccttaagcaactggcgaatatggcgtttcagaatggctacgtctccgatcgcagcgcctacctgcaaacgttattgatgcgcgaaaagctgcactccaccggctttggttcgggcattgccgtcccacacggcaaaagtgcctgcataaggcagcccttcgtcctgttcgcacgtaaatcagaaaacgtggactggaaagccagcgacggcgaggacgttaattgctggatctgcctcggcgtgccacaaaccggtgaggactcccaggtcaaaattatcggcaccctgtgtcgcaaaattatccatcaggatttcatcaaccagctgaaacaaggcgacgccgatcaggtgctcgctctgctcaatcagaccttaacctcataa

SEQ ID NO: 397815 - DNA, 213 bp, Salmonella enterica
atgagtaacgcgattacgatgggtatcttttggcatttgatagacgctgccagtgcaggctgtttctatgccccgttcaagcaggtcaaaattagcctgcatggcgcaggagcgattgccgatatggtgaacctcgtggcgaataagcaatggggtaaagcgctgatcgttaccgatggtcaactggtgaagctgggcgggcctgctggatag

SEQ ID NO: 397816 - DNA, 552 bp, Salmonella enterica
atggaaattcaccataccaaacaccaccagacttacgtaaacaacgcaaacgctgcgctggaaagcctgcctgagtttgccagcctgtcggctgaagagctgatcaccaaactggatcaactgccagcggacaagaaaaccgtactgcgtaacaacgcgggcggccacgctaaccacagcctgttctggaaaggtttgaaaaccggtactacgctgcagggcgacctgaaagcggctatcgaacgtgacttcggctccgtggataacttcaaagctgaatttgaaaaagcggcggcgacccgtttcgattccggctgggcgtggctggtactgaaaggtgacaaactggctgtggtttctactgccaaccaggactccccgctgatgggcgaagctatctctggcgcttccggcttcccgattataggcctggacgtatgggaacacgcttactacctgaaattccagaaccgccgcccggagtacatcaaagcgttctgggacgtggtgaactgggacgaagctgccgcgcgtttcgcagcgaaaaaataa

SEQ ID NO: 397817 - DNA, 5442 bp, Salmonella enterica
atgcacgctaacaaaaaaacatctgtttttttgcagatattcttttatctgcatctgatatttacccaagcttttattttttctttcccggtctatgctgagaaaacacataatgttccaccgccatctggaacaggtgtgatgattaataatcaacaacagaaactatcctctgacgatcgcgacgaagataaaagtattgctacttttctctcgggggcggggtctttgtttagccaggaaaataagacagatgcagtagcgaatgcattaattaatagtgcggcagggaagtcttcgaatgaaatccagcaatggttgcagcaatatggcaatgcgcaggtaagcttaggattagatcgcgatttctctcttgaaagcgctaatctggattggctaataccgctttataataagaacgaaaatcttatttttacgcaattaggcgcacgacgtgttgacgatcgtaatatcatgaatttaggccttggctaccgctattttactgatagctggatgtggggtgttaacgcattctatgaccagcagctctcggacaatacgcaccagcggctgggattgggcggcgagttaggctgggattacttcaaactgagcgccaatggataccagcgtctgtctggctggaaaaactcgaccgagcatcaggattatgaagagcgggtcgccaatggttatgatattcgcgccgaaggctacttaccggccttacctcagcttggcgctcaggtgatgtgggagcaatattatggtcgcgatgttgccttatttggcgacgatgatgatgagcgccagcgtgacccttatgcggtaacggttggaatcaattatacgcctttcccgctggtgacgcttggcgttaatcagaaaatggggaaaggcgatcagaatgatactcaggtcgcccttaattttaactggatgcctggtgtaccactctcggaacaattagattcggataaagttaaagatcgtcgaacgcttcgaggcagtcgtctggacttagtcagccgtaacaataatattgttctggagtacaggaaaaaagaagtcatttctcttgagcttcccagtcgtatagaaggtatcgaatctaaaacgattcccgttgctgttaatatttcaacaaagcatccgcttgatcacattgtctggcaggatgaacagttggtgaatcacggtgggaaaataacggagaaaaatgggtcatggtcggttgtattaccgcattatcagcaaaatagtaaaaacgataatagctatgacgtatcggcaacggcctgggacaatcagggcaataaatccgctaccgcccatatgacggtcgcggtgactggctttgatgtaaaaacggtttccacgcatacaacagtagctaagacgagtttgcctgctgatggcgtgagttctgccgaagtgacattgaccgtcagttcgaacagcgggcaaagaatcacaggtcttgccagcgatctcagtacgacacttattcgtgccgccaatctgaaaaatacgtcagcagagacaccgtcacgcgagaaaataagcgcttacaaagaacagagtccgggcgtctatgtcagtactttcaccagcggtacgacggccgggaaggttgtgatccaaccagaatacaaaagcacgccactcggtacgacgagcatagaactggaagtgatcgacagtcagttgcgttttacccagttggatacagataagtcgacggcgttagcaaacagtaaggacgccatcgtgctgaaagctaaagtggcgaatgccgccggtgaacctgtcgctggggtaaaagtacagtggcaggcggacagcgccctggtgaatttatcggcgtctcaaagtacgactgatgcgcagggctacgcttctgtatccgccaccagttcacaagtactggataccgccgttagcgcgcaactggagaacggccagtcgatcaagagccgaccattgcagttcattgccgacgctgattctgccagcgtcacccatctcgatgcggataaggcgcgagctaaagccaacggccaggatgccataaccctgcgcgccctggttatggatagtaaccaacacccgttagcaaatcagacggttcgctggtcgattaactctaaggataatgcgggacatctggccgataagcaaagcagcaccaacgagcaagggatggcaactatcggcgtgacttcggcaaaagtcgggcaagcggtggtatcagcggtgacaggaaacagcaaacctgttgaatccgaaatgctgagttttctggcggacagcgacagtgcgacgctcggaaaaataaccaccaacaaaacgaacgcgctggcgaacgggcaggacacggtgacgctgagcgtgatggttgaagatgacaataaaaacccggtaaaaggcgtaacggttggctggaccaccgccagtaaaaccgccaatctgtcagcggcggccacggagacaagcgagcaggggctggccagtatcaatgtgtcttcctctaccgtcgaagatttgcaggtcgtcgcgacgatggcggcgcaatcgcagacatcatcgaccctccatttcacggtggatagcggatcggcacgcgtaaaaacgctgaatgctgataaaatgaaggcgacagcgaataataacgatcgtgtcgttctgacggcccaggtcgtcgatctgaataatcatccggtatccgcagcgccactgcattggactatcgtccaggggcaagggacgcttagcgagtcgcagggtgtcacaaacgaacaaggtgaaggttccatcatgcttacttcggagcatgaaggttccgttgtcgtggctgttaaatcgacggcaggtgatgcggtgaactctcctgaactggtgtttgctgccgatgccgctacggctaaagtaacacttgttacggtgaataagagccaggctagcgctgatggtaaggataaggtgacctacacggcgaccgtcacggatgtcaatggcaatcctcttgatggtgaaacggtcaactggaccgcgacgccgtccacggcggcgctctcgtcggcaacctcgcgtactgatgcgggaggaaccgctgcggtgagcgtttccacactgacggcgggagaggtacatgttaccgcgcaggcagggagcggtgcggcctggaatgcgccggtcgtcacgtttaacgccgacagttcgacagcgcagttggggaatttggttgccagtaagcaggccgcactggcggatggttctgatagcatcacgtttacgggggtgattgccgataaaaatggcaatccgttggcgaacattaacgtggcatggtcggtgacgccgactaccgggcagctctcctcgacgtcaggatccagcgacagtaagggaaaggtcgctgttacgctgaaatcctcgcaggttgcgacctatcaggtgaaagcaacggtgaacggtagcgatgagacatctgaaccggtgtcgtttacagcggataaaacgacggcggcaatccagacgttgtcggcgacgaaaacctcgaacatcagtgcgaatgaggtagtcacattcaccgcagaagttaaagacctcgaagggcaccccgttaagggcatgacaatcgcctggtccggggacaacagcgcgggagaattcgacaagcctacatcggaaagcgacgcggatgggaaggcgtctgttatctggcgcagtacgctggccaaactgactacgatcacggcaaaaatgaccaacaatagccaaaaaacgcttcaggtggaggttgtacctgacctgaaaagcgcgatgccagtgtcagtgaatgctgataaagataacgccacggccaatggacaggaccttattagcctgacggcaatggtgaaagatcagtacggcaatgccgtcaataaggcgaaagtgggctggcaggttgcgcctgctgcgcactatacattatctgaagcagagtcgctgaccgatgcgtcgggagaatcgaaggtaacattggcaagttcggatgtcgtagcctgcaaggcaacggcttcatttaacaatgtgagcaaatcttcgcagatgctgcgctatgttgcagattcagcaacggagacgctttcctcgctcgtggcgaataacaccacgaatgttgtggcggggaaagataccattctgctgaaagcgacggtcatagatgccaataaccatccggtgagtaacgctaccgtatattggggatcggataatgagagcggcacgttccagcagggagaaagcagcctaaccgacagtctcggtgtggccgagatctcctataccgcgaccacggcgaagccaacggtagtcggggctggcatcaatcattctcgccagacgttgacggtgagctacatcggtaacgttgagacggcgcacttatcagaaatcaaatccgataaagtgaaggccgtggcggatggggcggaacgcgtgacgtggtcagtgaatgtcaaggatgctaacgggaatattctgcccgaagggattgtccattggagtagtaacgatccggcactaaccttcaccagcgccagcagtgtcagcgatgcgaaaggcgtggcgaccatgagcggatataccaaaaaagcgggtgatgtcatagttactgcgtcactgaccacgcctgctcagtctttgtctgccgaaaaggtaacgtttattggcgatgtgaaaacggcgaagctcgtttcgttgaaaacaaacaagaaaattgtactatctaacggttcggattcggtgaaatacgacgttgttgtacaggatgcaaacgacaacctggtgccggatgcgccggtcaactggcagacttcgatgaatgaattgtcatcggcgatcagcaaaacggacaatactggtgtggcgacggtcgcgttgtcagggcaccaaatgggattggtcaccgtttcagcatcaatcaataacaccacgctttctgacaaaaatgtgaagtttatcaatacgattgaggatacatgggttatcaatactgacaactcgaattatagttcggctgaaatcaaaggctattcgtcattggggttcgtgaccaccgcacctaccgatgggccaacgtcgctggaatgggcgccaaagggctatgcagcggtttcaactccggtaacgctaatcagtgatagcgggcagcaatttactgtcaaacttaaaggctatcgtcagtctgattgttcaaccagacctttaaatgcagcggtgagctgtcaggcaatcgagtctggaatgcgagcacaatttagctatgagcgaaccgaaaatacggatttacccgtcgggcactatacgggactcgttcatttctttggcaaagactggtctacaagctacgcgtttgaatacaagttgacgctggatttaactgttcattga

SEQ ID NO: 397818 - DNA, 777 bp, Salmonella enterica
atgtgcgggttaatactccggtcatttagcgccggctattccactcagccggttattgcagatctcaacgttcccttactgccgcgcgggaaaattaccgttttgctggggccgaacggctgtggtaaatcaacgttactacgttcgctggccgggctgaataacgccgacggcgaggcgctacttgatggcgaggatctcatgtcgttatcgtttgccgagcgggcgcagaaggtcgtgtttttgccgcagtcattaccgcaaggtgtgcatctgcatgtactggagtcgattattgtggcgcagcgggcatcaggcggcagaggcgatgcgcagggcagggcgcagatactggctatccttgagcaattaggcataacgcatctggcgttgcagtatctcgaccagctttccggcggtcagcggcaattagttggtctggcgcaatcgctgattcgttgccctgaacttctgttactggatgagccgcttagcgcgctggatttaaactatcagtttcacgtaatggatctcgtgcgtcgggatactgaggcgcaaaatagggtgacgatagtcgtggtgcatgacattaatattgcactgcgtcatggtgaacatgtactgatgctaaaagacggcaggctggtcgccagcggcgcgccggagacggtgattaccgcggaacgtctggctgaagtgtaccgggtacgaggacgcgtggagcgctgttcgcagggcagattacaggtggtgcttgacggagtgatcgatgtttaa

SEQ ID NO: 397819 - DNA, 168 bp, Salmonella enterica
atgtattctgtgtgttattcagaaaaccatgttctgttcgtgattttatccgtcaaagagatttatatcttttccttatcagatgtcccatttgagggtattcattatgtctggcgcaataagttccctggaaagagtgatattacctgttgcgataacgctgggtaa

SEQ ID NO: 397820 - DNA, 1575 bp, Salmonella enterica
gtgagtccggcgttttattccaccaattatggcgcgggttatcaactgggcgtcggtagtgaattgcagttctcttcttacacctttgtaactggcgatatccgggcagagggtgatgcaggtattaccattggcagtagtgaaaatgttgccctggcggataatctgcccctggaagaacagatgatgtacagtctgttcaatggttttcgtaacgtttattcgggtaatgtcagcgccccgcaagggcgaatggcgatgacggatgcgcagtggcagatgcccggtgattctcgtatcgggacactgcgtatgacacggtcgctggctggctttaccgggcgtggattccacactctgactaccgacacattacaggccagccagtctgcttttgcgctcagaacggatctgaagaacagtgacaaaattgtggtgaaccagaaagcagagggccgggacaacaccctgtttgtgaatttcctgaaaaaaccgtccgggcaagaatccctgaatattccactggtcagtgctccggcagggacaaatccggcgatgtttaaggccgcagagcgggtgaccgggtttagtctggtgacgcctatcctgcgcacgacagagcgggatggcaaaatacagtgggtgctggacgggtttaaatccgcgccggacaaagggtcagccacgtcggctaacagctttatgggtatggggtataagaacttcatgaccgaagtgaacaatctgaacaagcgtatgggggatctgcgtgatactcagggcgaggatggaatgtgggtacgtattatgaatggcgccggaaccggtgacgccggatattctgatcgctacacccatctgcagacggggtttgataaaaaacatcacttgtctggggctgacttattcaccggcgtcctgatgagttataccgacagcagcgctagcggtcgggcctacagcggcgacacgcattcgctcggcggtgggttgtacgcatccgtgatgtttgattcaggaatatatatggatgttattggcaagtatatccaccatgataatgactataacgccggatttgccggcctgggcaaacgaaattacggtacacactcatggtatgccggtctggagggcgggtatcgctatcacctgacagaaagtttgtacattgagccacaggcggaactggtgtacggaaccgtgtccggaacgacgctgaaatggaatgatagcggcatggatgtgtcgatgcgtagcaagacctataatccattgatagggcgtacaggggtggcactgggaaaaacgttcagtggcaaggactggagcgttacggcccgtactggcgtggattaccagtttgatctggtggccaatggcgagacggcgctacgcgatgcctccggcgagaaacgttttaccggtgaaaaggacagcagaatgctgtacaacgtggggctgaatgcgcaggtgaaggacaatgtccgttttggtctggagctggagcagtcggcatttggcaaatataatgttgatcatgccataaacgctaacttccgctatatgttctga

SEQ ID NO: 397821 - DNA, 603 bp, Salmonella enterica
gtggacgcagggtacttcacggcagcggtctgtcacctgacgcaggaaatgggcgttgcgctggtgccggggtaccggcggccgaataaagggcagaatgcgtaccagaaaaagcacttcaggtatgacccggataaggatgtgtacgtgtgtccggcaggggcagagctgagttacggcaccacggaccgcaacggctaccggcattaccggtcggacagggcgatatgcgcggtctgtccggcgcatgataactgcacgaaaaacagtaagatgcagaaaacgataacgcggcacgtatgggaagaggcaaaagagaaggcgaacgcgctgcggctgacgaaatggggaaaaaaggtgtacgcacggcgtaaggaaacggtggaacggagcttcgcggacgcgaaacagcatcacggacaccggtatgcgcggtaccgtggactgatgaaagtgcagatgcagtgcctgctggcggcgacggcgcagaatatgaagaagatggcgctgctggcgctgttttacgggctgttaatgatgctgaaacggtggtcagaaaggcttcagtggccgatatggtctgagcaaagcatggcagggtaa

SEQ ID NO: 397822 - DNA, 330 bp, Salmonella enterica
atgtttgacaatactggagtgattgtatttgaaggaacagaccctgaccatatttttgaaattttgcttgatgctgaagttgatgttcgtgatgtaaccgaagaagaaggaaacatcgttatttatactgaagctacagacctacacaaaggaatagcagcgctaaaagcagttggaattactgaattctcaacaacagaattagaaatgattgctcaatcagaagttgaactttcaccagaagatttagaaatctttgaaggacttgttgatgcccttgaagatgatgatgatgtgcaaaaagtatatcataacgttgcaaatctctaa

SEQ ID NO: 397823 - DNA, 1080 bp, Salmonella enterica
atgcttaccgaaaaatacgatttccgcattaccgatcagatgactatcccactcagacctcactggatagccaatgatgcagacagggaaaagtgtaagatgcttgtcctcaaccggagcaaaggggaatttcataaggtagactttagtaaactaacagattatatcaaagaaggtgatgtaatctgttttaacgacagtactataataaaccatatgtttatatgcaaaacaagacgtaatagattagttaaaattgttttagagggtttcttaccaaaaaatagagtaattatttccgggcttttaaaagaaaagtttaatgcgagtgatgttttctatttggttgataatcctgatattttcattatagtagagcagaaatttagcgaagagggccagtatcaggccatcgtagaaaatcatcatgacttaatttgctatttagtcagtcatggcgagcgtcttgatgagtacgtagactccagcttattttataaatatccggatgcttatcgctccgttttttctaaaaagtatggctctttggaaataccttctgccggcattcattttacctggaaccttatccaaaaaatcaaagataaaggtgggttaatagcctttgtcactttacatgttgcatcaacagaaattttgttcaacagaaaaatacaaactaaatgcgtagaagatgtcactatcaacgaagaatactacgatgtaccacaagcaacagcggataccattaatactgtgaagcaaaatggcggacgtatttttgccgtaggaactaccgttacacgatgcctggaatccgcgtattcgagggagcacaattgcctgaaagcaagttctggctggactgcgctttatatacatccaggctatcaactgaaagtggttgactgcctgctaacgaacttacatcagccaaaaacgacacatatggtgttaaccggtcagtttgctggggttgatctactaatgaaggtctatgcctcagaagatatccagtcatgccagttcgatatgtttggtgattgcatgttaatcatgcaggatgaagggcagggatga

SEQ ID NO: 397824 - DNA, 480 bp, Salmonella enterica
atggtggagaaattattaaaaacacttccggaacaggaggttttacaattgtattcaaatgaaaaaatttgtttttataaagaaaaattactatggaagcttcgtaggagcaaacttggttcttctgaacaaatgatttttgaaacatttgatgatgttgttaaacaacatttattgaaatacacacatattcctcctgttattgttttatgggggggagagaacttatggacatttattagcgggcaagaagtggtgagtttttatgatggaagtatttatcgtatttgtctcgatgatattaataagaaaataaaggcaccttcatctgttagtagtaaggatggttctaaatttgattttaattatatttttttaggagattcgggggtgaagatttgggcaccggaggggaatgtcatttttgccataatgaatatacttcaaatgtttcctttgaaaaaaaatgatatcagttag

SEQ ID NO: 397825 - DNA, 228 bp, Salmonella enterica
atggatatagtgtattttctgtaccaccttcgagatgaaggtacgaaggatgaggatgttaagcttattggaatttatacaagtcatgatttggcactcaatgcacagaaaaaactcatggctcaaccgggatttatcgattatccgcatggatttaagatagtaaacattgaactgaatcgtgatagctgggttgagggctttgttacgaggcctggtcgaggataa

SEQ ID NO: 397826 - DNA, 213 bp, Salmonella enterica
atgaaagatgtttatcttttatatcatcttcttaacgaagatgctgatgatgaagtagttaaacttctcggggtttatacgagctatgagttggcttttcaggctcaaatacgagttagtgatcattctgcctttattggtttttctgatggttttcggatatttgatcattggattaatcatgatgactgggttgatggatttataacataa

SEQ ID NO: 397827 - DNA, 381 bp, Salmonella enterica
atggtcagagaaagtttagtcagagcactgccaacggacgatccgctctttaacgatccccgtcaggcgggcgaggggtacccgtttgataatttacaaatgtcttcgctgcgtcccggtacgcctgtctatacgctgacggagagcaaagaccaacgctggcaatatgtcgtttcaccagcggtaacaggctgggttcatagtgaagatattgccagtgtggatcagaaatgtgtaactcagtgggttttgcttgctcacaagcaactggggcatttatcaacgcgccggtttctgtccatgccgcaggcgtctattacttcaccgggcgaccgggcactattttaccgttccggcatcaacgggcgggcctgttcctga

SEQ ID NO: 397828 - DNA, 4419 bp, Salmonella enterica
atggacggaaaaccggcagcacgtcagggcgacatgaccaaggtaggcggtccgatagtccagggttcggcgggagtactgataggtgcgccgacgggtgtggcgtgctcggtgtgcccgactggggagaccagcctaaagtacggtaacccggtgaacccgctgctgggtgcgaaggtgctgccgggagagaccgatatcgcgctgcccggcccgctgccgttcgtgctttcccgcgcctacagcagttaccggacccggacgcccgcgccggtggggctgtgcggaccgggctggaagctgccgtcagacctgcggttacagatacgcagcgacgggctgatactgaacgacaatggtggccggagcgtgcattttgagcctttggcaccgggagagatacagtacagccgcagcgagtcattctggatggcgcgaggcggggcggagtcgcagtacaacagccatccactgtcggccgtgtggggcacgctgccggaggcggtgcggctgtgttcacatatctatctggcaacgaacagcccgcagggaccgtggtgggtgctgggatggcctgagcgggtgccgggtgcggatgaggtgctgcctgtgccgctgccaccgtacagagtgctgacggggggggtggacggttacggccgccgtctggtgtaccaccgtgacggaacgtacggcgatgcggtgacgggggggacggacggcaccggacggtgttaccggctggtgctgaccacgcaggcgcagcgctcggcgcaggcggcgtcagcgtcttcttcgtcattatctcctgcattttctcagcaactttcatcttccttatcttctccccactcaccttcctcctggccggagacgctgcctgcaacggcatacggggaggacagcggcgtcaggctgtcggcagtgtggctggtggaagacccggcatatccggatgacctgccgtcgcagccgctggtgcgttacggttacacggcgcgcggtgagctggaggcggtgtatgatcgcagcggcgcggaggtgaggcgctttgaatatgacgccggacatccggggaggatgactgcgcaccgttacgagggaagaccggctagtcgctaccggtacgatgaagcggggcgggtgacggagcaggtcaacccggaagggctgggttatgcgttcgcgtatgagaaaaacaaaataacggtaacggacagcctggggcggcgtgaggtgctgcacacggagggcgagggtggcctgaaacgtgtggtgatgaaggaacaggctgacgggagcgttatccgcagcgggtatgacggttcagggcggctggaatggaggacggacgcggcggggagaaagatgacgtacagcccggatgtagcgacaggaaagctgacagcggtgacggggccggacgggaggaagacgaagtacggttataacgaccggcagcaactgataatcaccgtctatccggacggacggcgcagcacgcgggaatatgaccggcagggccgtttggtgaaaacggtgtcgcgtgaagagaacgcaacagagtatgcgtatggcggcacccatgacagccagccgtcggtggtgaaggacagcaccggtagccgccggataaggcgggggcgtaacggtgaggtggtgtcgcggacggactgctcgggttatgagacgcggtatgagtataaccgctacgggcagcagacggcggtgcattatgaggaaggcctaagtgtttaccggcgttacaaccgccggggcaggctgtcgtcagtgaaggacaggctgggtcgggagacgaagtacgactataacgatgcaggcgacctgacggcggtaacccgcccggacggtcagcggcgcgttgcggaatatgacgtgcgcgggcggctcatcagtctcacggaagggggacggacgcggcgtgccggatatgatgtggcggggcgagtggtgcggctggagaacgagaacggtgcggagatgtgctttgtctatgatgcgctgaaccgggtgacggagcagcggggcttcgacggcaggacgcagcggtatgattatgaccggagcgggcggctggagcgcagtgaggacgaagaccttgtcacgcactggcgttacgacgcatcagaccggttaatgcagcgcaccgtcaacggtcaggaagcggaacggtggcagtatgacgaacgcgggtggttgatggcgctgagccacatcagtgaagggcagcgtgtgacggtgcattacggttacgataataaaggccgtctcaccggcgagcggcagacgatccataacccggagacggaagaactgctgtgggcgcacagcgtgcggcacggttataatgaccaggggcaggcggtacgggaggcatatgacggcctgccagtggcggagtggctgacgtacgggagcgggcacctggcgggtctgaagctgggaaaccagcctctggtggagtacacgcgtgacaggctgcaccgtgagacggagcgattgttcggtgcgtggcggatggagacgggctacacggcgggtggggaggtggcgtaccggcacctgccggagacggcgctgaaccgggaatacaggcatgacgaatcgggggtcctgacgggtatcgacggtgcgggtgaaagctggcgttacggttatgatggtgcgggaaggctgtcggaagcgggcctgacgacccgggagatgagcgtggacatcccgtatgagaccgacggggcgggaaaccgggtggaagcgggggtggaacgccgggaggcgaacggactgctgggtgtttttgcggacaaccgggtgacggaggacgggcggtacgtgtaccgttacgaccggtacggcaatctggtggagaagggcgagcgcgttccggcggggatggtgcgcagcggagatgagcggacgcaccattacagttatgatcgtcagcaccgtctggtgagctaccggtgtacggagggctacagcgggcggagcatcacggagagccggtacgtgtatgatgcgaccgggcggcgggtgagcaaaaaggtgtggcagcgcgaacgctatgcgaccggacgttaccacgactacacggcgctgccggaaaacccggaagtgacgtggtacgggtggagcggggacagactggtgacggcagagacggaacggagccgcatccagacggtgtatgagggaggcgggttcatgccgctcatcagggtggagacggcgacagcggtcctgacaacggtccgtagccggaggagcctggcggagaagctccaggcggaagggagcgaggacggggcgggcgtggtgttcccggcagagctggtgaggcggctggacagcctggaggcagagctgcgggtggggagagtgagcggtgagagccgggcgtggctgtcgcagtgcgggctgacggcggagcagatggcggggcagatggagccacggcatgagccggaaaggaagatacatctttaccactgtgaccaccgtggtctgccggtggcactggtggatggggaagggaagacggcgtggcgtgcggaatatgatgtatggggaaaccggcagaaggaggagaatccgcaactgcttgagcagttactgagactgccggggcagcagtatgatgaggaaacggggctgtattataaccggtaccgttactataatccggggcaggggcggtatatcacgcaggacccgattgggttgcgggggggatggaacctgtatgcgtacccgctgaatccggtgcagggggtggacccgctgggattggatgagggtgatatattctctgaatatgacaattcttctgctgatactttagataattatctgaactctcatggggcatcaccggaagaaagagttaaagcgggggaagagtatgttcggggagtaggaggatggaaccctgctgctgactatgtaaaactttgggctatagatacgcctgttattattggaacaatacttactggtccagcatcaagtttatcagcattaagtaagggcacaatttcatggggaaaaaccgtgattgaaagtgccacttcatgtgctgcagttgcaacaacaagctatatggatgatgaaaaaatcccagataaatccgagttaactctgtgtgctttagggggagcctttggtgctggaaaaggttttttggaaaaaacagcaatgaaaatgggattgtcgtttttaagtcagggggctgatgtccaggcaggtatggatgctgctgcgaatacaggagtagaagaggtcgttgctggagccacaggcaaactaccttttgttcctgagaatgagtttggggatgccgttactgatgtttttgcaggtgagttagtcggtaaattaaaagatgataataaaaaataa

SEQ ID NO: 397829 - DNA, 702 bp, Salmonella enterica
atggctgttcttacccgtccgttatcggcttccgaagtccagaaagtaaaacccgcagaaaaggattatgaactttttgacggtcaggggctgaccctgatggtgaaaaccaccggcaaaaaaatctggcgctttcgctacaaacgtcccggttcgacttcacgaaccacaattaccctcggatatttccctgccatgtcacttgccagtgcaagaaccgttcatgcggagcatcttgctctgctggttaaaggcattgacccacaaaagctggagcaggaagaagctgaacgggaaaaaatggcggttgatggcctgtttatcaatgtggcgacgaagtggtttgctgtgaagaaaaccagcggtatttcggaagttcatgccgatgatatctggaaatcactggagcgcgacgttttccctgcccttggccagacacctgttacagaactgaaagcacacattcttattgcggcgctggagccggtacgggcgcgtggcgcactggaaaccctgcgccgtctgacccagagaattaatgaaatactaaaatttgccattaattctggtctgctggatgccaacccggcatcaacgattgggacgtttttgagaaaccgaaaaaacagcatatggcgactatccgtccggaacgcctgccagagttggtacaacgtattgaaaccactaatctgtcgctga

SEQ ID NO: 397830 - DNA, 459 bp, Salmonella enterica
atgtggtgtgaaattgacatggagaaaaagctctggactatcccgcctgaacgtatgaaaaaacgccgtgagcatatcgtgcccctgaccgatgaaatgctgtggatactggagcaacttaaaccgataagtggacactcgccgttcctgtttccgggccgggttaaaccctcgcaaccaatgaatagtgaaacggtcaataaggcattacggcgtatggggtattgtggggaactggtgtcacacggcttccgggcgctgggcagcaccacgctgaatgaggccggattttcccccgatgtgatagaagctgtactggcacatgcggatactaatcagacgcgtgccgcttataaccgctcgacttatctggagcagcgaacagacgtgatggcgtggtggagccagcgtgtatgtggcatcccgtctgaacggccagtctgtgggaggagggcatga

SEQ ID NO: 397831 - DNA, 144 bp, Salmonella enterica
atgatgcaacaggactggcagcccgctgatattatcgcggcactgaaaaaaacggggaacgttgctggcagcagtttcccgcaaagccgggctggcctccggtacgctggcaaatgcgctcagacgtcactggccgaaaggtga

SEQ ID NO: 397832 - DNA, 1020 bp, Salmonella enterica
atggcaagtaaaaaacccactatttcggatgttgcaaaactcgcgaacgtatcggctgcaactgtgtcgatggtgttatcaggaaaagggcgcatatcaacctggactacacaaagaattaataatgcaatagaacagctaggctatgtaagaaattacaatgctgcaactttgcgtagtggaaagactggactgattgctgtactcattcatggaataaagaataaatttaatctggaagcactacaaggagtaaccgcaaatcatgatgaaagaaacaaagttccattcatcatgatttatgaaactgacagtgatcttgaaaacagaataaatattgcgttgaattataatgtagacgggtttttaataattagccagcaatacacaagcgaaaaggtaaagaaactgctgggtaattcgaatataccctggatattcatttcaacaactattcattgcaatgacaaccattatataagtattgatgcacttcatggtagtcgtatcgcaacacagtatcttattgataaagggcatattcatattgcttttgttggtggtggtataaactcatgggatcgggcagagaaactggatggatatttttctgtattacaggacaataaaattaaagaagataaagatattatcatccctgatggagaaacacctcaaaaaacagcagatcaggttgagcaacttatttcaactcatccctggattacagcaatattatgctatgattcaataacgacgagaggaacacttgccggaataaaaagtagaggacgaactatcggcaaggataattatattggacgggacatttctatcattgctcttgaaaaaatagatgaggcggaatatatatcaccatcaataacatgtatcgatttttctgcttatcgattaggctggaatgctgcacaacaattgaataaccagatcgaaaaaaaacctgattcaactgttatacaagtaccccagccagtcttgatcgtcagggagtcagcttaa

SEQ ID NO: 397833 - DNA, 945 bp, Salmonella enterica
atgtgcaatacgttaattgcaacctggcgtatggctctggatggcgtgagtcaggcgatggggataaccgatctccatcatgccgttcagcatgctgtgataaacgtagaaaataacccgctttatcattccgttggctatggtggattgcctggtgaaaatggtgatgtggaattagatgccgcctttatggatggtgattcgctaaactatggcgcggtcgcagcgacacaaaatctaaaaaacccgattaccgtagcaaagcaattgagtctttctcagcgtaataatgtactggcagcttccggtgccttaaaatttgcgttagaaaatggtatggaattgcgggataacagacatcctttggcattagaaaagtggaaaggcgctgttaattcttcacaaacttatcatcaccaggaggcttacgatggccacgatacggtatgcgttttgggtcgcagtccgaaaggatcggtatgtgcagcggtttcaacttccgggttgtttatgaaaaagtcggggcggctaggagattcccctattatcggttccggatgctacgctgatagctcttcaggagcagccgccgcgacaggcgtgggagaagatatcatgaaaggatgcctgtcctgggaaattgttcgcttaatgaagcaatattctccacagactgcttgtgaaatggtggttcgggaacatacggataaaatgttagcccgaaaaggggaatgcgggagcatctcggttattgctgtaaatcgtcatggggaatggggcgcagcaacgaataaagatgagttttctttcattgttggtgaaagtggggcaactgcccaggtatggctttctcattataaagatcgtatattttatagagagaaagcatcggaaaaatggttggctgactatctggataaattaccatcgggatccggaaattaa

SEQ ID NO: 397834 - DNA, 456 bp, Salmonella enterica
atgttcaatgccggaaataaaaataaagattttgaaattctgcgttataaacatattctaaatacttatcctcgggatgttcagttattagggttaggtgttaacgggcatattggtgcatgtgaaccaggaacaccatttgacgccaccacattctgcgccagacataaaccttccactattgaaagtaccatgcggctatataatattagccgcgatgaggcgcctgatgagatgtttacgctaggtttcagggaaattatggatgcgaaaatgccaatcctggtggccagtgggatcagtaaagcagaagccgtgcgtcgcctgcttgaagaaccggtaaatgaagaatgtccggcctcctttttgaccacccatcctgattttgtattaattgttgatgaagaggccgcatctctgctgagtgaggaaacccgaaaatgtgcaatacgttaa

SEQ ID NO: 397835 - DNA, 429 bp, Salmonella enterica
atgaaaatttatatttttttgatttctttagtttttggtgttttttcactaactgcgtgcaaaaatgatgacgtccaaaatgcggtcttggtggttgagtctttccataataaattcaattcaaaagattttaatggaatttatgccgacgtggtttctaaagaatttaaaaattcaatgaccagagcagattaccttactcttatggataaaaatttttcagtacttggtaagtatcgttttggccgcgtattgaaaagcgatcaagttaaggtattaattggagaggataaaataaacatatcttatcattccacatacactaattacgaattaaatgaattatttgtgataaaaaaggaaggcggcaaaagcaaaatagcccaaatagtatatgacgacattcatgcaataaaactcaaagactaa

SEQ ID NO: 397836 - DNA, 705 bp, Salmonella enterica
atggagccggaatacacaccggagaggacaatccacttgtaccaccggggcctgccgctggcgctgataagccaggatggtgacatcagctggcacgcagagtatgacgaatggggtaacgtgctgcgggaagataatccgtcgcagctggaacagctaatccggctgccggggcagcagtatgatgaggagtcagggctgcattacaaccggcaccggtactataatccggggctggggcggtatatcacgcagaacccgattgggttaagaggtgggtggaatttctacgagtatcctttgaatccaattcgatttatagatccactaggtttggctcaaatttgtacaagaccacttaaaggttcgcgaggtattaggacaaatggcatgacaggtctcgatcttggcattttccatgcacacatattctttgatgatggtactaatatcggctatggtggtgatagtgggttatttagtgaacctaaaactaatgattacacctgtaataaagaaaaatataatgatgacataatgaaaaaagcagtcgagatagtcaaaaatgaaccagataacttattattcccggaaggaagtaaacagtatggaaatgataactatggttttatagtaaataactgtcaagactttgtaagcgatgttctggatgagtacaaaaaaatagaaggtgcaaaacaatga

SEQ ID NO: 397837 - DNA, 1179 bp, Salmonella enterica
ttgcgggctgcggggtttcgtaatcttgccctgggtaagcgggtatggaaacgcgagccggttcactggagtgaaacgcagacggcgctgtcggccaggccgtatgagacatggtacggatgggaaggcgacaggctgacgacagtgcagacacagcagaaccgcatccagacggtatatgagccgggaagcttcacgccgcttctccgggtggaaacagaaaatacggaactggcgaaaacacgccaccgcagcctggcggagaagctggcgcaggaggggagcggggacggcgaggcggtgcagttcccggcggcgctgagggcgatgctggacaggctggaggacgagctgaggcgtgacgcggtgagtgaggcgagccgggcatggcttacgcagtgcgggctgacggcggagcagatgaaaaatcagctggagccgcgccctgagccggagaggaaagtacatctttaccactgcgaccaccgcggcctgccgctggcgctgattaacccggacaacacggtggcgtggcgtgcggagtatgacgagtggggcaatcagctcagtgaagagaaccctgagcacctggagcagcttatccggctgccgggccagcagtatgatgaggagtcggggctgcattacaaccggcaccggtactataatccgggacagggacggtatatcacccaggatccgattgggctggaagggggattaaacccgtacacgtatccgctcaatccggtgcaactctcggatccgctagggctgacagtcgtttttactggtgatgagaaaactcaaggggaattaaagtcagcttatgagacgataaaaacatctaaatatggaaaagtaatgattgatactttagaaaagtcacagaaaatatatactattactaaaggtgataataatgatgcttggtatgatcatgaaaataatcacaacactatttatgttgatccagattatcaccccgatgtgcctgttgatttggtatgtaataacaatggaaaagaaaaagcatcaaccgttgcactacttgcacatgagattggtcatgcctattggaatactggtaatgaggatttcataatgcagaatgctgaaaacccgataaggaaaacattaaatatgtgtattcgcacagaatattacaacgtaaaataa

SEQ ID NO: 397838 - DNA, 222 bp, Salmonella enterica
atggttagcgataagaatacagctatattaattaatgagttaatgttgagattcggtaaggaacttgatgaatccgttgctgtcgttcagtctcagtgtgatcaggatgaatttaatgcatatcgggaggcagttggttttataatgggagggatgcttattaaaataatgaatccgctatatgaaaaacatcctgaaataaaaccaaaagaattaaaataa

SEQ ID NO: 397839 - DNA, 372 bp, Salmonella enterica
atggtcatagctatcaatttgctatcactcatcagattgccggggcagcggtatgatgaggaatcggggctgcactataaccggcaccggtattatgagccgggacagggacggtatatcacgcaggacccgatagggctggcagagggatggaatctttatacctacccgctcaaccctattacagatattgatcctcttggtctcattacgtgtggtgttgatataggcgaacctggtgagttattaaggtgtaaaatggttgaaaataattgcatcagtaaatgttcatttacttctttacctacaaaaaataatggatttgctttctggaattgtgttaatgaatgtaaggcaagtcaaggttgttga

SEQ ID NO: 397840 - DNA, 585 bp, Salmonella enterica
atgaaacgatttttattatttttgctggcaatattcattaattttgctgccataggtgcctgtgaaatacagcctaaaaatcaagtttgtcttaccatttttacccggagcggtatcggttccttttttcccgttttaaatgttaaacctgtatggaaatggtatcgaaatgaggatataggtgaatactactggcaaacagaactgggaacatgtaataacgacaaatttattccaaatggagcaagactcctaattgtccttgggtcactgcgccttaatgaaaatcctccagctgaaggttccttgcaggatttactggatacagctgaaaaaaaagcatttttcgatgatgagatcgccaatatccatgtgagaagtcctatcagaggtgccttcgttcaaaaaaaaagcagcgatccggcaatgttgttggcaatccttgataatccatccatggtgaaatattttaaagcggagaagtcaacttatgcccgcatgactgcacatcttcctgaaaaaaatgagtcttacgaatgcgtaacaaaaatacaatatggagtgcttcgtagtgagagaaagtaa

SEQ ID NO: 397841 - DNA, 474 bp, Salmonella enterica
atggggcttgcacctagatctggatatagacgcttaaataacggtggttacggagcgaaacccgccaaaaaacctatacccgacccaggtaaactgccagatatagcggaacaattaaagcccaaatatcctattgaccaggctagcagtgatcctaatgttttcaaaacattcttcagagcattaagtccttatgactacacactatattgtaggaggtgggtaaaaccaaacctaacctgtacaccgagggatgatcccggataccctggtatggatacaaagacagcgagtgattacttgccacagaagcgttgggcgacagatcaattgccagagggatatatttgtgcagagccttatcttttctcagatcttgatgagttcggagggccagcaacagcagggatagatgattgggccgaattaggaattagaggagtacagagaatcatgagaggagcgagaaaatga

SEQ ID NO: 397842 - DNA, 279 bp, Salmonella enterica
atgaaaaatattttaagagaagatgagtatcaggaactagttagcgcggctgaaggacaaatgcttgatgctgttttgtgctattcagctccagattcatgccctttagattttagtttcaatgatcgaagagaaatatttttttgggttttagaaagactattgaaggaaggcaaaatcaaacttgccaaaaatggtaagcttcttgatggtactattaatgagcagattgaacgttttaaatcagttttacctaaaacagaggaagagatagattga

SEQ ID NO: 397843 - DNA, 207 bp, Salmonella enterica
atggatgatcgggttgcaaaatacaatgcagagtctacattgctaattgcagaagaattcggtatgaagaatccaagatcttctttctctattagggttattgataaaactttttcagtattagataccccagaattagctaacttgctgaggaaggaattgggcgactctattttgatccttttaaattgtgagactccaatttga

SEQ ID NO: 397844 - DNA, 159 bp, Salmonella enterica
atgcagcacattgctctcatgcagcctggccactccgccgcgggccagccacagggactcgctgcggctgaaggcggtttcaccgggcagcagcggctcaaagtgaatactgcgcccgccgttatcgttgaggataagttcctcatcgcgaagctgtaa

SEQ ID NO: 397845 - DNA, 609 bp, Salmonella enterica
atgctgctccgtcacccgcccgctggcatcatagcggtaggtggtctgcgggcggccggcgtaccggtgcgccgtcatgcgccccggatgttcatcgtcatacgtgaaactgcgcacctgcgtaccgctgcggtcgtacaccgccgacagctcgccgcgcggggtgtacgtgtagcggaccagtggcaacaccgggaggttatccgggtatgccgggtcgtgcgtcagccagaccgcttcaaggcggatgccgctgtctgcgccgtaaccggaaaccggcatcgtctgcggatattccggcgccctgatacccgaagcggtcgcctgtttacgcgccgcctccgcccgttgcgcctgcgtggtcagcgccagccggaagcggcggcctgcgccgtcggtgacggcggtgatattcccggcaaattccgcgtcagcgtcccggtgaaaggtttgtgtgcgcccgaagcggtcggccagcccggtcagcacccggtacggcggcagcggggcgggcagcgcctcatccgcgcccggtacccactcaggccagccgagtatccaccacggcccctgtgcgctgttggtcgcgagatacatgtgcggacttaa

SEQ ID NO: 397846 - DNA, 336 bp, Salmonella enterica
  misc_feature (60)..(69): n is a, c, g, or t
atggataaaaaactagaaccttattatttaagtgcagaaacggcattatctatagtttcnnnnnnnnnnagtaaatcctcaccattactaaataatatatcctgtaaagaaagccccaacgacagaaagaaattcttcatttgtatagagtcatcagtattatttctgtcgtactttttaaatcttatatttatatcatcctctttgatgtcaatttttatgttgaattttttagaaactatagataatgccgattttactattaacaccagaaatgaaatggatggtgtgtgtgagtggcgggcaaaaaataaagttggtaaacgcgcgtggtga

SEQ ID NO: 397847 - DNA, 618 bp, Salmonella enterica
atgatgacacgcattgtatggaaagcgggtaatttggttagcctcaaattacgagacgacttatataccattggccagatggaatctggagctattatgcgattttttgacataaaaaatcacaacggtgaatgggaatatattaacttaaataatgtaaggcaattgttcagagtgtttgttggaagggctgtaactcagaaactagcagtcaaaagaataaaaaataaaacaatcactccttgtcaaaaatccctggatgattattggatacatccgtatacattattaattgatggcgaacattacaaaggtaatggaaccagttttgcatttttaggtgggaagttaatttcactcaattgggtgaataatatgtctataactgaggctgtagttattaagcatgatctttcctcggttgacgataaagagcttatcgaaaagtatgagttgacaagtatgtggggtgatgaagatttaggggacagattacgccgctactttgatacaggtattaaccgtgatgatttgaagttcgaagtcttcccgggactgtggaatgatcgggaaagtctccgtccgttaactcgacggcttccgataccgttacgttag

SEQ ID NO: 397848 - DNA, 660 bp, Salmonella enterica
gtgctgattaacccggacaacacggtggcgtggcgcgcggagtatgacgagtggggcaatcagctcagtgaggataatccggcgcagctggagcagctgatacgcctgccggggcagcagtatgacgatgaatcagggccgtattacaaccggcaccgctactacaatccggggctggggcggtatattactcaggacccagcagggctggaagggggatggaatctgtatgcttatccactcaacccaatcacagaggtagatccgctggggttatgggctttcgctattccggccatacaggaaggaattaactggttattttggggaagtgctgctgcgggcggcgctgtattgggcacgtccggtgattcagaacaatccaaagcaaatacagaaagcctgacaaattgcccaacaatcccccctgaagatccatgtgataaaaagcttgataaaggattattaaaaaaagcagatatatttgacgcccatcaagtgaaaaaagattggatgggtgatggagctagaatatcaaggtttgatttatgtggttgcaaagatggtagaatagtaattaagactaaggttgttggtgctaataagaacatggattgtaaaggagaaattgcctctcctactgaatataattggaaatga

SEQ ID NO: 397849 - DNA, 303 bp, Salmonella enterica
atgaaattaactgttgagttacatggtatagatcccgttaagggggaatggttcagcatatcgaaacatgagtctgatcattatgatcatgattttttgctacttattattaataaggtcttggatgaaggtgctaaatatagtagcaatggtcttgaaggattaagagctcttcatgttgaattgtcagtcgcaattatttctgatgaagatggcttcagacctgcatttgacattgatgcgcgaacaataagcagacttagcgcggcgggtgcctcttttgatttcgacccatatgtataa

SEQ ID NO: 397850 - DNA, 519 bp, Salmonella enterica
atgcctacaccctgttacatatcaattacaggacaggcccagggcaacatcaccgctggtgcattcaccgcagattctgtcggcaatatctacgtgcagggccacgaggaagaaatgctggtacaggaattccagcataacgtgactgtaccaaccgatccgcagtccgggcagccgagtggccagcgttcgcataagccgttcgtctttactgtggcgctgaacaaagccgtaccgctgctgtacaacgcgctggctgcaggcgaaatgctgccgaaaactgaactgcactggtggcgtacctctgttgagggcaagcaagagcactatttcaccacccgcctgacagactcgacgattgtggatatgaagttgcatatgccgcactgccaggacccggcgaagcgcgagttcacgcaattgctcgaagtctcactggcctaccgcaaaatcgagtgggagcacttcaagtccggcacctctggtgctgacgactggcgtgcgccgctggaagcgtaa

SEQ ID NO: 397851 - DNA, 504 bp, Salmonella enterica
atgagcaaagattataacggcagcgtggcacccaaagaacgcattaatatttcttacgttccaaaaacggacggtgagccttctgaggtggaattaccccttaatatgttgatagtgggagataccggaaactcacaggaaacagcgccacttgatgaacgccagatggtttctatcgacaaacattcattcaattcagtgatggcagaagcgtccattagcctgaattttgccgttccggcaacattgaaggacgacgcaaaagatggcgatgagatgaatgtctcgctgaaaatcaaatccctgaacaatttttctccggacagtgtggcaaaacaggtaccggagttgaacaaattgctggaactacgcgaagtgctaacagcattaaaagggccactgggtaatctgcctgcatttcgcgcccagcttcaggcattgctggaaaatgaagaatcccgcgaacagttactgcgggagatcagccaggcagaaaaccagtaa

SEQ ID NO: 397852 - DNA, 207 bp, Salmonella enterica
atggagcgcttcttccgcagtctgaaaacagaatgggtgccagtgaatggttacgcaggcaaggacgaggcccgacagcaaattaatggttacatattgaactactacaatagcgtcagacctcaccattataacggtggtctgacgccggaagagtctgagaacaggtaccatttttactgtaaaaccgtggccaatattacttga

SEQ ID NO: 397853 - DNA, 213 bp, Salmonella enterica
atggctaaaaaaccactaaaaatctccccggtgactccgcgtccgctggaagtgacctccaccgatcaccagatcggcagcgtcaagcccattcagatccgtatcgatccactgctacaccgcgaaataaaaatcgccgccacggaacaggggaaaacgatcaccgcatttttgctggagtgttaccagttctggcgcagaatgaatagatga

SEQ ID NO: 397854 - DNA, 468 bp, Salmonella enterica
atgaaaacaggcattcatgcaaaactgaaatggctcatccggcctgaagcatcaccttctccatttcccatttctcctgcgcaggaaacacccgcaggctggtttaccccacaaaccgctgacacccttctggctatgccattgcgccagagcctgatgaaaattatctggcaacgaacctcactgtccggctcgctgtttgcagaactgtatcaggctcccgtcttccgattcgcggggctggtacagcaattgcctgcgtcggaatatcatcaccactcacatcccggcggactgcttgaccatacgctggaagtaatggcattcgcggcaaagctacgccaacgtcatctgctcccggcgagcgctgcaccggaggatcaggcgcgggaagccgaagcctggactgccgggtattatttacgcctcgctgttgcacgatgtggggaaaatcgccaccgatattga

SEQ ID NO: 397855 - DNA, 933 bp, Salmonella enterica
gtggggaaaatcgccaccgatattgaggttatgaccgataacaaccagatctggcatccgtggcagggtctgttgcaaaaaaactaccgtctgagataccacaaaaaacgcgatcaccagcttcatccggtagcaggaagcctgctggctgcgcaaatcctccccgctacagcacttaactggctggctcagtatcgtgaactgtatgaatcatttttatactgtatcagcggccattatgatcgggccggaattctgggtgagctggtacaggaagcggatcgcgcatcggtggcccaattcatgggagcaaatgccagttccgcactggagcgtccgcagccttcactcgcaaaacagatgctgacggcattacgggaactggtgcaaactcagtttaaactcagcaatcccaattccggctccgatggctggctgacggaagaagcgctgtggctgatcagcaaaaccaccgccgacaaaatccgggcgtggctgctgcaagagggcgtgaccagcgtaccagacagcaatatccggttgtttgacgaaatgcaggcgtacggcctgattgttccgacgctggaaaaaaaagccgtctggtcatgtcacatcactgccgaaagcggctggtcgccgggctgcccacttacattgcttcgattgtcgccgtcgcggctctgggcctcaccagaggaacgacctacgccatttgccgggaaggtcgaacctgtggcggataatactgaaaatgcaacccctgtggatacaacacaatccgcgccagccactaagccagccaattgtgaattagccgatctgacgttttccctgtttgcgccgcaggaaaccgggactgatattcctcagactgttgaggaagacaagactgtacattcagcgaaaatatctgccaccacccgctggtgttga

SEQ ID NO: 397856 - DNA, 165 bp, Salmonella enterica
atgcccgaacacatgcagaactacgtttatgtgaacaagtttcaggtcaactacttccaggatgctggcaacagcacctctctttttccgtcaggacttcattgtaaccacatgaatttaatagaaacacatactgttcgtaatagaatactaagtacagcttaa

SEQ ID NO: 397857 - DNA, 453 bp, Salmonella enterica
gtggtgtacgactttggtggggtgcaggtgcgcagttttgtgtacgacccggcgtatccggggcggatgacgggccaccgttacgcgggcagaccgcggatgcgctaccgctatggtgcgtcaggccgggtggaaaagcagttaaacccggaaggcttaagctaccgctacgcgtatgaaaaaaatcaggtggttgtcacggacagcctgggaaggcgggaggtgctgcacacggaaggtgaaggggaaggtggccaggaacgggtaacgtcgctgaccaatgagaacgggagtcacagcgactttacccgggaggcactggaccgcctcacacagcagcgtgctttgacgggcgaacgcagcgctacggctatggcttggccggacgactggtgcgcatcagcgggccgcagcagacccgggagtaccgctacagcgaagccggacgcctga

SEQ ID NO: 397858 - DNA, 465 bp, Salmonella enterica
atgataaagattgtattaagcttatttctgtttttgtatgtggggatgggatatggaaaagaaaaaaacaacattagcacattatgtgatacggatattataaataaattagagatagtttattatcctaagtatatttctactaacgttgcaatgagtgctgaacagttgatgttacgttatatatataaaattgagataaatgatgtgcaggatacacctttccgtgatgagataataaaaatgctgaatgttggttattttgaacgtaaaaatactaatgatatacgatggggggttcgtattgtttctgaaaaaaataaaatttgcaatttatattttgatgatgctggtatctgcggaaagatagatgatatgaatgtgtgctttaaaaaaaaatctattatagaatgggttgaaaatagagttcctttgtttgttcaatatgataatcacacccaatga

SEQ ID NO: 397859 - DNA, 1269 bp, Salmonella enterica
atgcacgacgagcggacgcaccggtacgaatacgacagccagcaccgtctggtccgttatgtgcgcacgcagtacggggagacgcaggcggaggggcggtatatctacgacccgacgggccgccgggtgggtaagcgggtgtggaaacgcgagccggttcactggagtgaaacgcgaacggcgctgtcggcgaggccgtatgagacatggtacggctgggaaggcgacaggctgacgacagtgcagacacagcagaaccgcgttcagacggtatatgagccgggaagcttcacgccgctggtgcgcatcgagaccgacgcggcggcgctgcgggcgatgctggacaggctggaggacgagctgaggcgtgacgcggtgagtgaggcgagccgggcatggcttacgcagtgcgggctgacggcggagcagatgaaaaatcagctggagccgcgccctgagccggagaggaaagtgcatctttaccactgcgaccaccgcggcctgccgctggcgctgataagcccggacaacacggtggcgtggcgtgcggagtatgacgagtggggcaatcagctcagtgaagagaaccctgagcacctggagcagcttatccggctgccgggccagcagtatgatgaggagtcggggctgcattacaaccggcaccgttactacaatccgggacaggggcggtatattactcaggatccgattgggctgaaaggtggatggaatctgtaccagtatccattaaatccagtgattggtatagatccgttgggattaaaatttgtgatcgagggagatagaaaagattttgacgcagctatcaattatttaaaacaagattcggaaatgaaaaaaatcattactgaaattgaaaagtctgaaaaatatactataactgttagttgtaatagtgagcatgataattcatataatgcttggacgaaaagaattcactgggatcctaaaacagctatatattgtgatgatacggaggagcataattttgattttaaaaatggaacccaagttcctgcgttctcattaggtcacgaaatcgcacatgcgcatgaacatatgaagcatgggtatagtgcatatattaaaagatctaaaactcctgattcacaatatgatgatgcagaagagagacgagtaattactggtcctgaaactcacgcagcaaaaactttgaaacaatgcgtcaggaagaatcacggtggtattaattatcactccagcgggcctttggagtatttatga

SEQ ID NO: 397860 - DNA, 942 bp, Salmonella enterica
gtgcagttcccggcggcgctgagggcgatgctggacaggctggaggatgagctgaggcgtgacgcggtgagtgaggcgagccgggcatggcttacgcagtgcgggctgacggcggagcagatgaaaaatcagctggagccgcgccctgagccggagaggaaagtgcatctttaccactgcgaccaccgcgggctgccgctggcgctgattaacccggccaacacggtggcgtggcgtgcggagtatgacgagtggggcaatcagctcagtgaagagaaccctgagcacctggagcagcttatccggctgccgggccagcagtatgatgaggagtcggggctgcattacaaccggcaccggtactacagtccggggcagggacggtatatcacgcaggacccgattgggctgatggggggattaaacccgtatacctacccattgaatccggttataaaggtagatccattaggattatcgtcctttattagcaatatgggttatggagttggtgaacgatcttcactcggtttgtatatgtgtgaaaatggagaatctccagaagatattgctaacgctatgtcacctccacctccaagacctagtgctacgggagagtgccgagcttcagtatttgctgcggcaggcagtggtatatctggaacaatttcggtcaatgaaaaaacaggtccgggggggctaatgagctttccagtagctgctgttggcgcccgagcttctgctacctgtggattgaagtttagagaccctgatgccaaagatttaaaagttaacgcaggggcttcttttgggttagggatctttagtattgagataagtcaaacatcaacatggcctgaagtatatattggtgttggtgcaggtatcggtccagaagtaaaaataccatatacaccaagtgtgtctgttccagtattttag

SEQ ID NO: 397861 - DNA, 594 bp, Salmonella enterica
gtggacgcagggtacttcacggcagcggtctgtcacctgacgcaggaaatgggcgttgcgctggtgccggggtaccggcggtcgaataaagggcagaatgcgtaccagaaaaagcacttcaggtatgacccggataaggatgtgtatgtgtgtccggcaggggcggagctgagttacggcaccacggaccgcaacggctaccggcattaccggtcggacaaagcggtctgcgcggagcgtgataactgcacgaaaaacagccagatgcagaagacgataacgcggcacgtatgggaagaggcaaaagagaaggcgaacgcgctgcggctgacgaaatggggaaaaaaggtgtacgcgcggtgtaaggaaacggtggagcgtagcttcgcggacgcgaaacagcatcacggacaccggtatgcgcggtaccgtggactgatgaaagtgcagatgcagtgcctgctggcggcgacggcgcagaatatgaagaagatggcgctgctggcgctgttttacgggctgttaatgatgctgaaacggtggtcagaaaggcttcggtggtcgatatggtctgagcaaagcatggcagggtaa

SEQ ID NO: 397862 - DNA, 441 bp, Salmonella enterica
atggatctttctgcccgcagggttatcggctggagtctgtcagcaaatgccgatacggcactgataagcagtgccttgcggatggcctgtgagacgcgtggtcaggcgcgagatgtcatgttccacagcgaccagggaagccagtatacaggcctgaaatatcaacaacttctctggcgttacagaataaaacaaagcgtcagtcggcggggaaactgctgggataatagccctatggagcgcttcttccgcagtctgaaaacagaatgggtaccagtgaatggttacgcaggcaaggaccaggcccgacagcaaattaatggttacatattgaactactacaatagcgtcagacctcaccattataacggtggtctgacgccggaagaatcagagaacagataccatttttactgtaaaaccgtggccaatattacttga

SEQ ID NO: 397863 - DNA, 486 bp, Salmonella enterica
atgagaaaagacaagatcatagattatattcagaaaactttttctgaatacccagactatttgaaaaatggggtcgttgatgaagacaacattacatattgccatgatgctataaaaattttttctggaaagagttggattgaattaatggccagtgatctttaccattctgaagatgctgtcatgtgtataaccaaaccagcattttcatattatattgcagcctatttaaaactttttattgaaagctattacgaagctgatgctttagtagatactatcttaaatatgctcatacctcctgttaggaatggtatccccagcactacatggatcgtaaaaaatcttgattgctttagttataataaaaaagcagttatctcttttacactccaatatttgtgtgaaaaatataatgataaaaatgctgaaaaggcattaaatatatactgggggcagtatcttaatgaatcattgctcatttaa

SEQ ID NO: 397864 - DNA, 870 bp, Salmonella enterica
gtgagcgaagaaagcagggcatggcttgccggatggggggggctgacgccggagcaactggaggtgcttcctgagccggagagaaagctctatctgtaccactgcgaccaccgtggcctgccgctggcgctgattgacgttaagggacggattgcgtggcgcgcggagtttgatgaatgggggaatgtgctgctggaggataaccccgataacctgcaacagctaatccggctgccggggcagcagtatgatgaggaatcggagctgtactataaccggcaccggtattatgatccgggacaggggcggtatatcacgcaggatccgacagggctggcaggtggatggaatttgtacaaatatccactaaatccagtatcaggaatagatcctttaggactgtcagggatggactcacttaatttatttcttagtcagcctggattgaagtctgaattaatgaatgtaatgtctagtgagccttggtatatgaatgagggagcttatagtattcttagcaagacccacaatgatatgaaaagattgaatttagctgatagcgatcagttttttcattgcagtgcattttgtcgcgtatctaaatcaagagccgcatctgggttatatgcaacatttctgggtgggttaaaagaaaaaagagatgcattcttaaataattttggattgtatggaaaaggcggtttatctccatatgacatggcaatggacaatgcagcggatctcaaagttaatatgcacggcattacatgtccttccgagcaatcgtgtcctgataggtgtaagcaatatataaatcctacacataaaaatacaattaatgtattaattgaagaaggatatcttgagtaa

SEQ ID NO: 397865 - DNA, 735 bp, Salmonella enterica
atgctgcgggaggataaccccgataacctgcaacagctaatccggctgccggggcagcagtatgatgaggaatcggggctgcactataaccggcaccggtattatgatccgggacagggacggtatatcacgcaggacccgattgggctgatggggggggcaaacccttatacgtatccgctgaatccggttatgaatatagatccactgggtttggcaggtaatccagcaacagctacacatatcgcctaccaaggaatggatatttgtactggtaaaccatattccggatatgcaagtatgcaaggaaaacagtccgctatggatgttctggcttatcgctatggtggtaattatgaacgctttggaggtatcccaccagatattagttattcagattacggaatggatgctaaacatacagcaagaggaattgaacaacgccagtttgagtcaaatggtggccttaatggtactgcaaataaacaaaaccctgtaggcattaataacccaaatagggcatcttacctgagcaaagcggatcaatacttgggaataaatagcggaatagctaaggggattagtggattaagtttcgcgttaacagcactacatatgaattcacttaattcatgtaagtatggtagtgttactcaatgcttttgtgctctagctagtgaagtggaaataggttccgaagtggcagataaacaatgttatggggaagtttactaa

SEQ ID NO: 397866 - DNA, 606 bp, Salmonella enterica
atggctcgcattgtatggaagtctaaaaacttagtcaacattaagttacgtgatgatttatatactatcgcacagatggaagatggttcaattttgcgatgctttaatatctttaatactaatgggatatggcatgatatagatcttaacaatacaattcaaattttccgagtatatgttgggagaattgtaaatcaaaaactagctgtttgcagaataaaagattcaacagttatccccagcactcaatcattagatctttactggataaaaccgtatacacgtctagatgttcaatatccaggcgatgaacatagtttcccatttttaggtggtcgattaattcgtatgaatgtaaaaacgtactctactgaagaaatagaaacaatacaacatgatttatctccagttaataataaagaaataattgaaaaatatgaaatgacaaacatgtggggacataacgatttgggtgatagattgcgtcgttattttgatacgggcattaatcgtgatgatcttaagttcgaggttttcccagggttatggaatgatagagagagtcttcggccattaactcgtcgtctcccaataccattacgttaa

SEQ ID NO: 397867 - DNA, 1005 bp, Salmonella enterica
atgcaaaacgttacgcttattggtatcgatctcggtaaacattccttccatgtccactgtcaggacaaacatggcaacgccctgttgcgtaaaaagctttcccgcactcagttgattaattttctcagttcctgccaggctgcgacagtggtgatggaggcttgtggcggcgcgcactttatggctcgccggatcactgatttaggtcatgaggcgaagctaatttctcctcagttcgtccgcccttttgttaagagtaacaagaacgattttgtcgatgctgaagctatctgcgaggccgcttcccggccctcgatgcgttttgtaaaaccccgcacagaagaccagcaggcaatggcggcactgcatcgggtgcgggactcgctgatacggcaacgcgttaaaaccaccaaccagatgcacgcttttttactggagtttggtgtcagtctaccgcgtggtattgccgtgatacggcgtctgaccgttgtgctggaagaaaatgacttcccgccttacctggcaagggttttgaacaggcttcatagccattatatttatctcagtagtgaaattgatgaaatcgataaggaactaaaaacgcatcttgcggaggatgaaaccgcacagcgcttactgaccattcccggggtcgggcctgtaacggcgagtctgttagccacgcggctgggagacggtaaaaactatgccagcagccgtgattttgcagcatcaaccgggctggttccccgtcagtacagcacgggtggaaaaacgacactgatgggtataagcaaacggggcgataaaaatctacgacgactgttggtacagtgtgcacgggtctttatgcagcggctggagcacaatccagggcgtctggcagagtgggttaaaaggcagcttgccagccatcactcgaacgtggtggcatgcgcgctggcgaacaaactggcccgtatagcctgggctgtcacggcacaccaggcggcgttcagtaaataa

SEQ ID NO: 397868 - DNA, 738 bp, Salmonella enterica
atgatcgctcaggctttgcgcctgcatcagaccacggttgatcaccatatctgcgagtttctgaacaaagggaagctaaagcccgaaaatggtgggtcggtcagcaaactcagtgctgaacaaacggcgttgttaatcagccagttatccgggcatttgtttcaccatacccatgagattatcgcgtttgtcgcccgcacatggaacgtcgttttcagcgttccgggaatgaacaagtggctgcatcgtaatggtttctcctacaaaaaaccgtcaggcgtcccccataaattcactgaagagaaacaaaggccattcattgaatattatgaggaactgaaagcaaccgtgggtgatgaaccggttctttttattgatgcagtccatccgactcaggctactaaaatcagctacggctggatacgcaaaggccagaaaaaagcggtaaaaacaccaggcagccgcacacgcctgaatatcatgggggcgctgaatctgaaagcactgacgtctccgctaatctgcgaatataaaaccattaatgaatataacgtatcccgttttttcaatgagatacgtaaggtttatcctgattataaccagaaaatccatgtcattctgaatggagcaggttaccaccgttcgccgttagtaaaagactgggcggaagtggtaaacatcaggctgcattatcttccgccttacagcccgaatctgaatccgatagaacgaatgtga

SEQ ID NO: 397869 - DNA, 594 bp, Salmonella enterica
gtggggctggcggggggatggaatctgtataaataccccttcaatccggtgctgcgggtcgacccgctgggattatttgaagatttttctgcttttacaaatgcccccggaattcagtatgaattgacgaaagcgatgttcgctgatccatggtatacaccaaatccatcagcattttctggtccgccgagagggaaaattattggaaaaatagatagtgttgttccatctatttcatatgtggattttatgggattagaatccgtggtaaaacaggctggattacaagattacattgctgatataaaatttaatgtatcaggaagtttggatgtggtactaacgtgtaaagctactgatgatagtggtcattcggaggagtggaagaggggagtaacggtgtcggtggaaaatatgccagtaaaagttccatataaagaaccctcaattccaataccgggtatgaaagaagctattttgtttgataagattttgaataccgggcagtttataagtcagtggcatgaagaattgttggcgtatggtggaaagctcattgatgcaccagataaaatttgcgcgagcaattattaa

SEQ ID NO: 397870 - DNA, 279 bp, Salmonella enterica
atggaaaaaccaacggtagaagatgcggaattaaaaaatattattgatgatctctatcgcccgaatgcaaaagttggtagcggaagcactgcggatgcggtgcgttatgaattgtcaactggtgagaaagtcggcggtagagggcatattcagaaagccgagcaatattccgaatcgttacaacgttggttaaataaaaatccgtcagcctctccaggtgatcgggcggcggcagagaatgtattgagagacctacagcgagctttaaggggagagtaa

SEQ ID NO: 397871 - DNA, 138 bp, Salmonella enterica
atgaagagaagaatgaactgggtggggctggttcgccaaatggatggggtcctgaagatgaacaagatgcgagaaatcgtgaacaacatgagcgatataaagatgaactgcgtcaacaaatggaaaaaccaacggtag

SEQ ID NO: 397872 - DNA, 594 bp, Salmonella enterica
gtggacgcagggtacttcacggcagcggtctgtcacctgacgcaggaaatgggcgttgcgctggtgccggggtaccggcggccgaataaagggcagaatgcgtaccagaaaaagcacttcaggtatgacccggataaggatgtgtatgtgtgtccggcaggggcagagctgagttacggcaccacggaccgcaacggctaccggcattaccggtcggacaaagcggtctgcgcggagcgtgataactgcacgaaaaacagtaagatgcagaaaacgataacgcggcacgtatgggaagaggcaaaagagaaggcgaacgcgctgcggctgacgaaatggggaaaaaaggtgtacgcacggcgtaaggaaacggtggagcgtagcttcgcggacgcgaaacagcatcacggacaccggtatgcgcggtaccgtggactgatgaaagtgcagatgcagtgcctgctggcggcgacggcgcagaatatgaagaagatggcgctgctggcgctgttttacgggctgttaatgatgctgaaacggtggtcagaaaggcttcagtggtcgatatggtctgagcaaagcatggcagggtaa

SEQ ID NO: 397873 - DNA, 417 bp, Salmonella enterica
atgccgcagctggctgcaatgttggcggattctctgcagcgacactatgtggttttggcggtagagcaggtggatttcgcggagaaggcgcacctgatgccgcaatgggttgtaatgccgcagctggctgcaatgctggcggattctctgcagcgacaatacgtggctttggcggtacagcaggtggatttcgcggagaaggcgtacctgatgccgcaatgggttgtaatgccgcagctggctgcaatgttggcggattctctgcagcgacaacacgtggctttggcggtacagcaggtggatttcgcggagaaggctcgcttggttgcattttttttggggggtgtaatagattttttagcccatcatgaggatctgcttgtacctgtcgtgctaaagagtgcatcccctgattag

SEQ ID NO: 397874 - DNA, 264 bp, Salmonella enterica
atgttaaagagtgacggaacgtcttcagtcgaactcgagcagataccgcaacgagtgctctttgagatcggacgtgcgagtctggaaattggacaattgcgacaacttaaaacgggggacgttttgcctgtaggtggatgctttgcgccagaggtgacgataagggtaaatgactgtgttattgggcaaggtgagttgattgcctgtgggaatgaattcatggtgcgtgtcacacgttggtatctatccaaaaatacagtgtaa

SEQ ID NO: 397875 - DNA, 429 bp, Salmonella enterica
gtgcagttcccggcggcgctgagggcgatgctggacaggctggaggacgagctgaggcgtgacgcggtgagtgaggcgagccgggcatggcttacgcagtgcgggctgacggcggagcagatgaaaaatcagctggagccgcgccctgagccggagaggaaagtgcatctttaccactgcgaccaccgcggcctgccgctggcgctgataagcccggacaacacggtggcgtggcgcgcggagtatgacgagtggggaaacctgctgagtgaggagaacccggaatacctggagcagctgatacgcctgccgggacagcagtatgatgaggaatcggggctgcattacaaccggcaccggtactatagtccgggacagggacggtatatcacgcaggacccgattgggctgcagggaaagatcacgtaa

SEQ ID NO: 397876 - DNA, 183 bp, Salmonella enterica
atgtgggcattaggaatgttaacagaagaaattggcggtattggtgctggattatgtcttgccacaggaattgcgtcgggtatagctggttcaaacgttgcggaaggtgtaggtgaggatgcaggagaaaaatatagcaaagaatatggagatgtcatatatgaaaaactttttaacaaataa

SEQ ID NO: 397877 - DNA, 174 bp, Salmonella enterica
atgaaaaaatcaggagagaacgataagcgggaggggcgaaagccgggtaaacggccttacaacccgatgcaaaagccaccggaatatcacggatggctatcggtgaacgaccttcgaatccttgaacgggcgctattggcctgggagccgatggggatgcagggctttccatag

SEQ ID NO: 397878 - DNA, 186 bp, Salmonella enterica
atgcaggtgcaaaggcggcctcaggccgcgccgcgcctggcgctggcagggagtgcaggagcgagaaaacgcatgcaaaaccatgcaccttatggatgcatggcttatttcgttaaaaatagcgggatttacgaggattttttgacaggctactgcgcggccagtccggcgcgtcgacgggtgtaa

SEQ ID NO: 397879 - DNA, 243 bp, Salmonella enterica
atgatacacaacgctgtgagttatgatgctcaacatattacttttgtcaatgcatttaaagagttagacatcgatatcaaaaaaaattattgggatacaaagggaaataaagaattagatgaaattaaaaaacacatcaaaagttactatctcttggcgcaagattacagatgtccatactgccatcaaaaaaatactcgtagctcacaatggagcatgggataccgaacacatcattcctaa

SEQ ID NO: 397880 - DNA, 1428 bp, Salmonella enterica
atgatcttatgcagtgatggggaatttttgtcactagtaaaaataatggataaccaaatgatagaaagtattattctacaaaataaaagccttaatttcgttattgaaaacgaacgcaaccatgatgcaaatatatttactgtaattactgggaagaatggcgtaggaaaaagtaggcttttgagcatcatagcctctcattttttaaataaagaagacgagggtcgttttgtaaaagatcgaaaagaacataatgaaaaacaaagctatgaattgaattatacctccccccctaaaaaagtcattgctgttgctactagcgcctttgataaattcccagtaccaagaaggcgagaaattattaacgaatactcctatctcggcttgcgaggtcttcctagctttgatttgagtgctgagtatatttcaaaaatcacattcaagctcatatcagcagtgaggaatcgagaacttgatatgagtagaataggcaatgtattaaattacctaggttactacgatgagattgaaatatctttaatttcacgttactccgagaaaagaattaaagaaattgctggttccggcaatgtttacgcagccttcgaacaacgcttcttacgcgagatgataccatttgcttcgattaacaaaagtttatttataaatgaggatggcaatatcataaaagaagctgtcgactatgcttttgatgctatgtctaaacatacaaaaaaaagacaggggatagcaggaactataattataaataaagatggagctaatcttgttagtgaggaagcattcctcgatgatgagttcatgttcttacttgaagctggaataatatcaactagaaatgttcatttacgaaaaaacaactctaaaaaaacatttagcatgaaaaatgctagttctggtgaacagtgcattttgatgagccttttaggaattgctagtcagattactgataactgccttatctgtatcgacgaaccggaagtttgcctccatcctgaatggcaagaaaaatacatttcaatattaatggacaccttcaaagattataaacattgtcattttattattgcaacacactctcctcaaattacatcaaaactaaatccaacaaattgtttcattctatcgctacatgatgagagaactcacagttcagcagaagtaataaatcgttctatagattttcaattggcaactctttttagagcgcctggatttaaaaacgaatatttaactcgtgagttggttaattttcttgccgaattagccactgaaaaatccattaacaccaaaaaactaattgaaatcgaaaagataacaaacctcaaacctctaataaacgatgcagatccagttaaaaaattaataaccctagcagaaaaagcaattagggaagcaaaatcatga

SEQ ID NO: 397881 - DNA, 882 bp, Salmonella enterica
atgtctcgagcaacaaaaaaagatttatcgtggtttgaccttaataactacaatttcattaacaaattaactctctctgaatttatacaggaacttgagtggagggaattcctttataggaatgttaatgaagactctttaatttttgatgatgaatatgaagttaaatatcaacggattttctcaggggatccaaatcttgatgtcccaaatgaggaagaaaaagaaatcagtgagttcattaaaagtgtcaatgctcagggtccttccttaaggactatgtatggcgagcttccaaaactatcttccagcctaggtgtcagtccaattacttttactgagctttcaatgtatgggtatagtgctatagaccaaggtttcttcaaaagagatgaagagtatttttacattaaaccagaagcgatgcttgcaagtgttactggtaacttaaaaaagtgctttactgatatggtgctattgtcagtgaatcttgatgatgcaactgatgaagaaatactggtcagcatgagaaagctccttcctttgtggagaaaacagttggagttacctgaacatgctcatgttgctccaaaaaaaattggagttaaaactttgcagaagttaattacaaatagggtcctgcctatccttgacttgatcatttgggagaagcgattcgacaagatggttacaaacccaatgataggggttttagtttttaatgatgatcctaaagatactcagtccatcaaagaaaccatcaagccatttgcactagaggttatgactgaggagtatactcgtttacttcgtctatatatgaatagagatggcgagattagctcagctaaaatgtctgaattaatgagtagaattttgtag

SEQ ID NO: 397882 - DNA, 180 bp, Salmonella enterica
atgattcatattgtcgctatgcaatatacaaaatcatttaagttgcatcgcggcggcaaggctgcgaatccccaggagcttacattagtaagtgactggggtaacaaatctgtcaggaacagatttgaacgctgcttgcagcggccctgtaagggggaggcccagggatgggccgactaa

SEQ ID NO: 397883 - DNA, 327 bp, Salmonella enterica
ttgccgtttgggcaaaacgatctgacgcagttcagcgtaacctcgcaggcgttgtcggcgctgctgagcggtgtcgaaacgtcaacctcgtcttcgccgccgctacgctatcgggtggtgtcgcaaatcacgcgtcacagcgacaagttcgcgctttatatggatgcgcaaacgctgaattttactgcctttgcgaagggaacgttgctggccgaggagggggataagcgcgtgacggtgacgcatgacgttgaatatgttctctttcctaatccctctgtcgcctgcggattgcgggctggattaatgctggaaagacttccctga

SEQ ID NO: 397884 - DNA, 1518 bp, Salmonella enterica
atgcagggaaccgatattgccgacccgtatgtggaacgcatgatcgaggcgttcagctttctgagcgcccgtactcagctaaaaattgacgccgagtttccccgcttcacacagcgattactggaagtcgtcagccccaattacgtcacccccacgccatcgatggcagtggtaaaactgtatcccgatacacaggaaggcgacctggcgaaaggggtcaccgtaccgcgcgataccgcgttcatttcccccatcccggaaggcgaaaataccgcctgccagtttcgcagcagccaggacgtcacgctgtggccgctgtccatcgaggaggtacgcctgaccgccgcgccgccggatatgcccgccctgcaccgctatctgccgcctaatattcatgtcgccggggcattgcgcatcaccctgcgaaccttcggggaactgactttcagcgagctggccggtccggcacggctgcccttttacctctgcggcgaagaacgcattgcgtcacacctgtttgagctgctgcataccagcgccgtcgccacactggccggtgaacccggtcactttgacggcgaactgaatgtgaatcttcaacacccggtggcgcacgaagggctggagccagggcaggggctgctgccgctcgcctggaacgtgtttcacggccataatctgctgcatgaatttttcgcctgcccggaacggttttacttcttcaccccgaccggattgtctaccgggttacaaaaggtgcagggcaatgtggcggaaattgtcatactgcttaaccgcctgccgccggactggctgattcatcagacggacgctgcacagttcagcctgttctgtacgccggtgatcaacctgtttccccgcaccaccacccggattgaagtcactcacagcgtgacggaacagcatctggtagtggatcgtacccgtccgctggattacgaggtgttttctgttcaggaagtcgaaggcctggaagcggaaaccacacggaagatgatttttcgtccgctgtatcacacccgtaataatgacgaaggcaaccacgggcgttatttttcactgcgtcgtgaaccgcgccgctcgtcagaaaacgcccgccgctatggcacccgaaccccctataccggctcggaaatcttcctgtcgctggttgatcagcatgaagcgccctacccggaaaatctacgccatatcaccgtcacggcaatggtgactaaccgcgatctgccctgccttattccacgtaatggccgggatgatctgaccgtagatgcggcgatcccggtggcgggcgtgggtcttatcagaccgccgcgcccgccgcagccgccgctggctgaacgcgaaatggcctggcggctgatccggcagttgtcgtttaattatctgccgctggccgatctggatcaccgcaccggcggccaggcgctgcgcgatctgctgaatctgtttattccggctcacgacagcccgagtcgcgccaggtgcgcagcctga

SEQ ID NO: 397885 - DNA, 474 bp, Salmonella enterica
atggaatcgcaagctattctggatatgtgctgcggctctcgcatgttttggtttaataagcgcgatgaacgcgccgtgttctccgatatccgcgccgaagaacacacattgtgcgacggtcgccgcttggttatcagtccagacctcattgccgacttccgcgcattgccgttcgctgatgcgttgtttcctgtcgtggtatttgatccgccacacctggagcgtgtgggccagtctgcctggatgggtaaaaaatacgggcgcctgaataaaaaaacgtggcgttctgacctccgcgccggattcaaagaggtgtttcgcgtattgcggccacacggcgtgctcattttcaaatggaacgaaacgcagattccggtaagccagattctggcgctgacggacgtaaaaccaattattggccagcgcaccggaaaaggtgacaaaacccactggattatttttgtgaagggctaa

SEQ ID NO: 397886 - DNA, 465 bp, Salmonella enterica
atgcaacaggtaaaaatttacaccgcatccccatcagatttatccccacctgtacagtctgaatcgttctgtgtggatctggtgctggcgtcggattatcgggaactggaacagaaatgcgcggcgctggcggcggagaatgcgcatatgcagcaggtaatcggcgatgtgcaaacactctactacgaatcagacggcattgttggctatcacctgaacggtgacattgctaagtgggatgatgtgatgcctgatttatggtcagaagccccagccaccgacgcttttctggctgaggtgcgggcgcagggtgtggagatgttcgcagataaatacaggtcgcaactcaccgcattgccaacaactccagaaaatatttttgatgcagcgcatgtgagcctgcgttaccagatttttgatgctgacgagttcgccgcccagcttcgcaaaggagtgcagtcatga

SEQ ID NO: 397887 - DNA, 399 bp, Salmonella enterica
atgagttccaataacaccgttactcagcttcgtccaaatcaagacatctctcgccaaattggacaccacttcactgataatgcatactcacggcatggtggtggaaatggcgggggtaacatgcttgaggctagagtagcgaagcttgaagctgacgttgaaaacatcaaaacaaatctcgcagaagcaagagctgacatccgtgaactaaataaaaattacgcttcaataaaaacggatgtttctgttttgctgcaaaaaaccgttgaaatagatactgctttatctaaaaaaccaacagcagattcattgaaagtctggtttttaaccattcttctcttttctgtcgcaatgccagtgattacttttttgattaatctctatatgaaaaaatcgtaa

SEQ ID NO: 397888 - DNA, 306 bp, Salmonella enterica
ttgaacattgaaaagcacaccacgtggctggcctacctgtgggcatgtatcagtggtctgtttgcccagtggaccttaaacgattatggcgcgttgattggcattatcctcggtatcggaacgtttctggttaatcgccactacaaacagcaatcagcgcaggcgcagaaagagcaggtggcagcaatggaaaagcgcaaccagatactggagcaactcgcccgcaggccggaaagttcactgaaatcgctggtactgaccgcagaagaaccggagggcggtaatggcactcagaccgaagattaa

SEQ ID NO: 397889 - DNA, 489 bp, Salmonella enterica
atggcactcagaccgaagattaagatgctgctggcgggcggggccagcgcagtggccatcgcggcggcgatgctgggcagccatgacgggctggaaggccggcgctacgtgccttaccgcgatgtggcaggcgtactaacaatttgcgacgggcatacgggaaaagacatcatccccggtaggcgttacaacgatgcggagtgtgatgcactgctgaataaagacctggcacaggtcgcagcccgcattgatccactgattaagatcagtatcccgaacagcgaaagagccgcgctctactcctttgcgtacaacgttggtactggtgcatttgccaaatccaccatgctgaaaaaactcaacgccggggaccatgccggagcctgtaacgagcttaaacgctggacatatgctggcggtaagcaatggaaaggcctgatgactcgtcgtgagattgagcgtgaagtctgtttgtgggggcagcaatga

SEQ ID NO: 397890 - DNA, 1488 bp, Salmonella enterica
atgattgcaaataaaaataaaacacctttccattggttcttgatatctgtttttatatatttcacccccatcatcatggcaaatattcattatgtagatgatcagggaagagctatatgggggtatactggatgggctagggatggtagacctttggctgaaatgttgatgattgcattgaatttcaacatgcacataacggacttattcccatttcctgcaatattatcagtatttttgatatctgtttgcctgtatttttttagcaggatgtttatatcgacagataataaatttattgggctgttggttcctcttggtattttatcaagcccatttttaattgaaaatgcaatgtatcgctttgatgttttaccgatgttcataagtattgcattgtcattctcagttgtaatatttaatttcaaaaagacaattttaaatatttcttttgccgccctgttaacattatttatattgtctatataccaagcatcattaaatttcatgctggttattattctgtgtaaatatgtttacatgtactttaactcagatagtaacagacatctattaacttacctcatagaaaagacggtatcattagttataggtgttgcattatattttttggtggttattcctttgtttttaactgttgttggggacccggatcacccatcaattaaaactgaaggcattttttcagttatatatgaaaacttaaaattttatcttcattcaatatctagtggtatttttggggaatcaggacgagttgcgtttatagtaatatttttatttttcattgcaatgacgacatttatcgcgctaaagaaatcaatacctaataaaagtattactggcattattaattttttaattacaataacatcgccagtaacagctttgatattgtcttttgctactctattaccacttcagcatcacatcgacgccccaagagtgatgatcggtttttctgctacgatgttgttcttattcatgattgtttatcttttctcgcgagaaacaaaaaattcaataacatatatacttgtaattcctctggtttatgtttttggttttttatgttcatacacaaatgcaatgatagaagaaaaaaacataaccacagttctttttcatcagattaaaaatgatgctttcgagttaagcggaaaaacaaatcagatacttatttttaatggtaaaaagaaagacaatgatgtttttgtaaacgcaagaaataattatccgttaatatctagatttttcccagagtatttctataattgggattggccatttccttatatgaatagagttggagtttactttaaacaccctgggaatacaaacattgcaagtgtattaaatgaaaaaacattttgctcaaccgcaaagattaaaagagcatatgaatataacttatactcatatgatgatattattgtagttgattttgacaaaaacatttgtcagtga

SEQ ID NO: 397891 - DNA, 930 bp, Salmonella enterica
atgaaaatctcgttggtcgttccggtcttcaatgaagaagccacgatacctattttctataaagccgtgcgcgaatttgaagggtttcagcagcatgaagtcgagatagtcttcataaacgatggcagcaaagacgctacagaatcaattatcaacgagcttgctgttgccgacccgcttgtggtttcgctgtcgttcacacgtaacttcggcaaagaacccgccctgttcgcaggtctggaccatgctaccggggaggcaattatcccgattgacgttgatctgcaagacccgatcgaagttattcctcacttgatagagaaatggcaggccggtgcagatatggttctggctaaacgctctgaccgctccactgacagcaggctgaagcgtaaatctgctgagtggttctataaacttcataacaaaatcagcaaccctcagatagaagagaatgttggcgacttccggctcatgtctcgcgaagtagtagaaaacattaagctcatgccagaacgaaacctgtttatgaagggggtgctgagctgggttggtggtcgaaccgatgtcgtagaatatgcgcgagcagaacgcgttgcaggaagcacaaagttcaatggatggaagttatggaacttggcgctggaagggatcactagcttctcaacattcccgcttcgcatgtggacctatattgggttatttattgcatgtatatcatttacatacggttcatggatgataattgataaattaatttttggtaataatgtacctggatacccttcaattcttgtatcaatattgtttcttggcggcgtacaactaattggtattggtgtacttggagagtacataggacgtatttatattgaagttaagaagcgcccaagatatgttttaaaggatcagaaaaatgattgcaaataa

SEQ ID NO: 397892 - DNA, 828 bp, Salmonella enterica
atgaaaaaaatactctattatctaaattactggttcaaaaaaatggtaaagataagtgatggttttcttgatggtaacgcaagatcattaatggctttattttttatatacagagaatcgcatcaacatcttgtaaataatgttaataagtattttttggacttgttagataaatatgaaatgacaaaagatgattgggttatggtgataggagaaattcgttattttttatataatgaaattgtaggtcttctttccatagtgtttaatgatatagataatatgattgattcaaataaatatacagagaaaagcaaattaaagaatgttataaattacgcaatgaataatcatcgtatttcaattagagcatcaacccttgatagaattacggaagattattataattatatcaatcatgatgttgaaatcttaagcactcctttaggtgagcgttattatatagtagaaagttatatatctgactttatgaattacatgtcagattttttattgactataatttatgatgttaaaaataaaagaaagaaaaaacgaggggcaattagtaaaaataaatcgttaaaagagaaagtttttgcgatagtaattgctaccgttgaaaaaataccaaatatttctgactttagattaacagtcgctattgaggaacatttttcaaagcactccaataacgtttctcgaaatacttatcttgcctggatacaagaatgtagagaaagcatgggcattgagtgcagtgatttggatacatataagaaatcattttcgttagttattccatatgaatcaccactaacctattga

SEQ ID NO: 397893 - DNA, 1062 bp, Salmonella enterica
atgccattacctttaagagaatattaccctatagggcgggcggctgagttgcttgattgtactcttgatgatttgattcattgggctataactaaacgcatttcaatgtatataaagatagattctgcatatggaataatagatgagtacccaatcacggagcttctaggcagaactgattttagtgatgtgttaagcggaacgacgcacaaagaaaaaattattgatttagatgaggaactggaaaaggatgattgcgatttagtcgagtactgcaaaagaaaatctataataatttataaagccatggaagaatattcattaaaacatggtggggtagattctcttaatgaagtatatttaaaagaagcattttcattcttacattatttcatttatggtaagatgaaaaataatctttgtaaaataagcggtatagagccttactcgactggcattagtacttacgatgacgatgacgatgacgatgacgatgacgatgacgatgacgatgaatgtatttattatgataatgagtacttacgtagtgttattagttcagaatatgatgaacgtgccgtcaatatgcagggattctttattctaagcgacgttttttttaaagataatcactttcgtaactatttttgtgcgacaaattcgagtgatgggataaatctggtttttatgccttataatgatttgtttattaatgttgtgttagataatgaaaaaattattgattatgatgatttattcattgtgaaaaaagattttgttacgattagggatgcctcaaaaaatggtgatgatatttcagaaataaaaacaaaacaaatacctaaacgtgataatgataataatcatataaacaaaaatataaaaagaaattcagccactgcgaggttaattgcaaaagctctaattattaatcatcacactgatataaagaataaccctgcaaaactagcaggagtcttagaaacggagataaaagaggctaaactcggtaattttagtatttctaaagatacgatctcccgatggatgaaagaagattaa

SEQ ID NO: 397894 - DNA, 318 bp, Salmonella enterica
atgcaaaaaaacaccttcacaccgccaaccccggaacaacgttgcgccattcttgccgagtacggtaaggattgcgaagagatggttagggaagataagtgctgcaaaattacatcgctttcccgttctcgccgttgggagcttgagcaggtgggggcttttccacgccgcaagtatttagggcgtaactcttgctcctggttattgagtgatgttttgtggtggattcataacccgccaatgattgataacgtcaataacccttacgagcgcaagaaagagaaagcgctcaaagaagcacagcaagctaaccaataa

SEQ ID NO: 397895 - DNA, 363 bp, Salmonella enterica
atgctgattttccgcttgtcgtcagcttttcagacccgaagcgcacccttcctcaaaattcactgtttcacgccatctgcgggcgatctggctaatacccgtgtgcagtgggccggttcatcctggtccgtaccatcgtggaaggcaattctggtgtccggtcactctgttgcaaccggtggacagggaaaggtgattgcaggtctggaaggcgaactggtgccaattcgtgaaagtaccgccgcgatgggaataaagcgtatgaacagtctgattgagtacagccaggcgtttgcggtatctcagggtattcagctacgcgaggttcgctatagcggggattatttcgggcggctggtatga

SEQ ID NO: 397896 - DNA, 564 bp, Salmonella enterica
gtgaacagaagtctcgtttttgttgggatggcagctgtcatcttcatcgcggtgctctgtgtgctgctggcccgcagtaatgccgcgttggccacgtcagagagcgacaaccgggtactgcgtagcgacaacgcgctacagacggcggtgataactactcaggccttcaacttcaaccggtttaaccagatagcagagaataccaaccgccttaattcgataatagatgctggaacagagaaaaccatcattgaataccgggagattttacgacgtgaaaaaacctgtgatttgcctgttcctgctgatgtcgctggtgggttgctcaactacacgaaccgtttacgtgccagtgcaatgtactccgattccggggacgctgacacaaccggtgatagtcccattgcctcccgcgcgctgacgtactgccaagccgttctgtggattaatcctttattgtcggctattgaaaaggcgaataatcagttgagtagcatacgggatcttgaacgaaacagaggattagagctaagaaaaaacgtgagacctaacgtgcggttttaa

SEQ ID NO: 397897 - DNA, 444 bp, Salmonella enterica
atgactacacggaatgatgttatgtcagaagttgcagcggagctagccgagcagacttggcctgatttttatccaaaaggtgttcccccaaaaacggctgtggatgccgagggtgagttttatcgtttggttagagctaaccccccgactccaaattgtttcctttctacccatgaagagtatccgaatagacataaaaaatgtcgtggagaagctcttcagtgcgtatatggcacatcttttttttcagaagaaagaggtgctacagatgcaaaggctaagtttccagcggcgttaggtgatcgtaccgtcgctaaaggtaacgtaatgccattcatgggggtcatgaaaaagacttttgcggatcctgctcactatacaatatggcttacggtaaattgttctatccatgagcattttgcttgtttaggagaaggcgaatga

SEQ ID NO: 397898 - DNA, 1293 bp, Salmonella enterica
atgagtaacgtttttctgcctaatacaatgatggggactctgcgctataaaagggtgtatgagtttttcgaagagcctcgtttcttttcagcagagaatgaagttagttcattatttgttgtttattggattggtgaggatgaggacgccgatagctggtatgttatccctgtatcgccgacacgattggagttaattgaaagaaaaagaattgatttgcgttcagttttaattgatcaggaacaatcttttttctacgaagtacgcgctccttatgatcgggaggttgcacctacatggaatgttaaaggcgtagatgccgtctatgaaaatgctttaccagctcagggactgtttattagttctgtggttcctgttttagaaaatggtcgaatcggtgaagcaattaagtattcaacacatgagattcatttagaaaaaagctcaaagaaaagtgctggaaatttggtgctaagtcacgtttcgaatgtgtgtgatagctttagtgcgttatatgacagtttgctggagtttagcggtctcaaagacaagctacgtccagttgatgctcgtcctggttcgttcatcctttcattccaagctgaaaagctgaacgcctatgaagagattttacgtgatttgagcgttcttattgagcgtcgtgctgatatagtcgatttcatacaaaacaatgggatagatattcaagccttttctgatttgcttcagtctattgtatcgactggaacaaatatggaattaaaaagcaatcagactggtgaggttatatttctgttgactaaagcaggggctgagttctatcttagggtaatcagtaggatgtctgcacttgcagttagtggtcatcaaattccgcaggcagatactttagaaaaagtttttaaagtagttgaagtcaaatggagtggggagccttgtactgtagagaatacaggtttgcaagaaagacacgtttattattacctacatgctgcaaaggtattagggtttctgaatgctaatggcaatgtaactgcgatggggcaaaagttaattcagtctggacaagagaaccaatataaaattgctgcaagatgctttgaggtgagccatattggttgggcttggattaactggtcagaagttgagaatttatctcaaatagatccagatacagctgagaaatttttacttgaacagtgcaattcattaagtaaagacactattgccagaaggtcgcgaactcttagacattggggcaaagagcttaaggaaaaatatactccgctctaa

SEQ ID NO: 397899 - DNA, 300 bp, Salmonella enterica
atgaatatcgaagaatttgtgaatgaagataaccatatgtgcaatttatgcggagatcttttttacaagatctttgacccagaagtgatttacgacttacccaataacgagtttaataaacaaatcatttactggctcagtcagtaccttgtaggaaatttgagagaacccttagactcgatctctgagcttaatgcttccaaacagatatatgtttacgagacttggttctcgctaattaaatgtcctgatgaaatgaaactcctagcgaagcagataattttatatctattggactaa

SEQ ID NO: 397900 - DNA, 309 bp, Salmonella enterica
atgaaggaaacccttaataaatgcaaagatattcttggtggagaaaccataattgcatctactcgtcgtgaaccgctttcatccggcacagtatcaaggtattttatgcgcgcacgaaaagcatcaggtctttccttcgaaggagatccgcctacctttcacgagttgcgcagtttgtctacgagactctatgagaagcaaataagcgataagtttgctcaacatcttctcgggcataagtcggacactatggcattacagtatcgtgatgacagaggaaggaaatgggaaaaaattgaaatcaagtaa

SEQ ID NO: 397901 - DNA, 438 bp, Salmonella enterica
atgacaaaagacattgtcctgaatgcgcttctgatgaccgtgtggcgacgtcatccccaaaaaaaggtgctggttcagtctgatcagggtagtctgtacacccgctatgaatggctgtcgttcctgaaatcgcacggactggagggcagtatgagccgtcgtggcaactgtcatgacaatgaggttgcagaaagctttttccagctactgaagcgtgaacggataaagaaaaagatctacggaacgagagacgaagccagaagcgatatttttgattacatagacatgttttataacagtagacatcggcatggttcgagcgagcagatgccactggctgaatatgaaaacctatattatcaacgactcaaaagtatccaggttatccgtggcgattcataccacgaatgtatatgcacgcacgagactgtaatttaa

SEQ ID NO: 397902 - DNA, 267 bp, Salmonella enterica
atggagctggccaagcaccaggagtttaccagcaacacaggagtaaaagtttatttctgtgatccacaaagcctctggcaacgcggtacgaacgagaatacgaatgggctgattcgacaattttgtcccaaaaagacatgtcttgcccagtatacgcagcaagagttggatcaggttgcggcacagttgaacaacaggccgggaaaaacactgaagtttaaaacaccgaaaaagataattgaaaaaggtgttgcgttgacaaggtga

SEQ ID NO: 397903 - DNA, 762 bp, Salmonella enterica
atgaaacgtacatttacagcaaaagaaaaagcgtttgttttcgacttgtggaagagtggaacaggctttagtgagattgctaaagttcttgattcaaaacccggaattattttcaccatgttaagggatacgggtggtataaagcccaatgagcgcaagcgggctgtcgcacatctgacgttatctgaacgtgaggagatacgggccggtctgtcagccaaaatgagtattagagcgatcgctaaagcattgaatcgttctccttcgacgatctcgcgagaggtacagcgcaaccgtggcagacgttattacaaagccgttgatgccaataaccgagctacccggatggctaaaaggcctaaactatgtctgttggatctgaatgagccgctgcggaaacttattctggagaagctggaattaaaatggtctccggagcaaatatcagggtggttaaaacgaacaaagccacgccaaaaaacgatgcaaatatccgccgaaacaatttataagacgttgtactttcgtagccgtgaagcacttcaccatcaatatatccagcatcttcgccgctcgcatagcctccggcatggtagacgccatacccgtaaaggagaaaggggaacgatcaatatcgtaaatggaacgtccatccatgtccgttcccggcatatcggtaacagacgttctctgggacactgggaaggggatttggtctcgggaacaaagaactctcatattgccacacttgtggatcgataa

SEQ ID NO: 397904 - DNA, 129 bp, Salmonella enterica
atgagcggtaaatattatcccgaagagtttaaaattgaagcggtaaacaggttgttgagcgtggccattctgtttccagcgtcgcaacatgtctcgatattactactcacagtctttacacctggataa

SEQ ID NO: 397905 - DNA, 1458 bp, Salmonella enterica
atgaatttcaaaaaacaaattaaatttatatttgtgtttttattatttgcgtcattgtttaccctatatcattttaccagcttaaacatattcccaccaaatacagatgcagcaacagtgcttttgcttgggaaagatatgtcagaaggtaattacttacttcatggctggatactatctacggttcccttttactttacagaagtatctttttatgccattgcttctatattattgggatacagcagtgaattggcgtatataataccgccagcgatgtatgtcactgtgatttttttaatatacagactatctacaaataaattactagcattagcattaattatattctattttgctttaccagctgacatggctgttacctcaatgctttcagcatgcatccacatgggaacatatatatttatcatgggatgtttaatatttactgaaaagtatattaaaacagaaaatatattatttgtatacttttcaacgatattagcttctatggccatctttagcgataatatctcaatatatatatatgttgcaccactgacattatctgcaatgtttttattatacaaggaaagaacaaagaaatactttattataataattggattgttgtctgcatatttaatctctaaagcgattggctttttgtttttaaaacttggcgggtttacattgcccggtctgtcggatgtaaagattgttgagtatgacagtattttagtaaatataaatactgcagtaagcggcgcgttattattttttaatgcaaccgtatttggtgagcagataactccatcactgcatttattatctaaagtaatacgccttgcagggcttatagcattaatttacttcactgtgagaaatctttttaaaaatagaagtattattgatttatgtttgtcattgtcaattttaattatgacatctgcttatattggtagtaacctaccaagaaacatatggacaataagatatcttgttcctgtcttcattatggcagtaattcttttgtcaagaactaaatttaacaacaaaaaaatcatttacttaatagcttttttgggtgtcctatcaggcattaaaacgataagtattaataattttaacgataatagatataatcagatgtcgtgtattagagataaaatcaacgaacacaaaacaaattatggatacgccccttttgcatttaccaactctgttggtataaatggagacataaaaatagcaaacatatcttttaataatgagaaaataacaatagataactggcttacaaatagtgagtggtataacaaaagcaataatttttttattcttgagaaccaagaacaattgaatattgtaaagaaaaattacggccctcctgaagatgttgaaaccgtgtgtgatgtaatttttgtcaaatacagaaaccacattcacgttaaataa

SEQ ID NO: 397906 - DNA, 210 bp, Salmonella enterica
atggcgctttgccttaatctcttcgtcagaaagcccggtaatcatcagcaccatctctcgctcgatcccctgttccagcatcgtatgcgcaatgcgcaaggcttcctcctacttaccttgatgtataccttgctgtatgccttgttgcacgccttcacgcttaccttttctgcgccccgattctcgtattctgtctacgatcgtcattaa

SEQ ID NO: 397907 - DNA, 249 bp, Salmonella enterica
atgattcgcagtaacgttaagcgttggggaaactccccggccgtaaggattccggcgtctgttatgcaagcgctaaatctcaatattgacgatgaaattaaaatcgaactggttgaagggaagctcattattgaacctgtaactaatgagatcgaattttctctcgatcaactggttaacggcatcactgaagaaaacctgcatgatttgattgaatggggcgcaccagtgggcggggaggtctggtaa

SEQ ID NO: 397908 - DNA, 336 bp, Salmonella enterica
atggttagtcgttttgtgccggatgctggcgatcttatttgggttgactttgatccaacaaaaggaagtgagcaggcaggacaccgcccggccgtagttctgagtccgtttatctacaacaataaaacggggctttgtttgtgtgttccctgtacgacaaagacaaaagactatccttttgaggttgagttatcaggagaacgggacggcgtagcccttgccgatcaggttaaatcaatcgcatggagggcaaggggcgcgataaagaaaggtaaagtttccagtcatgagctacagctaatcaaagcgaaaataaaaacgcttattaattgttag

SEQ ID NO: 397909 - DNA, 270 bp, Salmonella enterica
atgctgctcaccatgaaaatattcatcactgaccaacaaaaagctgagcctgagcgtcttcatgactccagtcgtgacaagcgcgttaaagctattcttctggcttccgaaggctggagttcagctacgatcgctcaagctttgtgcctgcttcagaccacagttgaccaccagatcagcgagtttctgaacaaagggaagctcagatctgaaaacggtggctcagacagcaaactcagcgctgaacaaacggcttttttaatcagctag

SEQ ID NO: 397910 - DNA, 1113 bp, Salmonella enterica
ttgttagaggttttacgtgtagtaaccgattttggtgtagatatattttctataaaaaaatacaatgagctaagtggtaataaactatcattgctcaatttggttttaaatcaaaagattatttctggtttaatcgtgggagtaatttttttattttattgtttttttaatggatatgattatagaacttatttgccggttgtattagcactacctgtggcgttattctttaatttgtcaaatagctattttcaggcactcaatgataataaaaagctgaccttgccaattgttattgcttcaatagtaacttgctttgttttcattatgcaatatttgtctttagcgaagtttgatgcttgggattatttgtttgttgagtttatattcgttttctttgtctccgctaagctatttcggtttgtaagttttaagttctttaaaaatagcttttttaatttgttaaagtcaatctttattttatataaagcgaccttgagtattgggctcactgctgtagtagttataatttatagtagagtggataatttctacattaagagttttgctcctgatgatttagctgcatatggtcaaattttcaggatgattgatccacttgtaatggtatcttcagtattctctaccgtagcttatgcacggttttgtcgtataaatttgcaggaaaaatatgctttctcaaaagtttttcaattcctgctttgcattgtcgcttatggtgtatttagttctttcgtatatttttttattatgaaatatttgggggcgtatatagttattcctaatgttaataatagctatttaattgtggtatttttaattgttgcatttgtaaaatgtattaatggtggtactaccgcaataattcaatcacaagggtattataaaataggtttgtatatctcatatgtctgcataataatttcaattcctgtaatgtattttttagttaagatgcatggtgttaaaggtgctgcgatgactatcttgatagtggagagcatcagttttatattacttttatgtggattttttgtaattaagaaaatgcctcctaaaaaatttttcgatatttatacccgtgatcattga

SEQ ID NO: 397911 - DNA, 321 bp, Salmonella enterica
atgagcattcagtatgtgttaaaaggatatcgtatgtctgatataaattttgaagcactggggcgttgcgttcacctgaaacagcagatcgaattagctatcctgagacgggatcaggcttttgatgagttatctgtgtcgtaccagaagacggaggagcactccataagcgacagggttaagtttgctgatatggacaggatgcggggagcttttgacgaactggacaacgccaatactgagctgacgtcgctggtggatgagtacaacaagtgggcaggcaaggccagcaagagagaaataaaatttattggttgctag

SEQ ID NO: 397912 - DNA, 375 bp, Salmonella enterica
atgaaaaccggggtccagtttattaccgacgagaaaggcacaaaaaaaagtgtcattctatcgataagtgagtatgaaaggctcattagcgaagctgacagagacggagactatgagagtgtgccgtatgaagcgggagaacatgacgatgaaagtatcccccatgatgtagtttccattatggttgatgacgatgtgtcattactggctgcatggcgaatttatcgaagaatgacacaaaaagaagtggccgacttattgggggttaagcagtcagcagtatctcagtttgagaaagtcgaaacccccagaaaagcgacactggaaaagctggcagaaatctatgattgtcgtgttggccagctagcggactga

SEQ ID NO: 397913 - DNA, 234 bp, Salmonella enterica
atggccaaccgcaaaccacgccgtacccacactgacgctcagcgtattcatactcataccgaaatcaatcatcgcctgtaccgtgcagaagcactggcacggtgcttatggcttgaatccatcagcgataacagcgttgtggtggagatgtgcatttcatccgttctcagttatctggctgacgatctacgcgacgttcacgacctgtttaacggcaaaaagcacagcacgtaa

SEQ ID NO: 397914 - DNA, 207 bp, Salmonella enterica
atgaaaaaacaaatcgcagaagcaaagattttagacaacaacggaacctactttatcaacggctccattctgcctgtttatttaaatgaagacggcgatacatacctgattgaggaatacgagaaaggagagccttgcgaacacataattaaagacctgtttgctgatggcgtattggttgctgtcaatccaattggatataactga

SEQ ID NO: 397915 - DNA, 2244 bp, Salmonella enterica
atgaaaaatatcactcaactggtttttaaggcgaaaaaaggcgcaatcacgaaaggtgtcccaccggagggaaccgcctggtttgataacgacgatccggacgaggttgatgctttatcgacgctggcgataaaggctgcaggattcaaaagaagcgacttttttaaacccgtccgcgtggatcatctggttgttgatgatatgccggaggaaggagtttttgatactgccttctgtgagcgttacaaactggctgaagacggtaaaagctggctgctgccagttgctcagactgagtcaactgattccggaacgggagaaaatagcgacagcatcagtgaggggcatacaaatgaaaacgctaccgacaacaccgattccggcgataccaccagtaccgccagtaccgccagtaccgacacaggagccgctaccacagccgccaattccgacagtgccaccaataccgctggatctaccgacgccacaaccgacaccagtactgaaggcgtaggtactgaaacagccactgatgaactccccgcccgggaatttaacgtcaacggcgagcggatggcggatattgaaaaagagatgcggcagccggttgctggaatggacgatcgctatcgcatactttctcagttcatccttgaggataagttctcacacagcatcacgccggaacagcttgccgaggtaagccgtctggaactggatgtaagcgacaactatatccaggatatgttgctcgccaccaggaacgctccagccatacacaagctcaatacgcctgacctgtggaaatataccgacagttttaaaaaggtttttgcgcgggataagcgccaccccctcagccggatgattaattttaaccaggcatacgctgacgcacacccaatcgatcgcggactgctggtcaaagagtggataaaaggcaattacgtttcacacattgagaaatcaggaacaaccagcgacagtgccagtgctgcaccagagtcacaaaaaatcagtgcgactaaagcgaatgcagcgatatcaggcaggccagccacaaaaacaacgtacaaaaccattgatacccgtatcgggatcgctctaaccaaaggggagattacgtttccgatcacggcaaaggtcattgagcaaggcaaggctattgttgaggctgatggcgaagaatttaagcggtggtccgcaacctatcgcgtaaccgaaaacatccagttctatgacgagaaaacacatatagcgatgatccgccaggctcccagtgatgtggtcgaaggtggtcctgaattgcgccgcgcgtatgtggataactacctgatagcctacggaacattagatcctgaacaaatagtatttatgccgaagctagcccctgtagagcatgaagaaaacctgaagcgtgtacgtaaggctggtaaaaatctgcaggatatagcgacagggagatttaacggtaatgaagaagaaacacaaccgacagacacactggcagatgaaccggcagcgcctgaagcagtggaggcggatacaactaaacatcatcaggactcacagcaggtggagactgaatcatctgtagcggatgatggcgagcaagcccttcgcgaaaaattcagcgagcaactcgcggccggacgcggtgatttcgttccgggtatcagcgaccccagcgatccgaagtgggtacacaacgattacggcgcctcaaataagggcgaaaaaacggaaaatgaggatgccgacgatgtaaaccagaatgacgatactgtcatccagaacaccgattctgtaaaccattctgagccatccgctgaccagatcgaaccagaagtaccggaaaccgagccaaaaagcctgcaacccgaaccagtaatcaaagtcgccgatggtgtttttgatgcgtccgcattctttgcggatacctcaaatcagggtgaaaaaacagaaatcccacaatctaataatgatgtccgttcgcataaaatcgcaggagaaaaagcaacggatgcaccagtccagatggaatcattactgcacgaattagtacgtttgcaggcaataaataaccagttactggaagcctgtattgcgtatcagagccgggcggaaacccgacacgaaagatttctggaggcgcttttctgcggggtaacacgctttgcataccagtgggtggaaggtgaggaggcgctggaatttgaagaaaaattacggggtgattcatga

SEQ ID NO: 397916 - DNA, 225 bp, Salmonella enterica
atgtggagagaagcacttcagaaggcgagagccgccagccagcaaccggcaacaccggagcaacggctgattatatatgcggatttaaggggtgttttaactaaagctgtagccaatacccgacacaaccagaaagaagaagccatggcgtacatacggagctggcttgaagcgggtataaggcaggcgatgagtgaaataaaacagcgggagaggagtaaatga

SEQ ID NO: 397917 - DNA, 573 bp, Salmonella enterica
atgaacaacgtgatgattgatattgaaacaatgggcactcagcaccactcagcaattgtttctgttgcaatcgcaatatttaacctgttaaccggagaaatcttcgctgaagaatacatcagaatcagatggaaagaggactgcaaaatctgcggcggaaaaattgatccggataccgtggagtggtggcttaaaaaatcaccggaagcgcgggcggagttaattaccagtgatgatcagttgccgctcagtgattccctgatgcgcctctttgaatttatccggaaacactgcgatgacggtccggtttatgtgtgggccaaatcgccgtcgtttgatttgtcacttatcaaagatgccgctgaacgttgcgctatatcgtccgaagagatcccgtggaaattctggaatgagcgcgatgtccggaccattgaggggcttgcctctcagttcaatttcccgctgccttatggaaaagcagatgtaatccatcacgcccttgaggacgtgcgtggacaaatcagaaacgtcagcgcagtgatcggggcaatgcacgaggcggcggagacatga

SEQ ID NO: 397918 - DNA, 594 bp, Salmonella enterica
atgttcagcataaaacgtaatggcgcaagcgtggagataactgaaatccccgcaagcattccgttcagtgtctttaaaaatattgccgatgaaaccggggctactgaaatgcttgtatgttacttcaaggataaaacagagtatgaagtgatcatccagcagaccaatgaaaacatggctggcatggttgcatggctggcactggaaaagcgtgatgacgtaataacgggagatgctggcgctgatgttggcgacacggatatttccaccatcggtaaacgcattggtgttgcgcgtgtaaaacagcacatgagcgctcaggaactggaagatgccattggtgcgccagagggttcggtattccgctgggagacgggaaaggcagaaccgtcatccagctatattaatgcgcttgccgttgccctgaaatgtgagcctgagtggctgttgcatggtaattcaacaaacgtaatccccaaaaatgagttatcaaaagtggcgtggctggtgacagagttagaacaagaatatgagaaagctatgaaaaaggccgcaaacatagagacctgtttttcagtttgtatcaggacttaa

SEQ ID NO: 397919 - DNA, 366 bp, Salmonella enterica
atgttcactttaggttccagattaagagatgaacgtaagcgtctagggatgaaacaaactgaatttgtagaattaatcggcgtttctagggggtcgcaagtagcctacgaagcagataaaaaaattccagggggagcttatttagcctcaatagaaaaggtaggtattgatgttctttatgtccttaccggaaaacgtacaccttcctcggatgggataacaaccgaaactcaggaagaaaaagccctgctcgaaaactatcgcgccatggatgaggcggcgcggttaaatatgcaggcggttagcgctgcgttcgcgcaggctaacttaaacaaagacgacctgaaagacggcagtagtgagtaa

SEQ ID NO: 397920 - DNA, 750 bp, Salmonella enterica
atgaaaactattcttagcgatgtacaactggcagtgacaggagagggaaaagacggacgcgttatcggcgctgatatgctgcgtaatattgccagtaactttaatggtaatcactatcctggaatatttaagaactcaccgaatgaatcacaaatacacgaattaatcggatacgtaacacacgtatatttagtggaatcaaattccggagtggaattatacggttgtcttgagtttactgaatattacgatatggcaacattaaaagacactcttgataacagagtttatattgctatagaagtgctgccagtacagccagggtatgagtcactgaaaagtatatggttcactgacggtaaattcacagaacaacagcagcaggttaacttccgcaaatgcgaatgtatcgggcgtgaagaacaagcacaaaaaacattggaaccagaaatggccaaatcattcatcaagaaatataacaacacaactaaagggtatatgggtcacgtaacttataacgaaaaaaaacactgcgatgcaataagggttgttagttcttttattccggcaataaacaaaagatgcaaagatgaaaaatcaatcgatttaattcgcaggattatatctatagttggtgcaagcgataattgccgccaggatgaaatcgaggcggcttataaaatgaacctggaagaacttatcgatcgtcttgttcgtgactggtgcgcagcgtttcagccatcaaactaa

SEQ ID NO: 397921 - DNA, 315 bp, Salmonella enterica
atgtctgttatttacatcgccggccctatgacggggaagcttaatttcaaccgaaaaaaattcatcgaaacagcaacccatctttgggcggaaggccataccgtacttaacccggccatgctcccggacgggcttgcttatgagcattacatggatatcggcttcgccatgctgcgcggtgctgacgaaatttacctgcttgatggctggcaacattcagcaggcgcaacggcggaacacgctttagcaaagaaattaggcctggaaatctccaccccggaaagccgtaaaaaaaaggggggtgcgtcatgctga

SEQ ID NO: 397922 - DNA, 330 bp, Salmonella enterica
atgctgaaagattacctttgccatatcgctaacaccctgtctggcatgtatcaactaccgttcagccaggaatgggacgaccagcttaataagttgctggatgaaggggctttattgttcgtgggtaaatacacggcgaccttctccactggtgagcacacagtggaagtctggattgaaaatcactggtattcgttcggccatctgtatcgccttgacggggaatacgtatccccatcatgccagcacctcccacggttccgcaccatgcgctgcctgtatgccgccgtcaaagactgcgcggcgaaggagattcgatcatgcgcctga

SEQ ID NO: 397923 - DNA, 234 bp, Salmonella enterica
atggccaaccgcaaacaacgccgtacccgcgctgacgttgagcgcatccatacccagaccgaaatcaaccgccgcctgtaccgcgcgcgcacactggcgctcttccttccgtccgatctgcgtcgcctgccatgtggcccaatgccgctatggttgccgtcagtcctggactacatcgccgacgatatcggcgatgttcaggcactccttaacaagccaacgcacaccgcgtaa

SEQ ID NO: 397924 - DNA, 312 bp, Salmonella enterica
atgagaaaatacaccgcctaccgtccgggcgaagagcgctttgacggccagttataccgggcaatggtgcgcgcggaacgccgggcgcgggaaaatccccgcgtgaacatgccgccgtcgcaaccgccagcgccggaagttcaggaggtgaagccggaaacgccgcctgtgatttgcccgctgcgccaggtcatgaacatatacagggagatggaagtggaaaaagagcaggcaaagtgggaaagaaagcgccggatactggcccataaggcaaaggtagcaagcaaatacctgagtaacaaaggcggctga

SEQ ID NO: 397925 - DNA, 1404 bp, Salmonella enterica
atggcgaaagaacgaatcaggcgagcaccgcaaggcagccagcttttccggagtatttttgaatgctcaaaggctatatggggtgactcggctgctggttacattgcagaagcgtccactattatgacaattattgatgaaaaggggcgttacctgcattgggaggatatttgcaaccgtacaaacaacaaagaaaaagcccttggatactggtcattaataaagttggccagaaacggggcttctcagtcaatgtttggacttcaggatgtatttcataaaccatcgttctactgcccacttccggccatacagaaaacatgctccctcatcgacagaacctgtactgcggtcgccatcaaggcattaatcagcagtagtgacatggaggaatccgtattcagcgattttatagatgatgaaagcattgcttccagccaactggaaggtgctgcaacaacaaagaaagttgccctggaaatactgcgcgaaggcagaactccaaaaagtgaaagcgacaaaatgatcctgggaaataacaggttaatgaatcttgcgtgggaaacacgacatgacgccatgacagaagaattatttttattatttcatgaaaccgcaagtcggggggttaatgatgcaacatacagtccgggagagctaaggaaggataattcagttgttgtggctgacctggaaggcaacaccattcatcaaccgccagacgtttcagaattacatgaaagcgtaaaggcattcataaaatggataaatatcaatcatgaggatgatgtatccccaaaaagatacattcacccggtagtaaaaacctgcataatacatttttgtgtgggatatctacacccgtttaatgatggtaatggtcgtgtagcaagagcactttcttactggtatttattccgaaagggatatgacgcctttcgctatatatcaatatcgaggttgttaaaagaggcccctattcagtacgcagaagcctatatgaaaacagaacgcgatggacttgatttaacatactttgttgaatatcagtgccggatacttgaacgggctatcaacggaactatcagtaaagtaacagatgctgtaactcaagcgcgccagttcaatttatggctactgacttccggagtctccagaaaattgacaactattcagcagtatattattcaatctgtcattatcgaatcagggaaaacatttaccgtaaggcaactagaagaaggagcagggatttcagaaagtgcagccagaaagaatctggagcgaatgacagatgtcgggatgcttaatcgaaccggtggcggcggaaacaagcccgtaacttacaccgggaaaaaatcaataaatgacataaaaaaagccattatcaaactgactgaataa

SEQ ID NO: 397926 - DNA, 354 bp, Salmonella enterica
atgaaatatcttccggctgttttaaccgatctcatactggccgcagcgcttgcggctggtattggtctgaacatcgaaggcgtcacagccaccgcgcacggtgttttgtgggtgttcgcagtagctatagtgctggcgtacctgcttccctccgtgcgcataaaagcggaaaaagaatatatacatcgcccgttgctatgggctgtttatgacctgataagcgatctcgccgttgtcgctgtagcggcctgtcttaactggtatgtgctggcggtatttctgttagtagggttatccctgaagcaggacttttgcatcaggcaggaaaagcgactgaaggaacaggccgcatga

SEQ ID NO: 397927 - DNA, 714 bp, Salmonella enterica
atgtatagagtaaatcaaatcatcaaaacaataagtaaaatgaattcttatgctccctataatcaaataaataaaaaaagcaacttacttagaaaggttcaagtatattcatttctcacatcactaatttctcttgttttaatggtgataatggcagttatctataaaatttgtgaccttcccaaggaaccatttcttttaccagcactcgttctgtatgccctcaattccgttgccggtatagtttatttgtttacacctataattccaggtgtgaaattcatgctcaacttcaaaaaagaaattttcaatgatctaatttgtgaaattgacaatgatgaacaaaatatagaaaaactgatgccttactcgttgactgaattaaactattcaatagattggttaaacataaagatacaaagagtgaaatcaagaataaatgatttctttggagaaaaaactgccgtcttatcaataattggattagcatactcagcagttcaaggttttggtgggttagacaaattgggtgataccatatcaaaagggatcttcaattccggcacagcaaatacattaatcgtatttggactggcttttcttttagggttatcacttggagcattagcacttaaaaatgtagcaaatcatttgcaatatctgaaagagatgattgaattagctaaaaaaataaagcaacaaaataatgagtaa

SEQ ID NO: 397928 - DNA, 429 bp, Salmonella enterica
atgcatatccgaggtattcatatcgtctttttcataccaggtggcggtcggcagtacgatatcggagtacaggcaggtgctcgacaggcggaagtccagcgtcaccaccagatccagtttgccgtccaggccattgtcacgccactccacttcttccggcttcacaccgccctgtttacccagatccagcccctgaataccatgctcagtacccagcagatacttcagcatgtactcatggcctttaccggaagacccaagcaggttagaacgccagatgaacaggttacgcgggtggtttttaccgttttccggctgctcggcggcaaagcgaatcgaaccctctttcagggatttgacggtataatctaccggcgtcataccggctttttccgcttcacgcgcaatgtacagcgggttggtgcctaa

SEQ ID NO: 397929 - DNA, 738 bp, Salmonella enterica
atgatcggaacgcggggtcgtcagacccgcccgcagcgtagttcgccttctcaccgggccggcaggggaagcatcctcaacaccatcttcgtcattaccatgtcgttctgcaggctgatgctttcgcaggttacgacagattgttcagcgcagagcgtgaaggggaggccgttaaccgaagccgcatgccgggcccacgcgtggcgaaaaatccacgacgtctatataagcacgcagacagcgacggcagaggaagtcctgaaacgtatcggtgaactgtacgcggtggaagaggaaatacgcggccttccggcaacagagcggctggcagccaggcgcaccagaagtaagctggtgctgatatccctgcatgactggttggtggataaaagggcgacgctgtcgaagaaatcccggccgggtgaggcgttcgcttatgtgctcaatcagtgggatgcgctgtgctattactgcgatgatggtcttgcagatcctgataacaatgccgctgaacgcgcgctgcgagccgtctgccctggcaagaaaaactacatcttcttcggtagcgatcacggtggcgagcgtggtgcactactgtatggtctgatcggtacatgcagactgaatggtatcgatccggaagcttaccttcgccatatcctgagggtgctactggagtggccgttgaacaaagtggccgaactcctgccatggaatgtagctctcaccaataaatag

SEQ ID NO: 397930 - DNA, 528 bp, Salmonella enterica; identical to SEQ ID NO: 389343

SEQ ID NO: 397931 - DNA, 303 bp, Salmonella enterica
atgaagaagaaaaacagcacacccaccccccacgatgccacgttcaggcagttcctgacgcaaccggatattgcccgggattttatggagttgcatttgcccgcagaactgcgcgcagcctgcgatctcagcacactgaagctggaatccggcttgttcgttgaggatgatctccgccagtatttcagcgacgttctctacagcctgaaaaccaccgcaggtgacgggtacatacatgtcctcgtggaacatttatgcggtgcaccgcataaatgttcttatgcaaagaaaatgattatgtga

SEQ ID NO: 397932 - DNA, 219 bp, Salmonella enterica
atgagacacacaacctccctcttaaatacaaatacgatactgaatgaactggactctttatcttacagccagtgcggggttgaagatattgaaaaacagttaaccaatatgctgggcagtgcaggctcagaggaatttatactgggtctctcttactggatacacgttacccgtcagttacttcaactcaaacgggaacgacaaaaggcagatttgtga

SEQ ID NO: 397933 - DNA, 531 bp, Salmonella enterica
atgtcgtccactgtggcattcctgaatcgactgagacctattgatatcaataacgctcgctcatttatcattgatgtcgaaaatatggggattgctcttaacccgtatttcgtcatctcccgtatttatcctgatggtcggatatctataccgggtaatttgccgggcaatatccactcgctttttactgatgatcttatacaaaccacctcaccaagattgattgtcgttgcctgtcgttcaattattgaagctgcctgccgtgataaattgagcgaaaaggaactacataataaaagccttgttcgaatgattgacatgctgattgagcacggagagctcggtaatgtcattggtagctgggctcatactgttcgccaactgggtaatgaggtggttcaccggtttgactctccctctccggacttgagtgaggcgaaggaggttctcgatctcaccaccacgttgcttgagttactctatacttacccggctaaaatcaaagccatgcagaaaaaaaataatgactga

SEQ ID NO: 397934 - DNA, 591 bp, Salmonella enterica
atgggggctacaacacaaaaagaactgatggatggcctcatggaggccgtggttgtcacactgacggagcgccagcatgtaccttttaatacggcctgtcgcgtgggtcaggcttttgctgatcgcatgtcatttgtctgggctaatggcgtgatccgcattcccaagggcattgcctacaacaccctgaagcgcaataaagcgttgtttgacgattttgacgggaataatcatgcgcatctggggcgtaagtacggtatctctatccagcgggtttacaccatcgtcaaagagatgcgtcaggcgtatgtggacagcctgcaggtcgatatgtttaacgataaatcggtggttaatccacaggacgtcagtgactttatcgcggccgatcttctggtactggcggatattatggatcactgctctgtctgtatccgggaacatctgactgtaaataaagagcaggcagatgcgctgggtgaggaggtggccaactatatgtcggcacactggcacgggcagtttgcctacgtgaaatctgggaagcaggaggctgacgacagtcaggacgatttgttcaggagtgaatga

SEQ ID NO: 397935 - DNA, 432 bp, Salmonella enterica
atgaaaataaacagggtgaagagcatccagcttattcatattgccaaaagccagatgggcatggataccgacacctatcgtcagatgttgttatccatcaccggtaaaacatcaaccagcgaaatgaatcccggtcagctcaataaggtgctggccgcaatgaaagccaggggctttgtcgtaaaaccttccagaaaggtgcgaacaacgcgccaactggcggattctccgcaggttaaaaaactgcgtgccctgtggctggagatgcatcagcaggggaaagtccgcgacagttcggaggtggcgctgcaggcatgggttaagcgggagaccggcgttgacagcctgcagtggctggaaccgggtatgatcagcctttgcattgaaaagctgaaaaagtggcagaagcgaccttctgcggggagcgcataa

SEQ ID NO: 397936 - DNA, 240 bp, Salmonella enterica
atgaatgagagcaaagacaaggccatccgacgtcttaaaaagctgatggcgctgaccagttcatctaatgccaatgaagcctccgccgcactggcccgaatgctgaccatgcatgagatggtcatgaataaaaccaacattaaagccagcttttgtgatactgactgtatacgggaaatgaacgaggctccgatacaggcccggcgcgttcttctggatattaagggaggtgctgcatga

SEQ ID NO: 397937 - DNA, 276 bp, Salmonella enterica
atgattacaccaaaagaatgcgggcacttatcccagaaagccgtcaaagacttcattaatacctgtgagtgcaaagacatgaacgatatccggcgagtattaatcaacctgattagtactgccgctcaggccatgattgccactaacggtcttgataccacgttaaagactctcagtgatacccgccagtatctgcagatgacgaaaccggaatatgaacaggtacagaccggaacgggtatcagtattcgaccagtccgtaaagtcaggcactga

SEQ ID NO: 397938 - DNA, 762 bp, Salmonella enterica
atgccatcacttaaaggttgtataactgatacatcaaacgctgtccggcttacagataaagaaaaactggaaaaaaccattcaggacatgctgaaggggtttaaataccacaccagcagcatgatgactgttcttggaaaaacacaaaataaggttattacgctgaccatccacagccgaaataactatgaaaatgagtataacgaggattttgaccacatagagagcgacgatatttgtttgtctgctgacggttctgatgcgccttccagtgtattggtggctatgccggaagatcttcatcatgacacaagacagctggtaatggataccgcaaatgccatggcggaaaaactctaccgtgcacaggaaaaatacggatataccaacggctggcgtgtacctgttgaaggtgaagaaactggcgatggacgtaacttccggacgcgtgaagagtgcctgaaagcgttattccaccacctggaaaaaggtgatccagtcgactgcattaattatctggcatttatgtacgccaacggctggagcacggagttgcctgcacaaccaaagaaaaggaaaacgaataataaaaagacctcaaccatggaaggtgaaataaatgagctgtctgctgctatcgccctatttttccacaaatttgaccccgaagagttttcgccagaaaacagtggagaccgtgcggaaaaaatagctactgaactggcaaaacacctggcagaaacagagagattagcaaaatga

SEQ ID NO: 397939 - DNA, 201 bp, Salmonella enterica
atgaaaacgatgattaatttttctcgtattaaagctcgtctttgtttcgaattgcaggcattcaaaaaagccactcgtgaggcattaccagagatgattgccacattaaccaatggtctcacgcttctcgtatacgccttttttattggtgtcgggttagtgctgagttttttcttcaccgtatctttaatgcagaggtaa

SEQ ID NO: 397940 - DNA, 222 bp, Salmonella enterica
atggcgacaaaacagaaatacactaatcgcgcgaaagcaaccatctggaataaaagcctgtgcatggatatagaaggttcaataccgggcatggctatcatgacgttcgaaatgattaacaccattgaggaaaaagaacaagcgttggcgcagatgcagcaaaaccttgatgaatgcaaagaacggggggcaaccaatgctggcgtgcaaacactgcagtaa

SEQ ID NO: 397941 - DNA, 189 bp, Salmonella enterica
atgagattcgacgttattcagcacctgcgtaaaaaggctgagaaagatattaaccgcgccatgcgtgccgctgaatccggtaatgacctggaggcggcaaagttattcacgcatgcaggcggaacactgataacactgggtcgtggactggagactgaaatcaatggcgacaaaacagaaatacactaa

SEQ ID NO: 397942 - DNA, 525 bp, Salmonella enterica
atggcgaaatcaaaatcgcggcttaaggctgcggcggcctcctacacgccgcaatcgaaagaacaggtcagcgttgatattaaaaaaatcggcgatattcagcgggaattaacccgtattgaaacggacgctaacgaccagatagcggtcatcatgaaccagaacaccccgaagattgaggcgctgcgggctgagctggacgttctgcagaaaggtgttcagacgtggtgcgaagctcatcgtgctgatatcacgaaaaacggtaaaaccaaaacagccaacctgattaccggcgaagtatcgtggcgcacaaagccggattccgtctccattaagggggtggagctggtactggaaacactgaagaaattaaagcttgaccggtttattcgtcgtaaggaggaaattaataaagatgccattctggcagataaaaaggccgtggaaagcatcaaagggatttccattgtgtcaggtaaggaggtgttttcaatcacgccatttgagcaggagatagagaaatga

SEQ ID NO: 397943 - DNA, 378 bp, Salmonella enterica
atgtcagaaaccagacgttatgaaatcacctggaatgcgcacgaggacgcgccggtattaaccgtggagattgaccactccatttgtaccgatgcgtcactacaccagattaataacttctttattaacgcagaagaccgttatctggaaagtgactgcgacattacagccaccgtattaaaaatgctggccgctacctgttttaccgaacaaacagggccgaccggaggctggaatgctcagggacttattgccctgtttgaaggcggtgatatggagggctggccgccaatgaacggcagtgaaggcatcaggattctggcctgtgatgttccgggcgtgaattacgacgatatggtagttgaagaggtgttgtga

SEQ ID NO: 397944 - DNA, 1158 bp, Salmonella enterica
atgttgctactgaaacaacagctgcggagcctgcatatcagcatggcggatgctgccagtgagaccggggtgtcaaaacctgccatggtgaaactggtaaaccacgggcagtggccacgtcgcaacccggaacaactcaggaagcggatcactgagctgttacagactcacaacgtggacaccacccacagtttcgatgaggtcaggcagcaggcaaccaccgccactcaggtacaacagacaactgaagaggacagcatgttactcaaaaaacagacgttaagccagaaggccagaaaagccttcaacctgttccgtaacccgttcgacgacactgccatacagagtgccgatgacgtatttaccacacctgaaattcgttacgtacgtgaagcgatgtaccagacagccactcatggcggcatgctggctgtctggggggagtccggctcaggcaaatccaccctgcgccgggatctgattgaccgtctgcagcgggataacagcaatattattgttatcgagccgtacgttctggccatggaggataacgaccgtacaggaaagaccctcaaggctgtcagtattgccgaggccatcctgcgttcagtctcaggcgaaaaacccaggcagtccccggaagcacggtttgcgcaggttcaccaggccctgaaagacagtgctgatggtgacaataataacagccacgtgctgattattgaggaagcgcacgcactgcccgttccgacactgaagcacctgaagcgatttctggagctggaatccggctttaaacgtctgctttccatcatcctgattggccagcaggagctgtgtgacaaactcagcgagcgccgggcctcggtacgtgaagtggttcagcgctgcgaactggtacaactggagccactcaataacgatctggaggcgttcctgtcgttcaaactgacccgcgcggggaaaaagccggaagagattctggatgtgtccactatcccggctatcgcatcgagaatgaccacccgtgacagcaaggggaatgtggtcagcagcaccctgtatccactggctatcggcaacctgatgattgcagccatgaatgctgccgctgaaatcggcgtaccggtggttaatgccgacattattaagaacctgtag

SEQ ID NO: 397945 - DNA, 255 bp, Salmonella enterica
gtggtcagaaaattaccccacacaaccttacttccggtacccgttccggtcatcgtacatcatgatctgtccgtggattttcgcggaatgaacttctgcctgcggggcattcccggactggtcagcgaatgcctgatcaccatcacccactacgactggcataacaacgaaatcaccgtcagttttaccgacggtaacggagtgacccaccgctacatcgcggacaatcctgtcacagatcaggactgcgcctga

SEQ ID NO: 397946 - DNA, 150 bp, Salmonella enterica
atgactgaagtggatgagtttgaccttgcaactatccgtgactttatcggtcagtgctggactgactttgtcgccttcaatgaagaccgttctgatgacggcattacggaagccgaacgtctttacagggctatcggcggtgaagactga

SEQ ID NO: 397947 - DNA, 231 bp, Salmonella enterica
atgatcaaagagcacaccatcaaaccccgccgtaccccggtacagcaggcgcagcgtgacgagtttctgaaagccgccacgctggcgcggaacgagctgaaccacgtcatccattttgccgaacaagacaactggtctgaggtggagttttacgtagagcacggcagatacaactacaaaaaattgaagagcctgctgcccacagatcgcgccaaaccacagggtgaatga

SEQ ID NO: 397948 - DNA, 237 bp, Salmonella enterica
atgacgactaattgccccgatctgacggcgaaactggatacaccagaacgcaaccgcctgatgcgcttcacctgcggcgtacagaccgcccaacaccaggctaaccgcgcgctggatcttgcgcaggaaggtcagtggttactggcgctggagtttctgaacgtctgctcgcgcaccgttgacagcctgaaacacgttgcgcgggaagttccaccaacagtcaacggggagaagtaa

SEQ ID NO: 397949 - DNA, 936 bp, Salmonella enterica
atggcacgcaaacctacaacacttcaggccatcgaccctattgacggtatcgttcctgacagtctgaacgtcgaactcaacgagatcgctcagcaccgcatggcggtcatggaacagttcggtgagggacttccctatgatcgtagtcgcatcgtacatgaaactaggttctatatggcacaaagcgctgaagccatgcttgaggctggtaaacgccttgtaattctgaaggagaacgagcctcacggtgatttcacccgaataattacggaagaattagatctatccgacagaacagcccaagtaatgatgaaggcatcaattaaatatctatccccaaagctggagtcaaaagcgcagacgtttgcgggtttgggaaaagcaaaactcttcgaactcatggccgaggacgacgaagaattagccgaactcgccgaaggcggcaccgttgctggcttgtctctcgacgacattgatcgcatgtcggtacgcgaactccgtaaagccctgcgcgaatccaaagaagatctcgccgccagtcgtaagctgaatgctgagaagagtcaggaaatcaacgaattaaaagaaactcattttaaaagcattgacccggacgaagccattaacagggtaatcagtgattttactgagcgtcacgaagccgttctgcgcacctttattggtgcattaccggactttttccagcgcctggaagatgactacaacaaccgtggtatcagtcatatgggtctgatggcagggctgcttcacgatattgagcgtgaaattgccagcgtacgcgcgcagttcgatatccctgaattaaacacccccgacacttcgtggaacgacggctccagcgaggaagacgagaacttccagatgccggaactcaaaaccaccacccgctcactggaggtcagcgatgacgactaa

SEQ ID NO: 397950 - DNA, 306 bp, Salmonella enterica
gtgagcgaaaatgtcaatacgtcattacgtcggggattacgcattctgaaagcactgaagggaaagtccctgctcggtctgagcaataaagaactggcaaaggcactgggtgaatcagaagccaacattagtcgtgccatgggagcgctcatcgaagagggcatggcacaacgtctcgagtcaggtcgctacgcacctggtatgcagcttttgtatatcgctcaggctttctctaacgaaatggctgcaggtcaggcccgtatcgctgaacttaaccagcgcgtactggctggcagcaacaattaa

SEQ ID NO: 397951 - DNA, 225 bp, Salmonella enterica
atgaacaagcatcagatccttgtgcgacttgtcgagcaacacagcaacttccgacagttcgctttaagtagtggttacaagccaagaactgtaactcaggccgttgatcgctgggcaggtagccatgacatgcctcgcggcaggctgacttacaaaattttgaaggatctctctaaaacaataggtgctgaggttattccgggaatcctgggaggtgatcagtga

SEQ ID NO: 397952 - DNA, 225 bp, Salmonella enterica
atgcatacctctccaaacttacccgacaatattgaatcctccctaggagagataacattgcgcgaacaaaaatggcttgaactatttcgcgggctgtccccggatgtacaaaaaaatattctccaacacgctgaaaaagaacaacgactctacgagctcgaacaaaaagtgcaagagcttgaggagctaaaagcaagcattgagcgactaaaaaatgcgggctaa

SEQ ID NO: 397953 - DNA, 174 bp, Salmonella enterica
atggaagttaaaccaatgcagagtggcggagttgatggcctgtcgggtatgagtggcatccggcaggtcgttcttttcctgtatcagttgcagaatggagtgaaaaacttgcgcaactccataaaaatcaaatcccgatcgtgtagcgtgagtaatgcagcgaccacggcctga

SEQ ID NO: 397954 - DNA, 324 bp, Salmonella enterica
atgaaaccattttccgctgcatgcgatttaccccctttaactatgaatacaaccgaggagatcgtcggatactttaaaaaactaaacttcagggatgagattggtcaccctttacacctgaacatggatttcataaagctggccatgaccgcagcacactcgcgaaaaataaaagcccataatcttcttgagcaaccagtgccagagcatgtgctgaaattattcaccaggctcggaatgccagcccagctttgtaatgaaaccgatctccagccggtcattgacctggtgaactgggcaattgagcatccccttcaaatctag

SEQ ID NO: 397955 - DNA, 360 bp, Salmonella enterica
atgaaaaaactcagacgcctttcccgccttgttgccaccacaccgcgtccacgtctgtggggctggctgctggccgctgccgtgatgttcctggtgattgcgctggtgtcgccgcagcagttgccggtggtgatttacaagctctcactgatttctctcgctgccgtactcggctactggctggaccgttcgctgtttcctaaagcccgtccggggcagttcctgtgccatatcccgcatctgatggaagccgggcgctggccagtggaggaagggtgtcacctggtctttgccgctacactcattcgtcgcgcaattattgttgcggcggtatgtctggccgtggcaatggggttatga

SEQ ID NO: 397956 - DNA, 732 bp, Salmonella enterica
atgaccatgacttttcactggccgcaaatcacctggctggtcattgctggtctgcttctgttactccggttcacgggtatgcagactgccggaaagcgtgctgagttctggtttcagctggctggtactctgttaatagcctggctgctctggtgtggcgggttcttctcgcaggctgacgctgctgaaccgccgaccgccgccctcaaataccgcagcgatgttattcgcgcctcccgcgtggactggggactgaatgcgccggtcgctgatttcgccgcgcagctgcatcaggagtccggctgggatcctgcagcccgttcgccggtgggtgcgcaggggctggcacagttcatgccatcgaccgctgactggattgccggactgatgccgcatctggcctcgcgtgaaccgtataaccccggctgggccatccgggcgctggtcagttacgaccgctggctgtggcagcgtgtgaccgtgcctgatggctgcgagcgtatggcgatgacgctgtcagcctacaacggtggcctgggctgggtgaaccgcgaccgcaggctggcccgaacacgcgggcttgatgatgtccgctggttcggctcggttgaaacggtgaatgccgggaggagcgctgacagctggcgggagaaccgccgctacccgcagcgcatcctgcacgaactggccccgcgctatctcacctggggaggcgcaagctgtgtggagtaa

SEQ ID NO: 397957 - DNA, 651 bp, Salmonella enterica
gtgtggagtaaatggctgaaggttgtcccctggtacgacgtggcgttgctcgtgatggtactgatactgggtggatggctgtggacacgggggtacagcgctggccatgacgaggcgacacgggacggtaaggttcagcttgcgcaactgcagtctcagtttgatacgtacaaacgcgaaagtgccgaacaacagaatgaggcgttgcggactgtcgtggcccgctataacgcacaggtcgccgccgtacacaaagcggccgaagattttcagaccaaaaaacaacagctggagcgtgagaatgctgcccttaaaaaacagattgctgatgtcacccgccagtgggtggatgaaaaaggcaaacatcatcccgttaagtgcgtgtttactcgcggtttcgtgcagcagtacaacgccgccctcggcgtcggcgtgcccaccggcaccggtcatgacggctccgctgccgccgcttccggcagcgctggcggtacgtccggggctgctgataccgctcttacccggttacgcgactccggcgtcagtcaggccgacgtcctcgccaacgttaccgacaacgcccggcagtgccgcgtctggcgtgagcaactgaacggcgtgctggattacacagaaggattgcatcaatga

SEQ ID NO: 397958 - DNA, 312 bp, Salmonella enterica
atgactgatattacccgcgttcgccgcgagtccctgcgctggagcctgctggttgcgcttaacaaatcccgcccgtacaccaccagtgagcaactgctgtttgatgttgcccgctctattttcccggacaccacaaaactggaggtgcgtcaggagctggattatctgagtgaccggcatctgactgaaatcacgaaacagcccggcggtatgtggtttgccgacttaacccgtgtcgggatagaccttgtggagtacaccattccctgcgaaccgggcattgcccgcccggataaatactggagtgaatga

SEQ ID NO: 397959 - DNA, 1521 bp, Salmonella enterica
atggctaagggtatttacgtttcaccgacgcagtttgtcagctttgccgaacgtgacaggcggcgactcaccgatgagattgcctcgcggggtaacaccgcctggggcttcgggtcgttcctcggcatgctgcctaatcctgatccgatactgaaggccaccggtcaggatatccgtgcctaccgtgacatgcgttccgaccccgtggtcggcggtgccattcgtcgtcgtaagtcggcagtcaaatcgctggagcggggcttcaatgagggtgacactgacacgccggtctgcgagtttctgaaaaccatgatggcgacctggaatatggacgccctcattggtggtctgctggacgcaccactctacggttatcagcccgccgagctgatgtgggtgaaggctaacgggcgtttcgtcatcagcaacatcgtcaccaagccgccggagtggttctcctttgacaccgacaaccggctgcgttttcgtggcaataccggtccggcggaaggcattcttccgccggagtacaagtttatctgcccggtgcaggatgcgacgtatgacaatccctacggctttccggacctgtcgatgtgcttctggcctgcgctctttaaaaaacacggctggcgcttctggatgcagtttgtcgagaagtacgccaccccgtgggtggtgggtaaacacaaatccggtcagaacgaaggcagtattgatgagctgatggatgcgctggagaagatggtccaggacgcggtggccgtcatcccggatgacagctctgtggagattaaggaggccatgggtaaggccgactccagcggtatttttcagcagatgatcaccatggcccgcgccgaaatctcgatagccctgctgggacagaaccagaccaccgaggccgacgccaacagggcctccgcgcaggcggggcttgaggtggcgaacgatatccgcgacggtgatgcgacactcgtcgccggtgccattaaccaggtgctgcggtatgccgtggagctgaacttcggcgacgtgcccgtaccggtctggaatatgtgggaacaggaggccattgatgacgtccaggcgaagcgcgacctgacactgtcgcagacggcaggctttttcagtgagcagtattaccagcgggaatacggcctgcagccgggcgacctgctgccacgtcagggaatgccccggccgccggagactgcaggcgcgcatctcccggtgtcgctggcctttgctgaaaacgccgcgcagcgggattttgctgcacaggatcaactggacgttgcgctcgagcagatgctgaccaccggggcggtgaacagggagctggcggcgatgacacaaccgctgatggcggcggtccgtgacggcgtctccccgtcggaactgatggggcaacttgcagaactctacccgcagatggacgctgacgggctgacggagcggctcgcccgcgtaatgtttgtggcaaaaatcatggggcgtcttcatgcaaatgctgaataa

SEQ ID NO: 397960 - DNA, 858 bp, Salmonella enterica
atgcaaatgctgaataaccaggacatggctgcgctgttcggtctccctccggagcgcgccatcgcgtacctgaaaaacaagggctataacatcacctgggactgggaggatatgtggcaggacgctcacgcgaaggcctttaccgtggcaaagcttacccgtatggatattctggaggatatccgccgggcgctggaacaggctctggcggagggcaggaccggaaaatggtttgcaaaagaactgacaccggtgctgaaagcgaaaggatggtggggaaaaaccaccgccgttaacccggtcaccggcgaagaggaggaggtgcagcagggtagcccgtggcggctggagactatcttccgcactaatatggacacgctctacagtgcgggccgttgggcggaacagaaggagaacgccacagagcggccctactggatgtatgttgccatccgggacagccatacccgcaaaacccatctggcgatgcacggtctgatattccgttgcgatgatccgttctgggatgctttctatccacccaatggctggcgctgtcgctgcagcgtgattgccctgacgcaggcggaagtcagccagcgtggtctgcgggtgggcaacagtgcgggcgctctgggtcagacgctgcgcctcgtcagtgagaagaccggcgagatgcagccggtggcaacataccggatgcgcgatatcatcagtaacggcagcattattgtcagccctgacgtgggctggtcgtacaatcccggtcagggttaccggcctgacctcgcgaaatacggcggcacgctggccgcgctcgcgcagcgtgaactgggttcacagggaggcctgcagtga

SEQ ID NO: 397961 - DNA, 552 bp, Salmonella enterica
gtgaaacagaacatgatgcaactgaccgtcagggacggttcgctgcggctggcgctgaaaggcctcgccgctgccggaaccgacatgacgccgctgatgcgggctatcgccgggacgctttccactgagactgctgtcaactttgaagaagagggtcgcccgcagtgggtaccgtcgctggcggcgcagaaacgcgacgggatgacgctctccgataccggccacctgcggcgcagcgtcactacggactatgatgctcacagcgccgttatcgggacgaacgtggagtatgcacgcattcaccagctgggcggtacggtggagcgtaagagccgggaggtgtattttaagcagggtaaggacggtgccatcggcaggcgctttgtgaaaaaggagcacagcaacttcgcgcaggccgcccgcgaccacaccgccgaatatccggcgcgcccgtatctgccggtgaatgccgacggtactctgcaggacggcgtggagcagaagctgctcaacagcgctctgaaatacctgcagaacgctgcgcggcagtga

SEQ ID NO: 397962 - DNA, 1140 bp, Salmonella enterica
atgaatctgatccacatattcagggcgggtacacataccgatatgcatggtcgccgcgtcagtttcagtgacgccgacttaagcgaaattgcccggaattacaatccggagttacatgaagcaccggtggtcgtcggtcatccgaaaactgacgccccggcctacggctgggtgggggggattaaaaaagaccgtgacggcctcaaggctgagccccgcaatatcgatccgcagtttgcggagatggtgaagcagcgccgctacagtaaggtgtcagcctccttttactgtcctgactcccccggtaatccgacgccgggtaaatactacctgcgtcatgttggctttctcggcgcacagccgcccgccattaaggggctgaagccagtctcctttacggaggacgaggaaggcgttgttgagtttgccgactggagtctgcagaccaccgcgtcgctgttctcgcgcatcagggatttcatcatcagccagttcgggctggagaaagccgacagtgtcgtgccggactacatgattgacagcctgcgcgatgacgccgccagaaccaccacaacggatgcgacgcccgcattttctgatcctgtcgggataccggcagacgaggttattcatcccacgcctgagcatcaggcccccacaccaccggaggaatctgctgtggataaagagttacaggcgaaacttcagcaggagaatgctgacctgaagcgccagattgaagaacgtaataaagcggacgctgcccgtgccgccaccgaacgtcataacgccaacgtggcctttgccgacagtctggtgagtgatgcgcgtctggcccctgccggaaaaggcctggtggttgccgtactcgatgcgctcggggatggtgagtcgccggtcagtttcagcgagaacggcagcgaacagccgctggttgaagcgtttaaggcgcagatgcgaaaagcccgaccgctgctcgactttggcgaggtggcgacaggtgacaggactgatcgtgctgccattccggctgagttcgccgaagctgacccggtacgccttgagctgcacaccaaagcggtggcactggcgaaggctgaaaacattacctacgaggcggctgtcgcccgcctgatgtaa

SEQ ID NO: 397963 - DNA, 957 bp, Salmonella enterica
atgtctgactacttaaaaggcaagcgcgttgccgacccggtattaaccagtgtcgcgcgtggttacaaaaacgcagctcttatcggccagaacatcttcccgcgcgtcgggatggaaaaggaaggtgcgaaggttccgacctttggtaagggcgtgttcgccacgtatgagaccctgcgcgcggtggggggcaaaagtaacgttgtcacccgcgaaaaaaccggcacgatggatatcgtactggatgaacacgatctggcgttcccggtggactatcgtgagcagcatgagtcgatgttcaacgagcaggcgaaggccatcaaacgcgcccgtaacggcattctgttaagtcaggaagtggcggctgcggcaatggcgcaggacacctcactgtatctgaaagaaaatgtgcgcaaatttaccgccgcagacagctgggcggggggtaagggaaatccggtgctggatatttctgtcgggatggatgcggtgcgtaatgccaccggacttcgtccgaatctgatggtgatgggtgcctccgttctgccgctgctgcgtttccatccggtcctgcaggcagtactgggtgctaatgagcaaaagcgcatcaccgtggagctgatgcaggatattttcgagatagagaagattgtgatcggctatccggtgaagctggacaacaacgacaaaaaggatgcggcggcaaaaaccgtcgatatctggcgggacaacctgatgctgtattacgtctccgggccgcagaacgcgggtgacaacggcgatgagaacgagccgtcgtttggctacacctttgagctgaacggtatgccagttgccgatacctataccggcgagggtggcaaaatcacctactcccgctacaccgacatctacaaaatggcggtcgtgggcagtgacgcgggctacatcatgaccaacctgacaggagcgaaataa

SEQ ID NO: 397964 - DNA, 342 bp, Salmonella enterica
atggccacacaacaggttcttctcaccaccaccgtggtggccaccggtacgctgcaacagcagcacctggtggggtatgacggcgcgccctgtaccaaaggcgctctggcgttcggcatcgcggaggtggacgccgtcgccggtgacgccacgccggtcaatgtggcgggcattctggcggcagtggcgggtgcggccattaccgccgggcaaccgctgcagtcagatgaaaacggctgtgtcattcctctggaggccaccggctcaccggttcgcgtcggtgtggctgtgacagcagcggcggctgccggggcctccctgaaggtgatgtggggggggtaa

SEQ ID NO: 397965 - DNA, 435 bp, Salmonella enterica
atgaaggtgctgccacgccagcagcttattgaactgacctgcgacatgtcgggccgttctgttacgcaggcgctgccggattcgcctgatgaggcggtggtgaatgaggccatccgttacgccagtgaatacgcagatggctttctgcgtaaccgctaccaggtgccgctggcccgcgtgccgaccatcatccgggacctggtggtcaacctgaccattgaacgtctgtacctgcgtcgtccggcgaaagacctgccggagtcggtgaaacgcctgttcagtggcagcctgaaaaccctggagcttattcgcgacggcaggatgacaccgggctctctggtggagcagaccgccctgccggagcccggtcagacaagggtgaaatcacgtccggcggtgctgggtgggccaggtggctggctggagaaatattga

SEQ ID NO: 397966 - DNA, 489 bp, Salmonella enterica
atgaacacgttacccgtactggatgacatagtcacgcgcctgagtgagcggttgcctggcctgcatgtggcgtattttccggacagccctgatgccttcacgctgacccatcctgcaggagcggttctgctgagttacagccgttccacctatggcaacagcgaaagcaccggtgccgtgatacaaccgcagacgatgcgttttgtcgccaccgtcgtcctgcgccagctgaacggtcaggatggcgcggtggacgtactggacaacgtgcgccaagcgctcggcggctggcgaccgaaaaactgcctgcgccccgtctggctggttgacgatgtttttctgggcgagtcgcaggggctgtggcagtacgccctgacgttcgccacgcagtccttttttattcaggatgacaacccggaggacagcggcgcgccgcttgccggggtgatgcctgacaacagtgatgtgaaaccggaggtcacaccgtga

SEQ ID NO: 397967 - DNA, 243 bp, Salmonella enterica
gtgacaacctatatttattcggggccgccgtccggcgtcacccttaacgagaacggaaaacagcgcgaagtgctgctgtggccgggtaagcccgtggagcttgtgcccgaccatccctataccctgaccctgctggcgttaaaacacctgcaggaggctgacaataaaacacaggcccccccgtctgcgtcgtcccgccagaccagaactccggtacaggtggaggtgaacgatgtccgctga

SEQ ID NO: 397968 - DNA, 1434 bp, Salmonella enterica
atgtccgctgattatctgcatggctccgagaccatagagattaaccgcagcccggttcccgtccgggcggtgaagtccgccgttattggcgtggtgggcaccgctccggcaggcccggtaaacacgcttaccctgctgctgtcagagcccgacacagggcagttcggcgcaccgcttgacggtttcaccctgccacaggcacttgccacgctgaccgggtacggcgcaggaacgattattgccataaacgtccttgatccggcgaaacataaaaccagcataccgtccgaaaacgtgacatttgtgaacgatacggcccggctggcgcacgcgccggtgatgagcgtgacggtcaaagcaccaaccggcagcaccacgtacaccgccgggacggactaccagctctcagcggagaccggcactctgacacgggtcgcgggcggcggtattgatgcaggtgctcaggtaacggtcacgtatgactacgccgacccgacgaaggtcactgccgccgatatcatcggcgctgtggacgaagcgggacggcgcagcggtctgaagctgctggccgacagctactccctgaacgggtttgatgcaaaaatcctgattgccccggtgtacggtacccaggcgtccgtgatggcggagctggatgtgcaggccggaaagctgcaggccgtggcctacgtggatgcaccggtgggcaccacgccacagcaggccatcaccgggcgcggtccggcgggaaccatcaactttaacaccgcctccggacggctgcgcctgtgctatccgcatgtgaaggtgtatgacgcgcagacgaacgccgaccgcccggagccgctgtcgtcccacgccgccgggctgcgggcctggacggacctggagtacggctactggtggtcgtcctccaaccagcttctgaagggggtgaccggcacagagcgtcccattaccgcgcgtattgacgatccgcaaagcgaggccaacctgctgaacgccagcgggatcaccaccgtcttcaacagctacggcaccggcttccggctgtggggaaacaggatggcctcttacccgtcctccaccgggctgctgaccttcgagaactgccgccgggtgaaggacatgaccgacgaggcgatccgttcctccagtctgtcgtttattgaccagccgatcacccaggtgctgattgataccattctggagtcagtgaaccagtacgggcgcaagctgattggcgacggtgcactgctgggctttaagtgctggtatgacaaaaagcgtaaccaggaggcggacctcgcagacggtcatatgctgatcagttacaaactgacgcctccgccgccgctggagcgtctgacgctggaatcggagatcacctccgaatatctggtcaaccttaacgggaacggagggaacacctga

SEQ ID NO: 397969 - DNA, 525 bp, Salmonella enterica
atgggcgggaccatacagattaatgccatcagtaatgccaatgtctatctggacgggcgtagcctgctgggcaaggccgaggaaatcaagtgccccgacgtcagcgctgtcatgcaggagcgcaaggcgctggggatgatcgggaaaattgagctgccgatggggtttgacaagatggaaggcgaaatcaagtggaacagcctctatctggatgtggcggtcctgaccgctaaccccctgaaggcctactccctgcagtgccggtcgaacatcatgcagtttaacagtggcggtctggtgaaagagatgccgctggtgacctacctgacggttcagttcaccaaaaatccggcgggtaccttcaagcaccaggagtcccccgacctgaactcctccttcacctgtacctatattaagcaggtgatcgacggtcaggaggtgctggaactggattatatggccaacatctttcaggttaatggccgggatatgctggctgattaccgggccaatattggtggctga

SEQ ID NO: 397970 - DNA, 279 bp, Salmonella enterica
atgtcacagtctgactgctacaccctgaaacatccctacaccactgccgccgggcagaaactgcacacgctgaccctgcaccgtctgaaggtgaaggatatccgcagcgcccggagcgtcagcaaggacccggctgagtgggatgaaccgctgattgctgccatgaccgggctggtaccggaagacctttcagatatggatctgcaggactaccgcgccctgcaggagcgatttcagcagatgtacggcgtggatggacagcccggcgacgctgtataa

SEQ ID NO: 397971 - DNA, 156 bp, Salmonella enterica
atggacagcccggcgacgctgtataaggcgacggcgctgctggcgcggtggtttcgctggcagcccggcgagattgaggcgctgacggtggacgatctggaggcgtatctggatgaggcgggcgaacaaatcaggcgtgagtatggcggcggataa

SEQ ID NO: 397972 - DNA, 303 bp, Salmonella enterica
atggaaacgcggttctggtgttatgcagccattgtcatcatgggctggttcggcttcctgggctggcttctcctgcaactgcaggagacccttactgaaacaggcgttatcccctggagtatgaagaatgttattctgctggggctgggagccattatcctcgtggtcgcctccgtcccggtgattgccgtcctgcagcccctgattgcgctggcagggctggttgcagagggcgtatggcagctgctgcgcggcatttatcttgccgcacgctggcttatccgccgccatactcacgcctga

SEQ ID NO: 397973 - DNA, 2439 bp, Salmonella enterica
atggccacaaccttttcaattggtgttttagtcagcggggctgtgaccagcagcttcctgtccaccatgagtgggacacagcggacgctgaacaaacttacccttgccaccgaaaaactacagaagcagcaggacaccctcacccgcaggcaggagatggccacgcgggccatggaacgttacggtgatatcggggggcgtgcggtacgtaaaatcggcgcggaactcgacatagtcagccgtcagtttgaacggatgcagaaacagcaggccaggatgacaaaagcggcggcgctcagccagtcgatgaaaaataaccgtatgagtctttacggtcaggggctggagacatgggggctggcaaaaaccctgatggccccgtttaaagcgggcgtcatcgattacgcacactttgaagcacaactgcgcgacatcggcattaccggcgatctggataaaggccaggaaaagcagattggtgaagtgatccgccgacaggcaaaggagacaaaccagaccaccggtaccctgctggaaggggtcggtacgctggttgccgccggtaaggctcctatggaggcagtcaaatggacacaactgctgggacggacggctaccgcgtcgggggcaaatattgacgatctggccaaaatggggctggcgtttgagtcgctgaaaattgacggtcaggacgaactgaaggccgccttcagcaaggcggtctacggcggtaaatccgggcgctttgagctgaaggatatggcacagtatctgccggagatggcccagggctttgcggccaaagggatttatggccaggaggccattgcccagattgtggcaagtctggaggtaggacgtgaaggggccggtactgagggggaggccgccaccaacatgcgtaactggctggcctccatgaaccggggcgatattgcccgccgctatatgatgcagggcgttgactataaaggctccatgtccgattacgtttcggcaggttactcacagtacgaagcctccatcatgattgccgacagatttatcaaatcgaaaggcgcggacttcatgaaacagtggcagaacgcgggggcaaagggtgacagggatgcccagcagcgcctgatggagtccttcggtctgagttccatttttaccgatgtgcagacggtgaaccacctgctggccatgcgccagcgctgggatgactatcagaatatcaaaaaagggatgaacggcccggcagcacagggcagcattgacagggactttgataaacgcaatgcctctctggaatcaaaaggccggcgtattctggtgtcactgaaggacatgtcgctgaccattggcgaatccctgacgccgtcactgtccgggctggcggatcatattattcctgtcctggataaaaccggactgtggattgcgcagaatcagaaactgatcaccgtgatcgccggggtcatggcgggtgcgctggggttccgtattgccctggtcggcgtgaaactgctcctgaatctgttgttctccccgtttgtcagcctgtatacggaacttgtccgtgtacgttccggctggacgctgctccgtaacgccctcggtagcggcggtatgttacgccggattgcgtcggtggcgggtcgtcttggcagagtactgggcggcggtctgctgaaggggattatgctggccggacgggccattctgtggatggggcgcgccatgctgatgaaccccatcggcctcatcattaccggtattgccatcggggcttacctgatttaccgctactggggccccatcagcgcctggtttaaggcccgctggaatgacattaaaaccgccttcagcggcggtatcggcgggatttccgcccttatactgaactggtcgccgctggggctcttttataaggtcttcgccggggtcatgaagtggtttggcgtggatctgcccgcgaactttaccggcttcgggaagaacatcatcaacggcctggtgaacggtattaagaatacctgggaagccaccaaaaaaacggtgtccgatctgggtgacaacgtaaaagactggtttaaagagaaactcagcattcattcaccttcccgtgtctttatgggttatggcgacaatatcgttcaggggctgactatcggtattaaccgaagtacgccgggagctggtaagaccatggatggactgggcagcagcctgcgtccgcgactgccgtcgctgcccgctgtgcccgacctgccacagggcttcgggagcagaacggggggcggcatacacattgcttacgccccaaaaatttatatcgacggccaggcacagcagcctgcgggggcgattcaggaagccctgacgctgtcacgtcaggagctggaacgcatgttgcgggatattctctggcaggaacaacggagggcttactga

SEQ ID NO: 397974 - DNA, 894 bp, Salmonella enterica
atgtttgcgctactcggcaatatagagtttgaggtgctgaccagcccggaggcgctggatgcgtccatggggtcggagtttgcagaactgagccgcattggcggtaaacccggcctgcagttcactggtgacaaggcggatgagtaccacctgacgctgatgtggcatcagcagtactgcgatccggccacgcagtggcagcagcttaacgctgcgcgactggcgcatcaggcgctggcattcgtcaccggtgccggggattatctggggtattttgtgataactgacgcgaacccgacctggcagatgacggacagcggtggccggttgcaggcgatgcaggtggaggtgacgctgcgggagttcaccggcgatccgaaaaatccccttaaacctccggcgataaaaagcaacctgtccggcgtcgccgccgtggcccgtccgtcgctcgctgccacgggcatcagtggtatggttcgcgacgccgtggggcttgtccgccaggcgcagtccgccatggccagcgtgtcgggcgtcattcgtgtggccagccagttaaagcataatccgctggtcgccttcagccgtgtaccggggatgattaccggtctggacggtatcacgcgcccgctggaaaaggcgtttccactgctgaacggcctgactgatgcgctgcctgagacctcgcgcatgatccgggcggccagcgatatcaccaccctgacgtcggatgcgaccgcacaactgaaggggctgcatgtggataatctcagtaaccttcccgccgtgctggataataccgcctcgcttgccgggcgtgcggccagcgtattcaacgacgcctctcccggtttaagccgtatggcatcccgcattctgaccaggagcctgtga

SEQ ID NO: 397975 - DNA, 216 bp, Salmonella enterica
atggatacactttacatcgggcatatcaccaccgacggtgagcgctgggaccagatagcgtaccgctattacggcgacccgttcggctacgcacgcatcatcatggctaatcctcacattgccgtcacgccggtacttgatgccggacaacggctggccattcccgtgatcgacgcagatcagaccactcaggagttaccaccatggctgcagtaa

SEQ ID NO: 397976 - DNA, 1146 bp, Salmonella enterica
atggctgcagtaaatcccggtatgaccgcgccggttccgcaaccggcttaccgtctggtgtataaccaaaaggacatcacgcatgacgtgagtgtttatgtgacctccgtcagctataccgacaaactcagtggagaaagtgatgagattcaggtggatctggaagacagtgagggccgctggcgggatgcatggtatcccggtaagggtgacacgctgaccctgatgatgggatacgccggagagcccctgcgggagtgcggaacgttttccattgacgagattgagttgtccgggccacccgacagcgtttccctgcgcgggctggcgacctccgtcaccgtcgccatgcggacaaaaatcagtcggggatttgagaataccacgcttgccgccatcgcgcagcgcatcgccgggaaacatcacctgcagttacaggggcagattgagccgctgatgcttgaccgggtcacgcagtacgatgaaaccgatctggcctttctgaagcggctggcccgcgattacggctatctggtaaaggtgactcacacccacgtcatcttctccagtctggataagctgagagacacagcctccgcatttacgttcacgcggcctgatatcatccgatactccctgcgcgacaccatcaaccgtatctacaaaaatgctaaacaccgcaaccagaacagccggaccaaacgggtagtgacctatcaggccgatggtgaggaaagtgccacaacggtcagtacaaccatgcgtgggcagaataccagtgctgatacgctgacgctctcaggtcggacagggagtcagggggtcgccagccgccggactcatgcggcgctgagtctgaaaaaccagtaccagaaggtggccacactcagcatggaggggaatatccgcctgcgggccggacataacgttacactgaccgggttcggtgtcagtgatggcaaatggctgaccggttcggttcgccactcaatgacccgttccggcggctatatcatggatgtggaggtggcacgcggaccggtggcgaaaaaatcccccggcggcggcagtaaaacactgacagtgtataaggcagacggtagtaccggacagagtactgccccgaaaaagggagcccggctgtga

SEQ ID NO: 397977 - DNA, 690 bp, Salmonella enterica
gtgagtggcgtgatatttgagaccggcacggtcagcgacattgatgaaaagaacgtccgcgtgcgcgtgcgcctgccggggaaaaacaacctgcggacctggtggctggacgtgcttcagcacaacacccagaacaacaaggactactggctgccggatatcggcgagcaggttcgcctgctgcttgatgagcacgccgaggatggcgtggtgctgggcagtacctacaacgcgcaggaccgacccgtcattgccgatcgcgacaaacgccgtactgactttgcggacggtacctttgtggaatacaaccgaaaaaacagtgccatgaccatcggtggagccatcagaacgctgaccatcaccacccacagcgatatcaccgtacagaccgacacacaggcgactgtgatcgcaaaagagagcgccaccgtcagaacacaacacgccacggtggacagtcccgaaaccgatattaccggtaatgtcaccgttgagggtgatcttctggtaaaaggcggcattgccggccagggcgggctggcgatttccggtgacaaaggcggtgtggcggcggccattgacggcattctgaaggctaccggcgatctgcagtcggcccgtgtctcgctggaagaccatcagcacccgaacggccacaacggcagtccgaccggtgcccctgtgaagtaa

SEQ ID NO: 397978 - DNA, 294 bp, Salmonella enterica
gtgaccggggctgatgacattgcccagtccatccgtatcattctggcgaccccgaaggggtctgatccgcatcgccctgagtttggcaatcagctttaccgttacctggactggccggtggagcgcgcccgcccctatgtcatccgtgaagctgtggatgccatccgccagtgggaaacacgctgtcaggtggtgcgggtggagccggtgacggacggtgagcatatgactctgcgtgtacgctggcgcgtggccggaggtgcagacacatcaacggaggtggtatggcgctag

SEQ ID NO: 397979 - DNA, 1116 bp, Salmonella enterica
atggcgctagtcctggcggacccggtgtttgtggaaaccgatccggaaaaaatcacccgtgaactggtggagaaataccaggctgactccggtaagacgctttacccggcgcaggatgagatgctgctcattaatcttattgcctaccgggagtctctggtcagatccgcaatacaggatgccgcctgccagaatctggtggccaaatcccgcgcaccgatgctggattatcttggtgagctggttggcgtataccgtctggatgcaaaagctgccaccaccccgctgcagttctcgctggcgtcacctgctgtccggccggtacttattccggcgggtacccgtgtcagtgccagcgacagtgtggtgtttgccacagatgaggacaccactctgccagcagggagtgatcgggtcagtattcgggccacctgtaccctgccggggctggcaggtaacgactggcagcctgcacaaatcagcaacctgatggacgatattggtgacggtaacctggattttaccgtcactaatccatccgtcagtaccggcggcgctgacccggagagtgacgatcacctgcgtgagcgaatcatgctggccccggagtccttcagtaatgcaggctccaggggggcttaccgttttcatgcaatgagtgctcatcaggatattattgatgtggctgtcgtccggcctgaaccgggtacggtggagttgtatcctctgctgatttcaggtctgcctgatcagaacctgctggatctggtggccgggatttgttctgacgaaaagatgcggccgctgactgacacagtacaggtaaaaccaccggttgaggtggattacagcatcagtgcatccatccgggtctacgacgatcagaatatggatctggttatgcgccatgcgcgcgaggctgtaacacgctggacgcagcaacagtcagcccgtctgggactggatattatccccagccagatatctgcagcattatccgttccgggggtataccgcgtcacgcttaccgctccggcagagcgcgtgctggccgattatgaatgggcgcgctgtactggtattaccctgataccggaggggaaatctcatggctga

SEQ ID NO: 397980 - DNA, 570 bp, Salmonella enterica
atggctgaccggcacaatatttctctggtgccaccgctggacagagatgagcggtttcgcattctggccggactggcagcccgtctgcaggatattgacctgacgccgctgctggtttatctcgtcgatctgaccgagcccacggccctgccgtggcttgctgaccagttcgccattaccggtgataacggctggagcctggcggaatcagaagatgcccgtcgggcgttgataaagaatgccatcgaactacaccgctacaaaggaaccccctggtccattcgccaggttattcgtaacctggggtttggagaggtggagttgcgtgaaggcaatgaccggctggacccggccattgccgccaggtatccggaggggactcactgggcactctaccaggtcattctgacagtcaccatcaccaatgatcaggcagcacttttacgccggacactggaggtttttgctccagcccgttgtgtactggcgtcgctggactatacctctgtccccatacgatacaacgataccgcccgttatggcgggacctacaatcacgggagcagttaa

SEQ ID NO: 397981 - DNA, 597 bp, Salmonella enterica
atgtatcactacagcccgtcaaaaaatgccttttaccctgacgaactgaaacaggtttatatcgatgccgggacattcccggatgatactgttgaggtcgatgatgctgtctggctggagttcgccggtaatcacccgcccgaaggcaagcaacgcgcagccggtagtgacaatctgccctgctgggtggatatcccgctgccggatattgatgatgcccgcagccggaaacacaccgaaattaacacctggcgtaatacgcaggaaaacgcgaattacgtatttcagtttaacaatcacaactgggactacggcaaggccacccaggagcgattaagcctctcagtacaaatggctaaatcaaataaattacctgaaggctttatctggacggacgccgataataacgacgtgccaatgacagcgggtgaattactcaacctcagcgacgccatcgaccaggcgatgttcaccaaaggcctgcaaatccatatgcgccagcgacagatgaaagaagaggtggacaaactgaccgacgcaaaatccgtcctggattatgttgtcggctggcctgatgcagtggttaaagtacgttaa

SEQ ID NO: 397982 - DNA, 444 bp, Salmonella enterica
atgagtttatatctttataaacaaaaaagtaaagaatttgattgtttagattttactaatcacaatgacggcatgagcacaaaagaaataagaagcaagcgactagctgactggtttgctgagcgcactcttcctgagagagagaaaagctatttatcacaactgataaatggtaagacttcttttggcgaaagggcggcacggcggatagaaagggattacaacatgcccccaggttatctggatgctatggatggcggtaatgagcatgacggctctatgccttcagtgctttcgtcaatgcttactgctgatgaagttaacttaattaagttttatcgagggtttccggattctgagaaaaaaacagtactaattgaattcgaaacaaagttcaaaaaatacaaccagttattcgctgaattactcgcctcccgtaagtaa

SEQ ID NO: 397983 - DNA, 252 bp, Salmonella enterica
atgcaacttagtcaatattttttagagcgcggtaacgcgaagttcctagctgaaaaacttggaatatcaaaatcatatctatctcagatggcctctggaaaatccgccatttcaccagaacgggctatagagattgaaaaccacacaaaaggcgttgttacgagggctgattgtctgccagatcgctggatgaacatttggccagaattcacccccccaagagaaactaataaagaatcgataactcaatga

SEQ ID NO: 397984 - DNA, 192 bp, Salmonella enterica
gtggagctcgatatcgccgaagtggtagacataatcaggcaaggcgggaagtttttaatttcgagtgaggaaggaaaaataaccgggcttgaaaaggtaagaaaaaaccagtttttgctgactattgaagaatttaaagaactgtctaaagatgctggttgcattgacgaaaccgagagtaagctgcaataa

SEQ ID NO: 397985 - DNA, 366 bp, Salmonella enterica
atgagtaaattcaccacccccgcgattctggagatgctggagcactacaggtggcgcgtctatgaaccatttgagttttacctgagcgatgacaacagcgatgttattgaggtgccggctggtttcgtcaccgacctcgccagcgtgccgcgtatcttctggacaattctcccgcctgacggcaaatacgccaaagcggccattattcacgactggatgtacgacaacgcgctacgcacaaaaaaagaggccgacaaaatcttccttgacgggatgatggtgctgggtgtgccgaagtggaagagaacggtaatgtattgggctgtgcgggtgttcgggcgggggatgtaccgcgacagcaggtag

SEQ ID NO: 397986 - DNA, 267 bp, Salmonella enterica
atgttcgttgaactggtttatgacaaacgcaatgttgaggggctcgaaggggccagagagattatcctggcagagctgacgaagcgagtgcaccagattttccctgatgccgaagtgaaggtgaagccgatgcaggcgaacggcctgaatagcgatgccagcaaaagcgatcgggaaaaactgaaccgcatgttggaggaaatgtttgatgaatccgacatgtggctggtatctgaattcccgtcagtgcgacaggttggagtgtag

SEQ ID NO: 397987 - DNA, 450 bp, Salmonella enterica
gtgaatgtcagtctgttcgtctctttcctcttccggttccgcctgctgaacagtcaccacattgccgactggctgatagatattgccgagccacggttccggctgcttgtgctccagaacattgataccttcgtcctcggcatcccgtattttctcctcggcgcgtttacgcatccctttgatacgctgttgatgtttgtggtattccgcactgaccgggaaggcggcgcgcttgttgccattccagatagcctcacagataaaggaaccatccaggcggcgcacaatgattttctccgcattgtgaatgtcatagctgataagcaccttacggccatgctcgtcccgcagctccggcgcgtaataaatgttgttcagccacttaatttcacagcggtatactggtctttccaccaccggacggaacatatcgcgcagttcgacgtctga

SEQ ID NO: 397988 - DNA, 591 bp, Salmonella enterica
atggataaagaaaatgctttttcttttactgatgagggaaaagaaagtatccaggacaggatcaagcaactcatgggcaatcgaagcatgcggcaaacggctattgcctgggggctttcgtattcaacgttaaataactattttgaaaaaggaactacgcctggtctaaaagtagttaaggacatatgtcaggctgaaaatgtatcattggaatggcttgttttaggaaaagggaatcagttcccccaacctcagacccagcgctcatcacagcagccacagcagccacagcagccacagcaatatgaggcagcaagagataaagatgtgcaagtaattctagctatttggcaaggtcttgaacccaaagagcgggaggacttaagtaaactactgtcgcgccgtggcggtgattttcttgctatcttgcttgatcagcacatacaagagttgcatgaacttatgggggttcgacgcctgcttgctctggagttaaaaaacatgccagaagaacgcgttagagagatttacgaagaatacgaaactgcaggtgatcgtttaaatttaactgataagcaggctagtgcgtga

SEQ ID NO: 397989 - DNA, 234 bp, Salmonella enterica
atgtatgaaagggttgcccgacttgaagtcagtgttgatcacatacaaaaagatatcggtaatattaaggaaacactgaattcctttgacataagaatcaaaggcatcgaaatcaaaatgtggctggcgaccgggatacttactgcgggcttgaccctcctggggtggctgggatacgtcattaacaattacttaccccagattcttcacgccgtacagatcattagcaactga

SEQ ID NO: 397990 - DNA, 129 bp, Salmonella enterica
atgtttgctcctgaggttggtttgcaaagggtggcatctgtttcgatgaccgaagatcaggcgcacaacctctataaactacttggtgatattctgcatcaccaaaaagttcgaagggaggatagatag

SEQ ID NO: 397991 - DNA, 201 bp, Salmonella enterica
atgccacataacgtaagatgccagcattgcaataaactgctcgcaagagccagttttgacttcattgaggtcaaatgcccgcgctgtaagacactcaacacaatcacctcaccgagcgccatcgagcaccccacatacacaaggaatcacgcctgtggggaacaacaagaaacatcagtcccgcgttatcacaccgcctga

SEQ ID NO: 397992 - DNA, 930 bp, Salmonella enterica
atgccactggaaaaaggaattgccgaactggtcgctgggtttatcgccgcgggccgtccctcttcacgagagcagaatattgatgaccggagagcgggttatattgccagcacgtcgctggcgggtgagaaagaaattcgggtgagttcggaagatatcgtgctggaagggatgacatttcgcgtcgtttcgccgccaaacgcatccggttctctaccctgtatcctctactatcacggcggctgttttgttagcggcggctttctgactcatgacccccagctacggcaactggcctggaaaagcggctgtaaggtgattgccattcagtatcgtcttgcgccagaacacaccttccctgcggctcatgacgacgctgaacgcggggccaatatcgtccatcaatacgcggagcagttaggcatcgatcgtgaacgtatcacgcttgctggcgacagcgcaggcgggcacttggcattggtcagcgcgctacgcctgaaatccaccgcccactggtctccggcgaagctgctgttgatctacccgatgcttgacgctactgccagtttccccagctatgccagcaacgggcaagactacatcatcacccgcgatacgctgttatcgggtttcgaaatgtatctccaggataccgacctccgccacccggaagccagtccgatatggcgtgaagattttgccggtttaccgccggtgcatatcctcaccgcagagttcgacccactgcgtgatgaaggcgaagcgctatatcaccgtctgaacgaccagggtgtggaatgtacttgccagcgctatctcggcgttatccacgggtttttccagctcggaggcgtgagccaagcggcacgaagcgccatgcgagatgtggcctggcgtgttgtaagtccatcaacaggcaaaatgacctaa

SEQ ID NO: 397993 - DNA, 516 bp, Salmonella enterica
atgaacacattcagaaaaggacttgatttattgctgggcgctatctgttgcctggtgctggcgataatggttggcatcgcctgctggcaggtggtgagccgctacattctgggcgttcccagcacccttaccgaagagatgctgcgatttctcctggtgtgggtatcaatgctgggcatggcttttgtcgccggtcagaaacagcatattagcctgactctcttactggataaggtgtcgccgacgattcgcggctggtgggatattatcctgcaggtcatttttatcgcgttttccatttgggtattgattatcggcggcttaaagatttctgcgatttctatgctgcaaatctcccctgcgctgggcattccgatggggaaaatttattacgcgctcccctgcgcgggcgtactgatcatcctctatgggctgctaaatatcgttgacgccctgaaagctatccattccgccacggataccactgagcacactctggagaaatcacatgattga

SEQ ID NO: 397994 - DNA, 207 bp, Salmonella enterica
atggtcaaacaaaaagacgtcaggttgttttgcacccctttcctccccgccccattgggcgaggtctccagggggcattctgatgaatatgatgaaaaaaaagcgacaagcatttgcggactctttttattcatggtgcccgcgctgtcgtcagggttgccacgaataacaatggtggacgtctgcatcagtgggttaatcagttga

SEQ ID NO: 397995 - DNA, 594 bp, Salmonella enterica
atgtgcaggcataatcattctcctgaaaaaattgaggcgacaactatcctgacacaggggggaataaccgttcaacttcgccagaataagcaccgattaacggcactgaaaaaagtgccagaattcgcctggctgaatgacgtttcctgcgtaccgatacagcagtcgctacgccaccaacaagccgcgttctctaacttctttgccggacgtgctgcatatcccgcattcaaaagtaagtgccataaacaggctgcggaattgaccgccagcgcgtttaaataccgtgacggcagtctgtatatggcaaagagtaaaacaccgttagatgtgcgctggccccgccctttgccattcacaccttccacggtcggtattgatgttagtttaaaatatttgtttgtcactgatactggatttaagtccggcaatccccgccataccgctaaatacgcggcacgcctgacgctaaagcaaaaaagccaaaggctcaaagaaccgcgccaaagcccgcttaaaggtggcccgactccacgcgaaaattgccgattgccgaatggatgccttacacaaggccacccgcaaactgattaa

SEQ ID NO: 397996 - DNA, 1221 bp, Salmonella enterica
atgaggcttttctacaccacacctgattttgtttacaaaggccggatatgcgcgggcattccatttctctgcaatgacgacatgacattcatgccagttgcaaatgattacctgctttgggtctgcctggaaaatgccagtaccgccagtcccgcgacctggaaaagctatgctgagacgttattcgattatttttcctggctatcgaccaatgggtttgcctgggatgcgttgccgataaaaggaccccagggtgaggaaatatcgaacctcgcgatgtaccgcaactggtccatggatctgatacatccatcttcaggcaagccacgtgttgcctccagtacactccgccgtcggatgacacaaatcatggctttctatcgttgggcattacagcgaaaaaggataccggcattaccctgggaaaccacattaatgcggggtttgcggccgaagtctccactatcgatgtatcgccatacgcgcgctgcggaagaggttcgcagagatatgatccgaccccgggtaccgaaaaaacagatccctttcctgcacctggatcaatgcagggcgttaatgcaggcctgccgctctgaaacccttaaactgatgaccgcactgatgttacagaccgggcttcgtaatgaggagtgccggacgttcccgcgacaatatatcttcgatccagttggacaacctcgcgataagcgctttgctgttgagctttctccctcggacatggcgattaaaggcagtaaacctcgccggatttatctctcctggtggttgatgaaatccctgtttgactacctgaactttgggcaaggcgcccggcgggcaaaacgctatcgtcagactcagggagagaagtcgccttttgtctttctcaaccaggcgggcgccccctggagtgaaaaggggctgaataacgcctaccgcaaactgtgggctgcagaaggcgatggggctccccgcctggattttcgtgtcacgccacatcagttgcggcatacgtttgccacgctggaactgtacgccgaaagccagaataacaatctggcgacagcactggcatgggttcgcgacagactcggtcattcctccatccagaccacgacagtctatgtacactgcctggacctgatgggcgaaagcgacctgaatctgtaccagcgcgagatcgacgcccttctggaagggaggcataatgagtcgtcgtaa

SEQ ID NO: 397997 - DNA, 1710 bp, Salmonella enterica
atgagtcgtcgtaaaaattattctctggatgcggcaccgaagcgggcccgtgtcgatacgctcccggtatcgccccgttggcgcgtgatggtggaggacgcaatatacgatttaagcccgtggcgatatcacaacgtctcgggccagtttgccgaccgtgatgatctcctgatatccttttgcacggcactggagagtctggcccggtttctttctcccaccacgcttcaggcgctttgtcgtagcggactcccccgctggtttcactaccttgatgcccgggtggatagcgggcagtccgccgtacggtatcttgctgacattcacggcgatacgctggaagcgtatgcagcctggttgctgcactgccccgccagaaccgcatcaggccgccactcttattccggtgcccgcaccatttatagtcagtgtaaatcgattctgctggaatgcattaatctcggtatgtttagccgggattgtctgccagataacccgttcccggacagcaaccgggctcaggttcctcaccgtccctactccaggaatgaaatgcgccgactgctgaccgcgctggccaccgatttagcgcagatccggcggggtgagttccgggggggccagagtgagcgccttttagtgtatatcctgttgattgccgcgaaaaccggacgtaacccgacgcccctttttgagctgcgtcgagatgccctgcagcctcaccctctgaagccggatacgcatgccttgctaatgacgtacaaacgcagaggcaacaatatcgctgttcagtcgctccggcgcacgcgggaaattgaaagtgccgtgtccatccgtaccgatattgccacgctgttccaggaagtttgtctgttcactgctcccttggttaacctggctccgcaggggatgaggcactgtctctggttgtttgaacgtgataacagggggaagtacggcggggggatagcttgtctgaacaccagtaatacgcactatgccatcggccagtttgtggcaaaacacaacctgcggggggatgatattgatccggccagcggcgaggaaaaaccgtttcatttgacatttatgcggttgcgtaaaaccttcgcgtcgcgcctgtggtatttaaccggcggtgatgtggtcagaaccgccagtgcactcggcaatcagccaccggtcaccgacactcactatcttgccgtcaccccggaaatggttcgccgtcatcgttttgtcggaaggtgccttgaagcctctcttcgcggcaaggcaaatgaccctgccaccgtcagcctactggcggaagatatgcagatatcggttgacgatgtgaagcgctgtctgggtggacaatacaataccggcgtcggccgctgttcatcgcccttctacgggaagttcgcaccgcagaccggggaggccgtctgcaccgatttccttcactgtttccgctgccccaatcaagtggtgatggagagcgatttatatcgtctcttcagtttctactggctgctgattaaggtgcgcagtcggctggaacgtcgccgctggcatcaggtttatggctgggtgatacgtgagatcgatcaggtgattgctccccatttccctgtgcatcgagtgcaacaggcccgggaagccgcacaccgacagcctcatcccctgtggcaggatctggcccggttcgggggacataatgagtag

SEQ ID NO: 397998 - DNA, 2061 bp, Salmonella enterica
atgagtagtatcggtagccatctggtggatatcaggccacttcaagcccccgacatcgccgatgtggtcatcagccggcgaggaagccgtgtgctgtcgcagtaccgggataatgtctgggatttggctccctacctgccggtgaagaacctgcgacagtcgacaatccactttgatatcgccctgccggatggcagcgtgttgaccgacccacaacatgcgcctctgctggccgccgccaaacgctttctctatatgcgctggcgtatcaaagccccccattcccgaaaatatatcgctgccaaaactgtgatgaacaactggtcacagttacggttgttgttgaagtggatggtcttgcagggaatggcgtcttttagtgcacttaccccggaactgtgccaggcttatgccgccagtcaggaaggcaaacttaaaagcagcacccgcgtcatcaatctccagattttgtctacctattatgacctgcgttcgcatctggttgacaatttgcccgggtatccgtggtctgacaccgttcctctcgcgctgaccggaacccgtcacgggcacagaatgaacggccagcggcagtcaacaacggaagtgatcccgctgagaatattgcggttactggtccagaaggcgctggatctgattgaaaaccgggcagcgcacttgctggatattcgcgatcgtattctgcattacaaacgtgatatcgccaggtctttgcgcatcacgcatcgcgccagatatccccagggattttccagcatctaccgtgatgaagacacctatctgagcgtgcgggtttcccaccttgcttcgcagcacattaatgccttgtgcgctgagcaaggtctggtatctcatgctgaattcaagaaacagatgatccatctgagaacggcctgttacctgatttgcgccgtcttttctggcatgcgggatgctgaactggcttctctagagattgggtgtttttcccgaaaggaaggggatgatggcgagacgttttgttggctgagaggcctcacctataaactggaagccgatccgatgccagccgaatggatggtcccagacatggtggaaaaagccgtcagggtggccacccgcctgggggaaccccagcgagcacgatgtcaggtccggcggaccagactggaagccatgctgtcagaagatactctcccggctgctgtccgtaatgcattactgctcgagctggatgaagcccgtaaacaccagtacgcgctgatggtgaccgaaagagaacaggggcgtattctggccctcagcggctgcgtggcgatcgcctgtctgcgcgactttgcgactatggcgggagccatcgttgaaccctccgatgttgacggggtcagcgatcatgctgccgtgtccgtgggccaaccctggccgctggcctcacatcaatttcgtagaaccttcgcggtgtacgtggctcatcacctgatgggcgacttgcgctacctgcgtgagcatttcaaacactggtcgatggatatgaccctttattacgccaggcaggaggggcacgatcaggcgctgttagcggatgttctcaatgagcgagacgcgctgcaggcggtcatgatggaaacgtggctcgccacggagatccctctgaccgggaaaggcggaaaacgtcttctcgcataccgtcagaggggagaggtgaagacggtgaagaacctgcgcgatttctgtcgccagctgggcgacgacgtttttattcgtggcaccgggcattcctggtgtatggccagtggtagcgggtgtgatggttccggcctgtatgatgcgctgcattgcctgtcctgcgagaacgctctgattgatggtacccaacgccccatctggcgcgaaatacgtcagcaacaaattgacgttttgcactgctctgacctgggcctcccttcccgtgctcgttgcctcgagcatctgcgcgaggcagagcgtattttacgcgaattaggggataacgtagagccttatgacatgtctgacgcaccgttttctggaaaaacattgtga

SEQ ID NO: 397999 - DNA, 372 bp, Salmonella enterica
gtgaaaacaaaacgcaccgatacgcggacctctctggaactcgccctgaaacggctccaggcggatgttcccctcaccgtgccgaaaggtggcaaaataagcatcgcagcggtggcccgagaggccggggtcagccatgccacgatacataaccgctatccggatattgctgagcagatccggggaattgtgaaacaaacgaccagcgcctcgccggcattgcaaaaaaaccaacatgacgttgctgccaccctttcccgcttacgtcaggaaaacgcgcagctcaaaagtgacctggcccggtcgcagtcgcttaattatcgtcttctcaaagaaaatgaagccctgcgggcgtcagtcaaatcgtcctga

SEQ ID NO: 398000 - DNA, 1695 bp, Salmonella enterica
atggggctactggggtgtatcacggtaccgaccgttctggcggcgccgaccgatgatgcccgcctgctgcaggaggcggcacgtcagtttcagcagcaggagcagcagcaaaaagcccgcgacaatgccctgacacccaaagcacctgatatccgcctttctgaggaagcatcttctcccgctcatctggttttccccgaagaaaaaccctgctttgcgattaaccaggtcaccctgaccgggcaggagaccctgccgcgctgggtaccgttcacgcgcctggcgaaccaggcggtagggcactgcgtgggggtgaaaggcatcaacctcctgataagcacgctgcaaaaccggctgatcaaccacggctgggtcaccacccgcgtgctggcaccgcaacaggacctgagccgtggagagctgcaactgcgtattgtgccgggtagcgtgcgtgatgtgcggctgacaccgtcatcgtcatcccgggttagtctctattccgcgatgccagcccatcgtggcaacctgcttgacgtgcgggatattgagcaggggcttgaaaaccttcagcggctgccgacggtgaccgcccggatggccctgcatccgggagaagcacccggggaaagcgatatcctgatagagcgcacccagtcgcgcttctggcgcgtcggtgcctgggtcgatgatacgggcaccgggagtaccggccgttaccagggcggtgtgatgctggcgctggataatccgacctcgctctcagacctgttttacgttacggccagccgggacctgggttttgccggcaaaaaaagcaccaaaaacctgtccggccactattcggttccctttggttactggctcctgggcatcaccgccagtgattatgactaccatcagaccatcgcgggacgcaatgccgacattctgtatgcgggcaaaagccgaacgcttgatgtccagctaagccgcgtgctgcaccgtaacgccacctcaaaaaccaccgccacctatgatgtgctggcacgtgaaacccgcaattttatcagtaacgttgaaattggtgaccagaagcgacgtaccagcgcctggcggctggggttaacccaccgtcattatctggggccggcgacgctggatgcgggagtcagctatcagcgcggtacgcgctggttcggggccctgccggcgccggaagagcactgggacgatgagggcagcgtgaccgcgctgtccaaaatcctcaactggaatgcctccctcactgcgccctttgcgctcggcggacaggatttcagctggaataccacctggtggcgacagatgagcaataccccgctcacgccgcaggatgagttttctatcggcaaccgctggacggtgcgcgggttcgatggcgaacgcacgctcagcgccaccaatggctggacagtgcagaacacgctggcctggcgcacgcccgtgcctgcgcaggagctgtatctgggggcagactacggggaagtgagcggcaacagcaccacgcagagcaacctgacgggccgccacctggccggttcggtactgggattacggggtgccatcccctccgccggcgtcagttatgacctgtttgtcgggctacctctttctaaaccggcggggttcagaaccgacccggtgacgtctggcttcagcctgagctggaactattaa

SEQ ID NO: 398001 - DNA, 9585 bp, Salmonella enterica
atgaacaaacacctctatcgcattatttttaacgccgcccgcggcatgctgatggtcgtggctgaaattacccgcagcggccacctccgtgcggcccgccggcgttcaccgtcgtgcggtcgggaggttcaggtgcgcctgtctccggtatctctggcgctgtggctggccgcagggctcgtcagcctgccggcgcaggccgatatcgtggcagatggcaatgcccccggcaaccagcagcccaccgtgctgtccacggccagcgggctgcctcaggtcaatattcagaccccgaacggtcagggggtctcacgcaaccagtacagccagtttgatgtcggtgaacgcggcgccattctgaataacagccataaaaataccgccacacagctcgcgggaatggtggcgggcaacccctggctggccagacaggaagcccgcatcatcctcaatgaagtcaacagccgcaaccccagccagctgaacgggttcatcgaagtcgccggccggcgggccgaggtggtgattgccaacccgtccgggattacctgcgcaggctgtggctttatcaacgcgtcccgcagcaccctcgcggccggtcaggttctgatggaaaacggtcagcttaaggggtttgatgtaaatggtggtcgcatcaatatcgacggcaaggggctgaatgccagtgataccgattatacggcgctgattgcccgagcggtggtggttaacggcaaagtccatgcacgtgaactcaccgtgaccaccggccagaatgtgacggacgcccggggtcatgtgagcagcataaaacccgctactgacgaaggtaaaccggcgtttgccctcgatgtggcggcactgggcggcatgtacgcgaataaaatcactctggtgggcaccgaaaaggggctgggcgtgcgtaacgccggcgagctgggggccggcgcgggggagctgacgctcaccgtggacggcaaactggacaaccgtggacaactgcaaagccagagcagtctccgcatagccagtcagggtgacctgaacaacccggggagtctggctgccggggaagatgtcagtctgtctgccaccgggacgttacgtaatgaagggcttgtccgggcgggcggcaacgccaccctgaccgccggccgtattgagagcacctccggcagtcatcttgccgccggcgtggacgtccaaggcgggataacccagccgggcaatctggtgctgaccagctccggagagttaaaagcgcaggggcagaatctggcacaaaatacgctggaagctcgcggcagtcgtgtcgatgtgggcggcagtcagagtgcggcaaaaatgatgatattgaccgccaccaagggggacgttcgtaccacgggggctactctcagggcggagagtgccaatattcaggccgctaccggatttaataacgacgacggtaagctgtcggcaggcaccctgtcgctgcaggcgcaaagtatcgacaataaccgcgggttgctgcgtcaggaaaacgcgcaggacctgctcctcgacagtggagtaatacgcaacaaccaggggacgctgaccaacaggggcaataccgttatccgggccgaccgggtggaaaaccgcgggggaatgcttgctggcaatggccagaacctcagtgtcactaccgcgatgctggataatcagcagggtaccgtacagctggccggggacggtacgctgtcattgcacgctgaccacctgcagggccaccagggaactctccggtcggcgggaaaactgagcctcaccggctatgaccttgacctgtctgccggacacgctcaggcgcagcaactcgtcgtcaccgctgactcactgaacaaccagaacggcctgctgtcgcagcgcggtgacggtgacatgacgttgacgctgcgggacaacctgaacaaccacggtggacggactgaaagcggcggtaacctgacgttcagcgcggcgggtctggataataccgggggtaccctgctggccgcaggccggggcaatcttaacctgaacacgacgggcgatatcaccaacacccagggcaaactgctggccggcggtgccgtgggcctgaccgctaatcagcttgaaactccgggagggctgatttccgccaccggcgaagaggctaccctctcgctgagtcaggacctgaataacgccggcgggcgcatcgaagccagaggggcggtcgatgtccacagccagtcgcttaataacgcagcaggcacagtgctggggcgcagggtgtccgtcgatacccgtcagggcgcgcttgccagtaccggtggtcgcatcgtggctgaggaccatctgcagatagccagcggtgtgctcgacaacacgggcggccgcctgcagtccgggggggacctgcacctggatactcacggacaggcgctgaccaataccggaaccacgtcggcggggatactgagcggcggcacgctgtcgctgaccgccggggctgtcgataatactcagggcttgatggccgccacgggcgggatgaccgttaacagccggggactcaacaataccgcgggcaggctgctcgccgaccagggggtgaccctgaaaacccgcgccgttaacaacgcccgcggtctggtgcagtccggtgcaggtctgtccctggatacgcagggtgaacagctggccagtaccgacagcggtgaaaccggaggcctggtcgccggcggtgacctgcagctgaataccgggcagctcgacggtcgccggggcgtgatactcgggcaaaatgttcgtattgatacccggcagcaggcgttcagtcaccaggaggggcagttgatggcccgcggggaactgtggctggataccggccggctggataacagcgcggggcgtatccagtcggggggcgacgcgcaactcgacacgcacggacagtcactgaccaaccgggacagcggtaaagccgggggaatactgggcggtggtgcgctgacgctcaggacgggcgatactgacaaccggcggggcacgcttatcggccttggcgataccaccgtgaaggcggggagcctggataaccgttccggcaccctggcgagcgataccggccgccttgccctgaccgcgggcgaaacccgcaaccagggcggcctgctgcaggcggcgaccgccctgacgctggatacacagggacagtcactgttcaacgccgacagcggggatgccggtggcattcgcagccggggaacccttaccctgatgagcggcacgctcgacaaccagcggggcgtggtggtgtcatcggacgtggcccggctgaccacctcggacctgcataatcagcaggggcagctgaccggtcacggcgggctgagcctcaccactcacgcgctgaccagtactgcggggcgcatccagtctgacgccggactgacgataaacacgcagggacacgcgctggaaaacaccgacagcggtgagcgtggcggtatcgtcgcgcttaaggacctccgcctcagcagtggccgcctgaataatcaggcgggatttatcgccaccggtgctcaggctgacctcgttaccaccacgctgaacaacgcacgggggcaggtagccagcaacggggggttagcgatacacagtcaggctctcagcaatacggacggtaaactgcagtcggcggagaacgtgcttatcgacacggcggggcagacactcgacaaccagcgcggccagattgtcggtgatgcaaacacgcgcatcgacagtggcgcactggataaccagtacgggcatcttcagggcggtaccgacctctcggtcaatactcatcagaatgccatggataatcagcacggcaccctgctctctgccggagtattgacgcttaatgccggtgagctcaacaatcagtccggtgaactcaccagccagggtgtcgggcaactcactctcattcaacaactggacaactcgcagggcctggtgcgcgccgggcacattctggacattactgcggctcaggtgattaaccgtgacaccctctcgccgggtaaagggattgaggcagcgtcgctgacgatgtcgacacagacactggacaacacccgcggtgcgctgcgggccgcttctgcgctgacggccaccgtacgtcaggcgctggagaatgtggccggtctggtctcgtcaggcgggatgctggcggtgcaggatgccgtgcaggggcaggccctgtcgataaacaatcagcagggcacgcttatcgccgggactgacggtcagataaccgccgcaaccctgagcggcgacggtcaggtgctgtcccagggcaatttgggtctccacctggcgcgtgattttcacaatacgcagacggtgggggccaatggcaatctgacgctggaaacaccggcgactatcgtgaacgacgggcgcatcactgccggcgacacactcaccctcactgggcagcaggtcaccaacaccgcgcaggcagaaatcagcgcgcaggaaacccatatcaacgcacaggacacgctgaccaataccggcctgattgacggcgggttcacccatctggccgccggtacgctcaccaataccgggacgggccgtatttacggtgaccatgtggcactccaggccggtacgcttaataacctgaacagcgatggcaaggcggcggctattgccgcccgtgagcgtctggatatcggcgccggcacggtcaataaccgcgaccatgcccttatcaccagcccgggtgacctgcacaccggcgggcaactggatgaacagtatcaggccacgggtcagggcggccagcttaataatcacggcgctacgattgaagcgggccgtgacggcagcatcaatatgcgcgaggtgaataacaccaatcgccacctggtgaccgaagtggtacagacagaaaagagtcagcatcatgacgcggtgctgaaaggacagaccacccgctatgactgggacagggtcgacaccagcaaaaagaacaagtacggcgtccacaccgccgtgatgcccgacggcagccgcaatgacgagttttacgagtacaaatacacccgtaccgtcatggaaacccaaatcagggacagcgacccgggtaaaattctcgccggcggcaacctgacgctgaacggtgaacgggtggtcaaccacgacagccagatagtggccggcggtaccctgggcggcatggtcggtgagctagataatcaggcaacgaaaggcgaccgtgtcaccacggatgccggctggcaaaagcgctggtatgcgaagaagaaaaagaaaaaaattggcggcactaaaacctcacagggcaggagcacaagtgattaccgcccggcgccagtgacggaaaccatcgacctgaagaccctgacgtggcaagggaataccctgcctgccggcagtggcttccaggctgacgggcggcaggcagcccgtgtcgatacggcggtagccagcgtcagcaacatcgatacagtcgggccgatggcaccggtgagcctgacgacattaccgggcggcacagttaccctgacgggtctggcggagatgaaggaccgtccgctggaactgccggccggccagcagtttgcgctgacgctgccgtccacgcttgtcgacggacagccggtgacgccggttatcagggtggttgccccgaacacgcgcctgccggataacagcctgttcaccctacacggtggcatcgacagtcattacctggtggaaaccgacccgcggttcacccgtcagaagcaatggctgggcagcgactatatgcagaacgccctgctcagtgaccccgcccggatacataagcgcctgggcgacgggtactatgagcagggactgatacgcgatcaggttatgcagctgaccggtggtcgccggctggccggctacggcagtgacgaagagcagttcagggggctgatgaacaacggtatcgcgtttgcgagacagtatgaccttaagccgggcgtggcgttaaccccggcacagatggcgttgctgaccacggacatggtctggctggtgaatcagacggtcaccctgccggatggcagcacgcagacggtgcaggtgccgcaggtgtatgccagagtgaaagacggcgacctgaccggcgacggcgccctgctgggcggaaagcgcgtcgtgctgaatgcccgcggtgatatcaccaacagcggcgccatcagggggcgtgaggtgacacagctggccgcacagaccctggccaacagcgggtatattcaggggaaccgggttgacctgaccgcgcggcaggatattcataacaccggtggtcagctgcggggagagtcatcactgtccctgctggccggtcgcaacatcaccagtgaaaccactacccgcaccgatggcaccgaccgctggctggaccggccggcggggatgtatgtgcaggcaccgaacggtcggcttacgctcagcgcccttaacaacatatccctctctgcgacagaactcagtaacgccggtgaaaacggcacaacctctgttcaggccggtaacgacctgcatctggagtcggtagccacccggcacagcgagcacggtgactggggcggtggcaacacccgtgacctgactcagcaggcagacgtcggtacccgtataactaccccgggagcgattgcgctcggtgctggtcgggatatccttgcccaggccgctgacgtcaccgccgggggcgcgctgacggcgcaggcgggacgggatatccggctcaccaccggcaacgccaccacggacctggtggagcacagcaaacaaaacagtagtggcctgctgtcgaagagcagtcttgagacccacgatgaagtccatgaccgtcaggctctgggtgccacgctgagtggggacagcgtagatatccgggcgaagcatgacgtgcgtatagaagccggtaatgtggtcggcacgcaggatgtcagagtccttgcgggaaataatctgacggtgaccaccgccgatgaaacccaccaggaaacccatctgcgcaaagaaacgaacacgggcctgctgagctccggcggtatgggctttaccgttggcgcgaaaaaagagtcctgggatgacgccagccaggcgcgcaacggaaaggcctccctggtcggtagcctgaaaggcgacaccgtcctgctggcagggcagcattaccagcaaaccggcagtaccgtttcctcgtcggcagggaacgtggtcattcggggcaaaagtgttgccgttgaggcgggaaaaaacagcaacgcatcacaatacgcacacgccctggagcagaaaggcttcaccctggcagtcaacgtacctgtggtgcaggcggtccagggggcgactcagaccgtgcagcgcgtggggaaaagcaacgatgaccgcgtcaatatgctggccgctgcgaacgcggcgtgggacagtgcccgggcagcgaactcgctgatgaacagcgcacagggactgatgagtaacggggcgcagggcgtcgctcagaacgtcagcgtctcgctgacctatggcgagaaaaagcaagaagacacccgcaacacgaacggcacaactgctcaggcaagcaaaatcaatgccggaaagcacgctgtgctgatagcgacaggcggtgaacaatcggacatcaccgttaccggctcagacatcggcggcaaacaaggcacacagctgcaggcagaccatgacatcacccttcaggccgccggccaggaacagcatgagcggacggataaccgctccagcggctggaatgccggcattgccgccagctacggccagaatggcgcggcgtttggcattaccgcgggagccagcctgggtaaaggccatggtaatggcgacgaccatacctggcgcaacagtcatatcggtgatatgaacggccagacgcaggtaaccagcgggggaactgccaccctgaaaggcgcccagattactggcagcggcgtcaacatcagcgcggacaatctgaagatagaaagccttcaggacaccatgacgtatgcgggtaaacaacgggatatgagcggacaggtgaccgtcgggtacggagtctcaggctccggcagcttcagtcagtcaaacgtgaatgcggactacgcatcagtgcaggaacagtcgggtatttttgcggggaaaaacgggtatcagattgatatccgtgaccataccggcctcaccggcgggctgataacgtcaagcggcagcgcagagcagtcaggtctcaaccggttcagcaccggaaccctctcatggcaggatatccgcaaccacgcggattacagcggaaacagcgtggggataagcggctcggccagcatgaacaccgacctggggctggggacaaacgccgccgcacaaagcgataaggtcaacgtcgataaagatgggcacaccacaccggctaccggcatggcctcgctgaacaaaacgatgtcagtgggtatcggccacgacagcggcagtgacaaatcaaccacccacagtggaattaatacgggaaacatcatcatcacccaccctgacgcgcagcaacaggctgtcgggggcgtgaaaacggacatcaccaccgaaaccgcggcagaaaattctggcaggctggaaaacaacttcgacaaagaccaggtgtttaaagagctgaacctgcaggttgcggtgaccagagattttagcgccaatgccaatcgccagattagtgaatacatcgatgacaaacaggcagcagcccgtcaggcgttaaaggcggccatggacagccaggatgaggcgaaacgtcagcaggcgcttgatgatatctacaaactgcagtatcagcggcgctttttacaggtgctggtcggtgtggtggcagggtctcccgataccgccattacccagcaaacgctggcgatagcggcgactaaaatgcgggaggaaacagctaaaaattcgtttttatcacccccaatagtggacaggactgggcggattctgagtaacgtctcgggtgacagcaatggctcgtatgatggactgaaactgggcggaacgcggatgagtctggatatcttttgtgcggaaaataacaccagatgcgttacaccaaaaggccacccagaagtccttgagcctaacagccaagggttctttgaatataaaggtgatttgaaacatccaacattcactgaactgttgaaagatggatcaatttctgcgggcctggatggcgacaccggtgggttccagggcgcgggaggacgaattggtcccatagactacaagcccggtactttctggggcgatgtgatggactctgtagtcgaaggctttgctggcacccatgattttattggcggccaactccccggtttttatgacgagatgggaaatacttctcgcggacgtggaccgctgacaaatattgcagcagaaacctggacggtcgccgctattccgctggctactccctttgctgtgagtgaaatcgtttcaccagagttgctggaatttatttttgcggcggggaaataa

SEQ ID NO: 398002 - DNA, 357 bp, Salmonella enterica
atgaaaatatttttaccgctgctgggaatattccttcttaccgggtgtgtggtgcccgatatggactcttcaaattatacagttgtgccttatgtgcagacgtttcagcaagtggggcatatcggtcatactgaccgagagcagcgtaagcgggatctgtatacctgtggtgtgggcagaggagaaaatctagataatggttcgtggtatcgaaatgccctgatgccaggagaaacaagtgaagaactagataaaagagttggaaagattgaacactgtatggaacgcaaagggtatctaattttaggctttgatcaatgtgggccgctaaaagccccgacagggctgtgcaattaa

SEQ ID NO: 398003 - DNA, 546 bp, Salmonella enterica
atgaaaaaagtacggatgatgtctctggtcgttgcaggttttatggtgagtgcactggcgcaggcggaaacgcaaacggtctctctgggctacgcgcacatcaaacctcaggacgaaaaggcccttaacggcgccacgctcggctatcggtatgaatttaatgatgactggggtgtgctgggtaattttacctttgccaaaggcgaccggaaggaaaccgacgatgacgctaaaggcgactttaagtattattcactcatggcggggccgacttaccggattaatgagtatatcagcctgtacggccagctgggcctggcccacttcaaagcgaaatttgatgccaactatgataatggctacagcgagcacagcagtgcatccaaaacggcgctgggctggggcacagggttcattgttaacccggtagacaatgtggccgtaaccgtagggtatgagggtagccggttcaacgtcaatgatgataacggcggcggcaaggtttcagccaacggatttaacgtaagcctgggataccgtttctga

SEQ ID NO: 398004 - DNA, 390 bp, Salmonella enterica
atgtgccgatggcttctgcccggcctgctcggtctggttctgtgcgcgccagtaccgaatacttacgcggccaccgttgaggcaggattctctccggaaggtacagctctccagcttgttcttaagacaattgagaccgcgcagcaggaaatccgtctgatgggctattccttcacctctcctgaggtggtcggggcacttgtcagggcaaaacaccggggcgtcgatgtaggcgtggttctggactggaaagctaatgccgggaagaacaacaatgccagtaaagcagccatgaaccttctggttggtgccggcatcccggttcgtacagtcagtgcttacaaaattctccacgacaaccgtaagctaataatgtgttacatgctataa

SEQ ID NO: 398005 - DNA, 426 bp, Salmonella enterica
ttgagtaatcataataatttactggaaggattccttcacaaacggcacagtgtcagtaaactggccgtgcatctgatctttacgacgaagtatcgacgtaagctatttgacggacagatgatcactcaactgcgtggagcttttgactccgctgctgcaaaacttgaatgcgaaattattgaaatggacggagaacctgaccatgtgcatctgttggttgcttacccgccaaaactggcggtcagtgtgatggtcaacaacctgaaatcagtatcgtcgcgtcagcttcgccagcaaaacacacatttacggatgcaaagtaaaacggggcttttgtggtcgagatcctacttcgtctgtagcactggaggggcaacgattgaaacgctcagagcctacgttcagagtcagtcaacacctgattga

SEQ ID NO: 398006 - DNA, 7656 bp, Salmonella enterica
atgaacaaaatatataaactcaaattcgacaagcgtcgtaatgaactggtggtggtcagtgaaattacggcggggatgggcaaagaaaaaagcaccggtcatctcgccgacctgtcagcgctgtccccgttcagaaaactgccggggaggttaacgcctgtggcgctgctgaccgggctgatttcggggctgttgccggcgatggtactggcggctgacctgcccactggctggcagatagtgggtggccaggggagtatcagcacgtccggcagccagatgaccattcatcagcagacgcagaacatggccaccaactggcacagttttgatattggtaaaaacaacaccgtgcagttcgtgcagcccgacagcagctcggtggcgctgaaccgggtgacgggggccagcgggtcgcagattatggggaccctgaaagccaacggccgggtgttcatcctcaacccgaacggtgtgctgttcgggaaaggcgcaagggtgaacgttggcggcctggtggcctctacgaaacacctcagcaccgcggactttatgaaggggcagtacacgctgagtggcagcggcaatcctggcgcacaggtggtgaaccagggcagcctgacgacgtcgaagggcggctacatcgtgctggccggggagcgggtcagcaacagcgggaccgtcaccacgccgtccgggaaaacggtgctggcagccggtaaaacggtgaccctgcagctggataacggcggtctgacgtcggtgtcggtgaacggcagcgtggtgaatgccctggtggagaaccgggggctgatatcagccactgacgggcaggtgtacctgacggcgaagggacaggacatgctgctgaagacggtggtgaacaacagcggcactgttgaggcaaaagggctggcgagccggggcggcgagatagtgctgaacggcggcgacagtggggtggtaagccagtccggtctgttgctggcagacagtcagaccggccagggtggaaaaatcacgctggagggacagaacatccacctggaaggtcgcagcctgacctcggcgaccgggaaagcgggtggcggtgaggtgtacgcgggcggcggctggcaggggaaggacagcggcatcagaaacgcctcaaaggtggtgatggacaaagcggccacggttgacgtgtccgccaccgaaaatggcaatggcggtacggccgtgctgtggtctgaggattacacgaacttccgggggacggtcctcgcgaaaggcggcgcccggtcaggtaacggcgggaaggtggaaacgtcgtctcatcagaatcttcaggcatccggtgacgtggatgcgtcggcacgcgccgggcgtggcggagagtggctgctggacccgacggacgtgaacatcgtggggacgggttcagaaacgggtattgactccgccatcgcggacgggacggacatcttcaccccgacggcggcgggggcgcagattctcaacaccagtatcgtgagtcagctgaacgccggaacgaacgtgaccatcaaaaccagcggcgtggatacggacgggaagtcggggaacatcacggtcaatgcggacatcgtcaaaaacgccggcacggacgcgacgctgacgttgctggcggataacaatatctggacgaaggatcgtgtcagcatgggggcctcgaccgggaagctgaacctgaacctgctggcgggtaacacgacaaacaatgcctccgtcagtctcggtcagttcatcaatatctcgctcaacgggggcgactttctggcgggcgcggcgaatgcagagaatggtatctcactaacgtacaggaacaatggcaaaattcagggggggaatgtgaccctgaacgtctcccggggcctgagtgggtatgcctggaacgccagggcggacaatgacctgacggtgaacgggccggtgagcgcctcgacgggctggggcgtgacgctgggcctgagtgctggcgggaaggtcgcgataaactcaccgggcagtatcagtctgcaggcaagcgagacggccaacggcggcgggaacgtacttatcagcggagacaagggcgtcagtctcaatgctgcgaatggggccattaatctgaaggcggctgataattctgcgaaccatgtaaatatcaccagcacctcaggtgatatttctatgagtgccaggggaactcttggcctgaccgttactgatatttcttcaacaggaggaaatatcagtctgatgagcgataacaccagcggaacgtcattttctttcactaaaaccaacattaccagcagcggaggtgcggtgacactttctgctctgagtaatacgcatggcgaagggcttctgatgtcgaactcttcagtatcagcaaaaaatgacattagtggtaatttttcgcaacgcgtcgaaattaagcaaggcacccttacttctgaagatggaaatatcactattgcccggggtatcagtatcaacaacgccacgggaacgaatcttcttaatacaaatgtaacggccgtaaatggcaccattaacctgaatggtacaagtgtgagtggggtggcgctcaacctgaacaatgtcactctgaatgccactgccgccaccatcaaaggtgacagttcgtcgtccggaacgggtttcagcttaacgaatatgtcgcttgccggggcgctggcggatttaattaatgtcaccctgagctctgcgggctcggcggcaggggttgttaacaccctcgacagcagtgtggtgaatgatgtcaaccgggataatctgctggcaaaacgcatcgagaacatgacttcggtggatatgggtggaaaggcgttatttgacgacagcacacaagtcaaaaagggctggacaggggattacaccctggcagacctgccgggtcatggctggatattcagcaataccagcgtgaaggcgggcggacaggttgcgctcaccggcgtgggtttcagtaacaccacgatggatatcacctcaggggggctgagcatcacccagagcgccccgctgctgctgacgaatactacgataaatgtgagcggtggcgtgctgcttcactcggacggtaacctgaccctgaccgggagtaccctgaatgaaatatcgtcgggtgatgaagacgtgaatctgtttgccgggcagaacatgacccttggcggggcagtgattaatgccagtgccggaaagctgaatattacccttcaggcgggagagaaggattccgccatggtgtatctgaaggaccggaccacgctgaacagcaacgggggaaatatcaccatcgaaaggggcaataatacggctactaacccgaacgccatggcagtgaagataaacaacgccgtgctgaacgccggagccacggatgccacgcagccatccggcgacattctcatcagtaccctgaacccgaacgtcaacctgagccagtcacagtacaataacacggtgcgtaacgccggggtggcgctggagctcagcggtaacgcgtcgctgaccgggcgagacctggtgctgaatgccacgcaggaaggggggaatgcgaaaaatctgccggtcttcctgaacaacgccaccctgacggcgacccgcgatatcacgttgaaggggacttcgctgcctgttatcacgaacacgacggcggaggacggcacggtcacgacgaacacgagctcgcctgctgcggcagccattgagctgcgtggtcagggtaacgtgctgacggcgggcggtaatattgccatcgagaatcaggccagtggtggtaacaacggcatttacctgaatggctcagcgacaggcaaaacacagctgacggcgaatggcacgattacactgaacggtagctccgtcagcggcagtggtgttcaggtgacgaatgctatcctgaatgcgtcgcgggcgaacattaccggcagcagcaactcaggtactggcttcagcctgactaacagtacgcttgccggtgccctggcggacctggttaacgtgagtctgagttcagcggggtcaggtgccggagcgatgaacgtactcgacagcagtattgtgactacagctaaccgcgataacctgctggagaagaaggttgaaaacatgacgaccctggagatgggcgggagtgcaatatttgacgacagcacgaagacggacaaaggctggaaacataattatacctcaacagatacccccaacggcgggtgggtatttaacaacacgacggtaaatgccggcggtgatgtcgacctgaaaggtgcggcctttaccaacgcgacggtgacggtgagcaacggcaacctgacgctggacaataatggtccggcaccactgaccggaacgacgataacggtcagtaacggtgcagtgagcgtacacgccggtgcgggtaacattgacctgagtcacggcaatatcagcgcgaacggggatatcaccctgaaggcggatgcaggctccattgctgtttcgggcgtaaacgccacggcaaaagcgaatatcacctcggctaatggaaatatcagtgcggaggcttataatccttcgaccggtggcgtcacgggtgtttcagtcagtaatgcacagcttaacgctgaacaggggagtattaatattaatggctccacgcccggaacctggtcgggcgtacgtttaactaatgctgatttgaaagcgaatacagccaatgggtcgattgtgatatatggagaaagcaaggcggggagtgattggtatgatgcaaccggcactgtttatttgggtgatgcggataatttgagtgcgaaaaatatcaacattaccggcagaaacttgagaggcgatgtatctaatgggggcggggtagcttttcgggatagtaacgtttcattccatggggacgtgtctgtttcagggagcggatactcccaaggaattactttcggtaatgataattatttgagttttagcgagggtaacgtttcattcgacgggaaaacgacaggatccgctccgtataacacttattatggtaccgctgcgatcataggcataaattatctccataccgtgtacatacacgtaaacctgtcgaatgcgaatttaaatattaaggcagactcctcttcgacttcatctggtcatacccctgcatttggtatcatgaatcccggatgtgagaattccaattatatgaacggatttattttcaatggtgtcgggaatgtgagtatatccggagtttcaacagatggtaacgctgttgattcacgccttttcgataacactgctttggtgggtagcttcgcccttactggtaagagtcaaagtggtaccggtgtttatttcggtgggaaccttaacaccacactggtgaatgcacatattaccggtatcagtgaaagtggtagtggcgtcacgctggccgccaaatccggaacggtaagtctgggcaacaacaccattagcggtactagtgaagcgggttcaggtattgagttaaccgggaataatatcaccctgaccaatggcaccctgaccggcaataccacgtcaggtaacggttccggggtggtgctgaccgggggcagtaactacacccttgatggcacatcaatcaccgggaccgctgctgatggttctggtatttcagttaacggcacgctgactgtaaataacgggacgacggtgaatggtcatgcccgggggcgcgggaacggggtggtggtttccggcgacctcaccaccgacagcggtaatggcatcacgatttcaggcatagcatcttccggtgacggagttaaggtcgatggtgacaccaggctgacagcggcaactcttacaggacatacggacagcggagtcggggtgaacattgccggcaacctgaccacggacaatgtcacgcaggtgagtggccaggctgccagcggaacaggcgtcaatcttggcgcggctctcagcggcgcaacggttgaggggcactccgacactggtacgggtgtgcagttggcggatgacgcggtggtgacaggggccgtgctgaaggggagttccacctccggtgacggcgtggctgtcaccggaaatgtgatgctggatgataccagtgccgcggccctgaaggcctcttcgacgaacggttcagggctgaagcttgcggataatgcaaatgtcagcattcagactatcacccgggtcactcagaccaaaaaggatgcagatggtcatccggtactgggtacagacggcaagccggtaacggagaccgtcaccacacaggctccggtcaccacgccggtgacgctgacgggaacctcagagcacggcacggggattgccaccgagggtaatgtgagtatcagcgggattgtactgaacggcagaacaactgcagatacgggaacgggggtgagtctgggcggtaacctgacgatagcggatgacatctcaggagtgacggcaggtgcgaccggtaacgggacggcgcttgtcgtgaacaatgccagcattcactcagacggttataccgacagcgggaaggactttgtcatcaatgcctctgtgtcagggaacggcacagccattaaaacccggggcagcagtcaactggatgaggtggtgctcaacggtgaggccacggatggcggcacggcagtcgagctgggcggtcaggtgtcgggggcgaacatcacgggcacgtcagacagtggcacggcggtacgggtgactgacggggctggcgttgatgacactgtagtgaaaggccattcggacagcggtacggggttgcaggtgagcggcaacgcatccctgaacaactccgggctgagcggtaccacgcagaccggaaccggggccgcggtggcgggcagcctgacagcggataacgcttcgcaggtgaccggccaggccacgcagagtggcggtactggtgtcacggtggacggtacggtgaccggcggtacggtgaccggggaagcaaccagcggagacgcggtccgtattgcggatggttctcagcttaccggcgcagacatcaaagggactgccgtcaccggcacaggcattaagacgcagggtaatgtcaccctggaaggtggtactcacctggcgggcgggtctgagcagggagtcgcactggatgtgtccggtatgctgaaccacgacccggattcctcggtgacaacgacgcctgataacaccggaaacgtcattggtcacgagaatatccacgaagtcatcccggtcgtaccacctgtaccggatggggacgacaacagccagccagaccaccttccggatggcgacgtcgataaaccagctgtggacaacccatcagtaccgtctgagcctgtgtatgaacatgaacacagcaagtcacatgatgcgtcactcatcaggcgggctgaggtaagcagtcagcgcagggaggaggtaaacgcgcaggtcacgcagcggagccagccagcacggggcgatttccactctgcaggcacgccggcggttccggtggacggatatgagccggctgtacagccggtggatatcagcctgtgtgacggcaacgactgccagtcagagtcgctggataccggaaaaccggtgaaggggaatgtgacgccttccggcagataa

SEQ ID NO: 398007 - DNA, 153 bp, Salmonella enterica
gtggagtcacaaaagctagcgctactggcgctaattgttgttggtgcagtgtgcttaggtacgatattactaagcaataaaaatctttgtgatgtcagctctcacagtggcaaaaccgagatagtggctcacatggcctacgaatccagataa

SEQ ID NO: 398008 - DNA, 198 bp, Salmonella enterica
atgggttgtaattgtcgtctaatagaaaaggtactggcgttgaaagcaaagttgtcaaatcaggacagtgaacaccttgtcttttatgaagatgaagtggatatcgacttcaatcctaaaataggtactgactggcaactaaaaggtgaaaagaaacatattattagtaagcgtcgtctcaataccgtccagctctga

SEQ ID NO: 398009 - DNA, 144 bp, Salmonella enterica
atgacaacagaaagctataacgcatggtttcgtaaaaaagtgcaagaggcattagaagaaacggggccaggcattccacacgcagaagtaaaggcgaagttttccgccaaacgtgacgcactactaaggaaggttaaaagataa

SEQ ID NO: 398010 - DNA, 126 bp, Salmonella enterica
atgacaccaccggtggccggacggcagaaccgtcacagcggcgactgggatcctttatacagggttcagactgaaaccagagatgactccgggaaaaaacatgatgtcccggaagattttatttaa

SEQ ID NO: 398011 - DNA, 174 bp, Salmonella enterica
gtggcagccaagatcaaagccagtaatgtttttctgcccctgtcatccgtcgtcaccaagtttgtaacaaactccattttcacttgccttacattaatgataattattattattattattattattattattattattattattattattattattattattattattatttaa

SEQ ID NO: 398012 - DNA, 630 bp, Salmonella enterica
atgaaatttataaagtatatgttgattatggccagcctagtacctggcgcaggcattatggctgcaaccccagttgttccagctgtcggaggcaatccaacaggtacagttaagattaacggggttatccgtacctctacctgttctattggctctcccagtacgacggatgtggaatttaatatcagtaaagccgatattagcgctgcggcacctggcagtatccttaccaaagatcttccagttgttattcatgtcagcagttgtaatgatacggcgttgggtatgactgttacggcgaatgtttctgatggatactctccaacccatggtttctttggtagatcgaaggaccctgacccgcaggaccctgaccatgcactatattatttcgttagcctgaaggatgacccggtggttagtggtggcgatacagctactgatcctggttatcatatccttaaggttaatgctactgcttctccagttattatcaaagatacaagcggctcaggagagtttgatctgagtctggtgactaaggtggcgcgtagttggcagcctttctcaccagataggcttaagagtgtgttacatactgcttattactacaccttcacctacgtataa

SEQ ID NO: 398013 - DNA, 246 bp, Salmonella enterica
atgctgatgctacatcgaggcaagcgtatcagcggtgtcgccagaacactctgttgcacccgttcttccattgggcgatggattaactggtttatgttgtatgacgctgaaggtctgatatcctgcgaccaggccgggaacgtctctggtccttcggacaaatttgtacataaactacttgcgccgttctgtcagcaaacattactgatgaatctcaatatttattttaaaggagattcatcgtga

SEQ ID NO: 398014 - DNA, 591 bp, Salmonella enterica
gtgaaaaagagcatggcaggtcagggtgtggcagggccgctactgctggcagggctgatggtgagtgcgggcgtaatggcagcctccggcgacccggtaaccggtggttcgggcaccgtgaccatcaatgttccgatagtgacgtccacctgcagtgtttcggtgccgacggaggtgaattttgaccccacggacaaaaattcactaattggagggaagcgtgttgtaaacataaagaatatggatatcacactcagtcattgtagtggtaaaaccctgcagatgagtatgcgtggtcatgccgtttctccgactagtgatatagacggatactttagttccggagatccggataatgcgctggagtatgaagttcttgtcccaatgtccacggagattactgatggacagtcatccgatggttcgagttggtacgtgtacctgaataatacttatcctttgactattaagcccagcagtgacaactatccgatttctttcaagattgacttgtatagttcaggaaataattctacaaatctgggttctgccgtcagcggtggttttgattatacctttacctaccagtaa

SEQ ID NO: 398015 - DNA, 123 bp, Salmonella enterica
atgcggcaggtcgtcttcggtcagaccggtcattttcatgacggtattgcggtcgataccgctctgcggcatgcattgaatgaatgtgcgtcgctgacgctggaattgtttactatggattag

SEQ ID NO: 398016 - DNA, 366 bp, Salmonella enterica
atggacaatgcactccccgacgacatcgaacaactgaaggccctgctggtcgcacagcaggcggttatcgttcgtctgtccggtgaaataaccggctacgcccgcgagatggactcactcagggcgctggtcgccaaactgcagagaatgctgttcggccgcagcagcgagaaaaatcgcgaaaagatagaaaaaaagatcgcgcaggctgaaaagcgtattactgagaacaaacttggtgaagcgcagtcgcaacttacttcaatgaccagagacggggtaccaaaagcatcagactttcctggtcgcaaagcgcttccgtcaacactccctcgtgacagacaaattatctccccaccagaatga

SEQ ID NO: 398017 - DNA, 378 bp, Salmonella enterica
atgagtaaatttaccacccccgcgattctggagatgctggagcactacaagtggcgggtatacgaaccgtttgagttttacctgagcgatgacaacagcgatgtgattgaggtgccggctggtttcatcaccgacctcgccaccatcccgcgcatcttctggacaattctcccgccagacggcaaatacgccaaagcggccatcattcacgattacctttacgacaacgcactgcgcacaaagaaggaagccgacctgatatttctcgacggtatgacggtgttaggcgtgccacgctggaagcgaacggtaatgtattgggctgtgagattatttggtagagggatgtacgatacaagacgcgattactgtaattaa

SEQ ID NO: 398018 - DNA, 309 bp, Salmonella enterica
atgagtgtgcagactgcaaattcaacgcctaatgggctttggtcatattttgattcaggggatcctgaccacgtatttaattatgatattcagccgcccaaggatgcagagattacagggggaggtgcgagcctcggttcttcaagggtatttgctcttaataataccagtcctgtgcttatcaagcccggcagcgataattataccatgtcgtcaaaagttgacttgtcacactacgtgggccgcagcgtggctaacgttggttctacagtaagtaccagctttacttataatatcacctaccagtaa

SEQ ID NO: 398019 - DNA, 315 bp, Salmonella enterica
atgttccagtgccagttaagtcgcaaagttaaattcagtgccaactggcggaaacagaaacgaaaaatccagcgtcatcactcgtacattgccaatatccggcgtgactaccttcacaaagtcacgaatgaaatcagcaaaaaccacgcgatgatagtcattgaggatttgaaggtcagtaagatgtcgaaatcggcaaaaggtacggcagagcagcccggacggaatgtcagagccaaaccaggactgaaccgttcgattcggggtatcactgtgtggtcgatctcgatctggagaagttcttcactcgggtga

SEQ ID NO: 398020 - DNA, 351 bp, Salmonella enterica
atggatatcacactcagtcactgtaatggtaaaatcctgctgatgaatacgcgtggtcacgttgtttctccgagtgataatatatccggatactttagttccggagatccggatcatgcgctgaagtataagatttatgtcccaatatccgcggagattagtggtgggctcgcatacacaggttcgtattggctcctgtacctgagtaatactggttctttgactattaggcccaacagtgacagttatcagattgccagtttgattaaactgataagtgcagcaagtaattctacaaatgtgggttctgccgtcagcggtggttttgattatacctttacctaccagtaa

SEQ ID NO: 398021 - DNA, 564 bp, Salmonella enterica
atgaatactattactgtgccgttccacggcgacgcactctatattgttgaccacaatggcgaaccttataccccaatgaagcctgttgttaaggggatggggatgacatgggagccacagcttcgtaagttaaatcaacgcttttcaaaaggtatgatcaaaatggttataccttcgattggtggcgatcaggagatggtgtgtcttgccctgcgtaagttatcggcctggcttacgaccatcagcccgaacaaggtgaagcccgaaatccgcgataaggtcattcagtaccaggaagagtgcgatgacgttctctatgagtactggacgaaaggtatcgtcgttaatccccgaaagaccagtgtaatggaagaactcaaccatgcctgcgcgaacatgaagcgtgataaagggattgcaagtcttttcggcaccggactgaatgaatggaagtcggtaaaagcggcacatgtatcaaaaatccgcagtctggttaacgaagcgaacatgctgattgattttgtgctggcggatacaggcaaaggcagggtaacacgggtgtga

SEQ ID NO: 398022 - DNA, 321 bp, Salmonella enterica
atgacagaaattttaaaagaagctattgaaaactatcagtgcctgaaagcgcaagttcgccaacaggaatctgaatgccatgatccgttatcgtttggaagtgtggatgtagacctgtttgaagcatttatgtttgcaaaaagccagcttcaggaactgattagccccgatgaatatttggagttaaagcggaaagtatctcacctcaacaacgaggttggtgcggtgatacttgaaaatatcgttcttaaaaatgaggtagccaagctaggcggcgatcctgattttttgggtaatgtggacgttgaggggaaagcatga

SEQ ID NO: 398023 - DNA, 1872 bp, Salmonella enterica
atgacgcccgccgaactttcagaaaaattatgggataacgccgaaagggtcgctaagttcctgctgccaaaaggtcacctggagggcaaagaatggtgtgttgggaataccaacggtgacgccggaaagagccttaagattaacatcggtggcaaaaaaacgtgggcagacttcgccagcggcgacagtggtgatctgcttgatttatgggtgttggtacgcaactgccagttgcatgatgcgatgcgtgaagcaaaagaatttctcggtctgaaagacgacgatcaccatttcgaggcgaagaaaaaaacattctccaggccgacgaagaagggcgtgaaaaaagcgagcaattgttacgactacctggctacgcgtggaatcacccgcgagacggcggatctgttccgtgtgtctgatgcggtagtctggtatcacgatgaaaatcgcgaagtacccgccgtggcattcccgtacatccgtaacggcgaactgttgcaagtaaaacgcatcggtactgaacgaccaaacggcaaaaagataattatggctgaggcggattgtgagccatgtctctttggctggcaggccctggacaaatccacgcggctggtcgttctgtgtgagggtgagattgactgcatgagctatgcccagatggggttcccgtcgctgtcagtaccgttcggtggcggaaagggggccaaacagcagtggatcgaatacgaatatcacaacttggatcggttcgatgaaatctggctgagtctggacaatgatgacgttggccgtgaagctgcgaaagaaattgcccgccgccttggtgagcaccgttgccgtctggttgaactcccgcataaggacatcaacgaatgtctgatggccgggatggattcagaggctgtgctggagtatgtcgaacgcgccaaatatttcgatcctgatgagctgtgctcggcgggtgatttgctccaggagaccatcgatgcattcgaacatcgtgatgtcggattgtttatcagtccctggacatcgctgaattacaacttcagattccgggccggagaactgaccctaatcaacggcgtgaatggacacggtaaaaccgaacttgttggacatatcgccgtcgacgctatgagtcagggggttcgcacctgtatcgcctctctggaactgaagccagggaaaatgctggcccgcctgacgcggcagactatctgtaccgcatcaccgaaacgcgaagaaatcgttatgacgaacgaatggttctccgatcgtctgtgggtgttcaaactcaccggcaccgcgaaagcttgccgtctgctggaaatattcgcctatgcccggcgtcggtatggaatcgatctgttcgttatcgacaacctggcaaaatgtggcctcgatgaggaggactacggcggacagaaagaatttatcgacaccctgtgtgacttcaaaaacgaacataactgtcacgttcttctggtgacgcacgcccgcaaaactaacgaagcggtaccgaccgggaaaatggacgtcaaaggcaccggcgcattaaccgatatgcctgataacgttatgtccgtctggcgcaacattccccgcgagctggcacaacgtaaggctgaaaaaatgggatacgaaagcctggacaaggaggagcaggcagcgatccagatgccagcttcaatgattcgtctgctcaaacaacgcgaaggtgaggggtgggttggtgatattggcgcaaattttgatacccgttcacaccagtttctggaaggagaaaaacaaccatttaactatctggtcggtaagcctcagagtgaggtagatctggagtgggaagcaggcaacgtgacgaggtactga

SEQ ID NO: 398024 - DNA, 924 bp, Salmonella enterica
atgagtagcaaactacagggctatgtctgggatgcctgcgctgtttctggtgtcaagggaacgcggctaatggtcatggtgcgcctggctgattattccagtgatgatgggaaaagctatcctggcatcaaaaccattgcccgccaacttggcgcgggtgagagcactattcgcactgccattgctgaacttgaatcagagaaatggcttcgacgtgagaatcgccggaatggcaaccgcaacacgtcgaatatgtactttctgaacgtagagaaactggaggagatcgctcttcgggagagagcagttatccgccaggagcgtcttaaaaacaaccgttttgacacgtcagattctgacgcatcagattttgacgagtcagattctgaccagtcagaaatgagcgcctcaagtgcacttgacccgtcagattctggcaaaaacaaccgttttgacccgtcagattctgggggacatgatccacaaggtttaaaacctgatccacaagtaaaagatattgaaccacaagaagtgcgcgcaaagcgtcagaaaaaatcttcgttcgacccggcagggctaaaacctgaaaacgtcagcgctgaaatctggcaggactggattaaatttcgccgggagaagcgtcaaccgctgacggaaacaacctgcgcataccaggctaagcaacttgctggccaccagaacgccgatgaagtaatccggcgctcaattgccggaggctggcaggggttgttcccggagcgtgtgcccaacaagcctgcaacgatgacagaaacgcccggagcagcggttcccagcgagcccgactccagctcatggtacacgccatccggaaacggctcggcagaggtgtttatcaaccaggctgctattgagcgcatgaagcgcggtgggtaccgccaatga

SEQ ID NO: 398025 - DNA, 162 bp, Salmonella enterica
atgaacccgacagatttgcatacagaaacatattaccgaagcaccgggaaagacaacggcggggagctgaaagcgggcaaagaaaaagccgggaagagaagtggctccacccggcttattctgacttcgctatctaatacccgcttgcggaacaaactttaa

SEQ ID NO: 398026 - DNA, 498 bp, Salmonella enterica
atgaaaagtgctgattgtttacggcattgggagtccgtttttctcccggtatcgctcgatctctgcctgaatcgcagcgactgcgcacatggagtcgtattgagtcagcctgagattttcaattgtaaattgattttcttccatcaggttgagcattcgaaagtatcgaaagacgtaaacctcggggccgctgactgtataccccttcgatttcgatatagtttggtgaagctcccattctttcattgcaagagtaagggccatttccctaatttttgtccgagcttctgcggccctacgttctgcttcaatggttcgttccgatttacgctgccaggcgccgttaaccaacgaaactaccccagcgacacacgcactcagcacaacgctacttgtgatagttgcaaaatccatgtcgaacctccttcggttcttagttgtggaaaaccaagagtatcaccgggggaaggttcggcaccaacaggagaagcgctatga

SEQ ID NO: 398027 - DNA, 183 bp, Salmonella enterica
atggggaaagtggccgttttattggggatcagttatggggcggtaaaccagtggtcagaaatcatccccaaaggtgccgctctcgagctggagaagatcaccaacggtgctcttaagtgcgacctgtccgtatacaaaaacagaccacgcaagaacaagcgtagcccatcaacggaggcgtga

SEQ ID NO: 398028 - DNA, 648 bp, Salmonella enterica
atgtccacaatgggaagcagaatcagagaaagacgaacagaactagggcttactcaaaaagatgtagctctcgcggtcaatcgttcaattggggcggtaactcaatgggaaggcgatatgaccaagccgaatggtcaaaatctcatgaaattaacaaaagtactcaactgtagagctgagtggttgttgacaggaaaaggggatcattcaaaccaccttctttcaggcataactcctaaaggtagcgtactagctgtttatgactggaacatttatccatacgtagaagattgcccgttacatgagcctataaaccctcccaaggaattcatagtgacatcagcagctatcggtaacggggcttttgctcttagagtaatggatgatgaaactatatcaatgccaaaattaagggtacctcaaggagctttactcacagttgataatgattatcctgaactgaacgacataattggtaagttgttgattattagatataaaaaagtaaacatacttagcattaagaagcttgcttttgacggtgtcgattatttactacagccaacaaatcccgcattctcaaccattaagatgagcaacgatgtcataattgttggtataatcaaagagataacaataaatccataa

SEQ ID NO: 398029 - DNA, 513 bp, Salmonella enterica
atgaattattcagcacttaaccgcattaaacgtttccgtgaacttgagattatcggtgcgcttatcggtaacaccgaagatgagttaagcgaaaacataaaggcctggattgtagaaaaaatctcccaaataaagttagagtacggagtccttgaccgcgcatccctcccaacccaacccaccggctacatcccatacaacataggcaatcgcattcagatagcccgcgagaacctcggcatgagtcatgacaaccttgcggagaagctcgatattcaccctggcgatgttttagcctgggaggacggtgacgaccaaccgctggctggaatgcttaccccccttgccaccgccctcaaatgcgatccgatgtggctgttaaccggggagagttctaatcatcaatctcctgccactccagtccatcaatcacggaaccagtattacgggcagcaacgatctgccgcttcagatcatgcatctcatcacgtgaagcaccaatcgcaagcgtga

SEQ ID NO: 398030 - DNA, 267 bp, Salmonella enterica
atgtctttaaacttattcatgtctgcctctactgatttgtatgtcctgctgtatagccagtctcagaactgcttccatatcgagaccgcctcagcaatgatccgaaaaaatcttcgcatgtacctcaatggtaagagcggtgattacgtcacgcttgcgattggtgcttcacgtgatgagatgcatgatctgaagcggcagatcgttgctgcccgtaatactggttccgtgattgatggactggagtggcaggagattgatgattag

SEQ ID NO: 398031 - DNA, 591 bp, Salmonella enterica
atggcaggaattaagccttcggtttccattggagacaaccaaagggaaaccgttattgaaagactacaccagttagtaaaaaaccgccctttaaggaatgttgcaaaagcctggggaatacctcgctccaccctaaataactacttttatcgtggctctacaccaaaacttgaagtgttaaagaggatatctgaacaggagggggttactgttgaatggcttatctcaggaaatgactcaattgagccagaaagaaaccattcatcatgtaaaccgctatcccctgctaacaaagctgagcgaaacatacaggccatagtgaatgctttggagggactggatgaggatgagcaggagcacttgtcaaggctggttaaaagaaagggggctgaatttcttactcaattattggatgaagaaaatatctgcttgctgcaactagcaggtgagaaaagagaggccgcactaatattggcacagttggttccagaacgtgtcagagagattttgtcggaattacgagcaagccgtaatatggctggagcagatcaccagcaaggtgtagatggccaccataaaggggtagcataa

SEQ ID NO: 398032 - DNA, 231 bp, Salmonella enterica
atgacgagaaatgaagttgcgtctgactggcaccccgcctacatcgttgcaggagttcatgcaaaaggggttactcttcgtgagttgtcgctggctgctggtcttaaaaaagactctttaaagaatgcgttatatcggaaatgccctaagtatgagcgcatcattgccgatgcgatcggggtgtcccccgatgaaatctggccgagccggtacgctcgtaaggtagtgtga

SEQ ID NO: 398033 - DNA, 924 bp, Salmonella enterica
atgaccgatattaacgaagtaatcaacactattaacacgcttattgctgacgaggtgttcacccagaccactatagccaaagaggtcggactttcagaggcaaccctgtccgcctttcgccggggggaatacaagggcaataacgcccgtataaccaggacgctgctatcctggtatgaaaactggcagcggcaacagttattaccggaaccacctcagtttgtcgtgacacagactgttcgtgatttacgcctcctgtttcagtcggtgcgcctgctggggtgtattaacgtcattattggtgtgccgggtgtcggcaagactgccaccgcgcgggattactgttccgagcccaacacctggatgataaccctgtctcctgcacactccagcgtcaccgaatgcctgctggagctggcggatgcgctgggtctgtacgatatcccgcgcaataagggcgcactgtcccgcgccattcgtcgaaagctgaccggcacgaaagggctggtgattgtggatgaagcggatcatcttgcgattgatggtctggaacagctacgcgctatccaggacgcgaccggtgtcggaatggtgttaattggtaatccacagggactttcccgcgcttcccgacataacgaccttgtgcgcctgttcagtcgtatcgctcacgcacgacagctcaggaaggcaaaaaaagcagacgtccaggccattgccaccgcctgggggattgccggtgagaatgagctggcagtcatgcaggctattgcggaaaaacccggagccctgcgcgtgctgacccacaccttaaatcaggcatggataacggcaagtggtgaagggtcaggaattactgaaagacacattaaagccgcgtttaaagaggtttatccaaaccctgaactacttacacaggtgtga

SEQ ID NO: 398034 - DNA, 420 bp, Salmonella enterica
atgaaaacagcaataaattgtgaaattaacgccttgcatcgtattggtgtgcgcagtcgtgatgcggcaacatcgttctgtattatcccgtttgtgtattccacgggctttgatggtaagggtaagcgcctgttttatatcgatgttctggagtggtatgccactgagcgcgatcgtatgtatctgatgcatgaaaagagcctgtttcctgatgcctgggagggcctgaaactctacctgccgattgacggtagcgatgcccggtggcggtggcgagctacctggagtttcattcgttttattctgcatgactatgccgacggtacgtgtatgcctgcgctcagtaagctggaattgtttaaaaaagcacattcatgcgttcagtcacatattccggaaggagctatcttatggcgttaa

SEQ ID NO: 398035 - DNA, 579 bp, Salmonella enterica
atggcaatgcaacatcgttattttaaattaaatgaagtggactcggttaaatattataaggaatatcaggaaaaaatcggtaagccccgtaaaaaggctgtgcgtgattttctgagtgcgtgtaatgcggctggttttgtctcgcatcaacattttggcgttgagcatatcagtgcgctactgatgagtgagaatgtggattgcggcagaaataaacgcacccgcagtgactcttttgatgatgacggccaggtgttgtttgaggtcaggccagaccgccgctacagcgaaggaaagcagcttgcggcccgactgaaagagataaacgaacagctacaggaattatcgctgttcagtgactgggcggtcagaaagctgggttgttatgcagaagcattctacgttaaccacggacggcaatttaccacctggtctgctgccggcttttattctgagaagaaagcgctggtagtccgtattcctgtcagtgagaaaggcgaaaaagccctgcctgccgatatgagtaaggcgcttactgaaattaaacactccgaatttattgccattacggaggaataa

SEQ ID NO: 398036 - DNA, 525 bp, Salmonella enterica
gtgattgatgcaagagtcctggagggggtaaaagccctcattaaagcctacggcaggctgacctgtggcgtactggctgaaaaattacagatgccgccgtcctcaatggtttatttcctgcgtgatgcggtggatgccggcgttctgacggagtgtaacggcttttatgatattccccggccgcgccaaagctcacgtaagtcgcaccaggagcctgagccggtgacctggtgtgattttcgtaagtccctgccctggattgagggtaatagtatcccgtcactggtgaacgattttgcgatgggcgtgctgacctgcgaatccgtttatgtggtgatggaaatcgataaagacatgcagaacaagggcgtgccacagtttaccctggggtatatcgatgtccggctgggtaaatttattgatggcagtaccggctggaacgtgacccggcatgtggtgcgctatctggtcgtggacagaacgccggttccgtccggcaacgtcaaatccggggaggtggcataa

SEQ ID NO: 398037 - DNA, 552 bp, Salmonella enterica
atgatgcgattgccttcgatgggggtgccggggagatgcccggcacatgtgcgggcctggacgacggcggaagatgagatactgatgagcctgtatgcaacagtgacagtggatgatatagccgaccgactgaacagaacgcggcactcggtgtatgcacgggcctgcctgttacgtcagtattacccggagcgcatggcttacaaagctgtgccattctcacagcaggaagatgcttttattcgcaaacatgcacgggccatgacctgccagcagatggcagattgcctcggtcgctgtgcggacagtatcagatacagggccggtcttattggtgccagtctggctaagtgcggagatttgcttccccgtacccgattccccgacagtgatgtgaaacttatccgggcgttgcgtgatgacccgcacccgcggcgtctaacattccgggaaattggcgagaagttcgatgtgtcaggcgcgagagcccgcgatatttattaccaccgccgtactgctgaagatgccattttgcaggagctattaccatga

SEQ ID NO: 398038 - DNA, 294 bp, Salmonella enterica
atggaaaaaaattatccgttaaaagatgtagacgaagagttggcaaaatcaggcatgcttgagcgtatgcgtactattattgactttgccattaaagaagggttatctgtaagtgaaacgcttgaaattattaatcgggaagttgagttaattgatgatgaaattgaactttacaacaaaaaagcccgcgagaatattattcggcgcgagcttggacttaatgagtcagctattctgacgggtgagcattatgcaaaggtttttaatcttttttctgttccaccccaagcttag

SEQ ID NO: 398039 - DNA, 240 bp, Salmonella enterica
atgtctgataagcaaaatgctctggatgttgccgcattcagcatggtcggaaacctgctttcaactctcgttgataaagaactggtctctcgtgaagaagcagcaaaaattgtagcgattgccaggaccaattcaagtcaggcgcttaccaaaaatcatcgtgatagctcacttgttgatactgactggcaccttgacaacctactggctaagcttggggtggaacagaaaaaagattaa

SEQ ID NO: 398040 - DNA, 369 bp, Salmonella enterica
atgagaaacaacgtaatacgcaggcaagcgaagctgtcagagcggagattcgcccggcgcttgcggcagagcctgcggcccgcgtggctgtgcctgcccctgttgctgaccgcgtgcgcgccgccgtcagtgaaatacgtgcaggtgccgccggcgccgctccccgctgagtggacggcggactgtatggtgccaccgctgccggagccgttcaccttcggtgcctcggtggactacaacctgcaactgctggcggtgattaagaactgcaatgtggataaggccaacatccgccgcgctgaggaacaacaacatgaatttactgacatggccggaacggctgataagtcgtctcaccggcgaaaatga

SEQ ID NO: 398041 - DNA, 438 bp, Salmonella enterica
atggctgatattgcgattgtctggcgtaacggccgcggcaatctggcgctgaacggccccgacctgctgacggataacagtattgaaaccgccgttgtcatctcgctctttaccgaccgccgggcgcagccgtctgacccgataccggacggcaccaccgaccggcgcggatggtgggcggacagttttcgcaaacgtcccatcgggtcgcgcctgtggttgctgaaccgtgaaaaaacgctgccggcagttgtggaaagagcggcggcctatgcggacgaggcgctggcctggctgaaaccggcggggctggtgaagtctgtcacctgtacggctgcgcgcgtggcacatgaccgcctgcagctctcggtattactggttatgcctgacggcgcacgtcgcccgatggcctttgaagcggatttagaaggggtttaa

SEQ ID NO: 398042 - DNA, 1383 bp, Salmonella enterica
atgtcccttacgggtaaaggcagcttccgcaatgttcccttccttgtctataaggaacagcgcgagcgcggcggtcgtaatatcgtcaagcgcgagtatccgctgcgcgaatccggcggagccgatgatttggggccaaaactgccggcgttcaccttcacggtgattgtccagggggatgacgcgcaggcgcagcgtaaggcgttacgtgatgcgctgtatgcgccgggggctggtgagttaattcaccccgattacggcacgttaaacgtccttatcgacaactttgaaagccgttataacgtgtctgagcaacgcgtggtggagttcacgattaacgccacgccacaggcaaacgacaccgccccggatgcgcagaaggacacggccacggcgctgaccacaaaagccggcaacggtcttaacagtatcttcaacaccctggcggacggctgggcggtggtgtccgataaccttcacgatctgcaggcgatggccgataccgtcagcgggaagattgacgcgctggaaaacacggtcagcagcgtcgggattatgcaggatatcagcagtttttccgcttctttttccgccatgaagggcaatattaccgcgctcattaccagtccgttacggatggcacagcagttcgccgggatattcagcggtctgattgcgctgccctcactgccgtcactgtccctgctgggcgacaaaaagcgcaatcagtctggcggtgcatataccggcgcatcccctgccggaagcctgagcacaccggatgaagcggtcagaagccaggggggaacacaactgtatcaggcgctgtcagcattttatgacacgctggtgacacaggacagacagcgcgacctgaacagcctgacgccgacaacacaggctaatatccgcctgattcagtcggtcatgcaaagtgccgttgtactggctcaggtgcagacggcggccagtcttctgacgattgccgtcgcgcaggcagccacgccggcaggcaccggcgcgacaacagacaccccgataaccgttccgttactccagagtgccgccgacgtacaggcggtcagtcacatgctcggccagtccctcgacgctcaggtactggcattttccggtcagggatatacccgtaccgcgctggcgttacgtgaagcccgtctggcgctggttgaggatttaaccacgcgcggggttcagttaccgggcgtctcgtctgtggcggttcgcacgacagagccggccctggtgacgctttaccgggcgaccggcaacagcgtgcagtggcagcggttcgttcgtcgtaacggcgtggtccatccgctctttgtgccggggggctcggtcgtggaggtgatagatgaatag

SEQ ID NO: 398043 - DNA, 2124 bp, Salmonella enterica
atgaaaaacctgaaagcctcgctgattgtcgatttactcggcaatatctccaccacatcccgccagtggtcgcaggatctgggtgcgttttcgcacgccgggcagcgcggcctcggtggtgtgggaacggcggtgcgtcgtctgggtggtgatgctgaggccagcagttccaggatgcgccaggcattccggggaatgcgcagcgggatacatgcggtctcggcggacatggatcgcctgaaactgagcgcggaaggtgtgtttggttcgcttacccgtctgtacggtctgattacaggcggcgcgctggtttacgggttcaaacggctgtttctcgatcccgcatccagtctggagaactttcagacccgtatcacctcactgaaccacggtgacgcatcggccaccgccggtacgatcaactgggcgcggcagaatactcagcaggccccctggagcatgagtcagatcctggaggagtacgccaccacccgcggctacgggatgagtgacgccgaatcccgccgttatgtgcagatgatggaggatcaggcgggccgtcacggctggaacaagcagcagattgaaggggcatccctgcaactgcgcgagatgtacgcgcgcggcaaactgcaggggcaggatgctaaccagttgtccggctacggcatcaacgcctatcaggtactggctgagaagttacacactactgccggcgctattcgcaagctgggtgaggcgggtaaactgggcccggaaaccatccgtttgctgttccagacgcttcgcgaacaggcaaacggcatggcgaaaaaggcaatgacgacatggacgggtatgaccatgcgtatgcagtcggactgggaacagtttgcgcagaaggtcatggataccggcccgttcaagttcctggagaaacaactttctggtgtgctcgaccagattgcggtcatgcagaaggacggccagctcgacgacatcgcgaacgatatcggccaggggatgctgaccgcgtttacctccgccagagatgctgtgacctggcttgttgaaaaaattaaagccgcgcgccaggcattaaaacaactgcgtgacgacggctacggcaaaaccctggataatatcgccagcggcgcaaaaaccctcgctaaatatctcctgcttgtctacgcggcccgcaccgccctgcgtctggcgggcgcggtcggcatgggtgcgctacgtcttggagccaccccgctgcgctacggtcttgccaccgttggcgctgtcacatcccctttccgcaagcgtcagcccgttatgccgggcgaactgcccggacgcggcggccgcttcatgaatttcctctccggcgttaatcccgccgcggtgcagccggtcctggtgaccaactggccggcgggtgcgctggccggtggcggaggtaatggcggcaataccctcattgaggacggcggtagcggcaaaaagcgccgccgcgggcgcaccaaaaaaggccccggcaaggggcgcggtatgtcgacagtggtcacggcaggcgaagaactggcggaaagcgccgccaaaaaaggtttcttcgggcgtatggcatcccgtgtcggcggctggttcggcaaaatccctggcctcagtaaaaccggcagtctgctttccgctgccggcaataagctggggctgggtaaagtggcgggctggctcggtaaaggcggtaagtttttagggcgtctcggcggtggcgcattcggtgcgaccctgctggctgcgcccacgctgcttgacagtcaggcgacggcccacgacaagggggcggcggtcggttccgggattggtgcggtggccggtggcgcattaggtgcgcttgcgggtggcgtgggggctgttgttggttccacggtcggcagctacctcggtgattatctcggcggctggctgactgatgcttaccagaaaatcaccggcggcaatgacaataataacccgtccccgcaaaaggccgaggcccgcgtggagctggtcgcaccgccgggatgggatgcccgcagtattgatattaatgactccgatccctttggtctggatctgaatttctacagcggaggtaactatgtcccttacgggtaa

SEQ ID NO: 398044 - DNA, 294 bp, Salmonella enterica
atggtcgaacaaaaaagcaaagataagggactatgcaggcgtcttaccgcgatcctcatggtgtatgcagcattaaaaattactgaaattgctgaacatctttgtgctacccgctctttcgtggggtgctggataaatctgtttatccagatgggcgaaatcgggttaatgacacgtaagcccggtagcaataaaggttattctgaaaaattgattcaaaaaatgctgcgggtccttgtggagtcttctccacaggtttttggctggtcccgttcacgatggagcgtggagtga

SEQ ID NO: 398045 - DNA, 264 bp, Salmonella enterica
gtgactaatcaaatttcccatttttacttccggcactcctcagtacgcgttcagactattaatggcgagccgtggttctgcttatccgatgtggcaaaaattcttgaaataaaaaactcccgcgatttactttcaaaacaattagataaagatggggtagataaaatctacatcatcgactctctcagtcggaaacaagaagcagtcttcatcaacgaccccaatctttatcgcattaccctatccctaacgggtattttctag

SEQ ID NO: 398046 - DNA, 303 bp, Salmonella enterica
atgagccgactaaatcctcaattcaacgttcgaatttcgcccgaacttaaagaacaagtaattgaattagcaaaaaaaaataaacgctctatcaatgcggaagttgtcgcagctcttgaacgttctgtcagggagtcaggcaaggttattcaggatgaaaatggagatattcacatttctttaacgaagatggaggccagtttactagagtcacagctatcaatgataaaagagatcagtgatatgcaaaaaagaatggataatatcctagagattattggcaagctagaaaatacccgttag

SEQ ID NO: 398047 - DNA, 825 bp, Salmonella enterica
atgtgggcaaacacaaccgggattcttgttaaagccagtaatctcggagatactgacgtgagtaatatagcaactagcggagtagatttcacctttgaaggctttctgattcgtactgttcttaggaatcgtgagccatggtttgttgcccaagatgtttgttcggctttggggctaagaaatcccacaatggcattatctgcattggacaatgatgaacgggctaagtttaatttagggcgtcaagggctggctaatatcatcaacgaatccggcctctataccctgatactgcgttgtcgtgacgctgttaagcctggcactgtccctcatcgtttccgtaaatgggttacaaacgaggttctccctgcaatccgcaaaacaggccgttatgaacacccggtatgcaaacctcagcccaaatcggagcccctcactcctgctgacatgcagaatctgagttatctggtcacaataatagcgaataacttcaaacgtgaccgttcatggagtatgggtatctggttcgctttgcgtcgcgcaacaggtgtaccgtctccgcaacccttcacggttgatgatctgcctgcactgacggaagaatgccgtcgtatcctcagtattgctgacgctgccagtgatatgatttataccattgagaaagaagtggtacgccggatttttcgcaacagggaagatagtgactatgtgcttgagcaactggcgcaggaaatagaagaaagtcacgttacatcaggtatgcttaaccagcttgaacgttacgaacagatagcgctgaagagactggagcagagggtggtttga

SEQ ID NO: 398048 - DNA, 495 bp, Salmonella enterica
atgaatagattactcatgatttctttcattgcattattaaccggatgtgcaagtcaaatatatcatccacagacatacccagcatatgaatccagcgcacccaccgtatcaagctttaaaaaatgtactcctctcgaaataacaaaacatgatagtgctgtaacgaaatctgaatttctaaaagacattaataattatgcaatgtttatagaggttcaaaacttcataagtaaagatgaagaagaatctcttcgtaaatttggttggaatgctgacgcatctagtgcaattgctgattgctcttcaaatcagatgatggctgcgctaaatgcaatgaagtctccgttcaatgagctaaaatctaaaacaaagaataaggaggagaaaaaagccctgatttcagcttatagcgcgtgggagatttatattaaaaacccaagcccacaaacaaaacaaaaattcgaagaatatacgtcttactatagtaatctttaa

SEQ ID NO: 398049 - DNA, 237 bp, Salmonella enterica
atgctcaatgatttcactccaacgggggtttcgcagctgaacctgttcgatgatactcagccccgaagcaacagcaatcagctgatgaaagtcgtggacggtattaaccattcgggcaaggggaaaatatggttcgccggtcgggggatttcccccgagtggcagatgaaaagggaactactttcgccagcttatacgacacgctggccagatattcctgcagctaaactggcgtga

SEQ ID NO: 398050 - DNA, 192 bp, Salmonella enterica
atgtatagagtctgcatgacagagctaaatacgctgaccggggaaaagaaacgttacaggtataagcaagattttaaatcactggtaaaggcgataaaaaaagcgcggtggctgatgaatgaaatcgatttcgctttccctgtaacggatgaatacgaatattttgtaaaagtggaaaaagtcaaaaactga

SEQ ID NO: 398051 - DNA, 420 bp, Salmonella enterica
atgaatttaccagatggatttacacacctttcaggtggttctacgtacttatcagaaaatgatattgcgaagcttcagcaattagcgcctcaaccagtacaaccagcgcagccggtacagatggcgcaaccgttatattatgcggtacagccacagccacagccgcagccacagcaaaggcaatatgtatttttgccgtggatacctgatcccaaaaaagcggaaagcctgatggtaagaacattattacaggaacgggttgatgttattagttgctttatagacaggatgaatgaagcgggcgtgttgtgggttaatgttaacaccggaaaggataacagaggcgctcaggtgttgcagccttttaatgtgtcggattcggtttataaacaggatgacaagccagccgacgaatcataa

SEQ ID NO: 398052 - DNA, 507 bp, Salmonella enterica
atgtcagatcaggaaaataccctcgaatccgtcaacaccgacagcaacctttcaccaggcagcacagcggatagcgcaggcgctggcggggataatcagactactgaaccaggcgttttcctcgttgaggttcgctgtccgcgcgagcgttacatccgcgccggcatccgctttatgcgcggcaaacagacgctggagaatgttccgcagtccacactcgatatcttacaggctgacccatgcctcattgtggtgtcggttcagccggcagccgcgccatctggtgaggctggcgtgcaaaacctggctgacgttgtcaatacgggcggtgatgtgacggtcgctgagattaacgcggcgattgatgtgctgattgcccgtgctgacccgcaggccttcaccaaatcaggtgtgccgggcgtgaaagccgtcggcgatgaactgggtcagcctgtcaccaaagcacaggtggacgctgcctgggctgcgcgtcaggagcacccgtaa

SEQ ID NO: 398053 - DNA, 240 bp, Salmonella enterica
atgtcaggataccgtcggcggtggctgccggagctgggcgtctttctctctgacggcctgcgtgaacgtgtcacgacactggccaccgcacagaacgtgacatctgagaacaggctgaatgccctggtggagcgcgaggaactgtgccgtaaactgtcccttcagacagataatggtgacgccgtgccggaacaacagattgccggcattgtcagccggtacttttcagcgctgtcttag

SEQ ID NO: 398054 - DNA, 141 bp, Salmonella enterica
atgacgcctttacgcatttttcgcaaaacaacacctttgggtaacgccattcgcctgagcctgctgccgctggtcgggctgtcgttatctgccttcgcagcgcaggttgatatcgccccggttcgctcgacaaaaacctaa

SEQ ID NO: 398055 - DNA, 441 bp, Salmonella enterica
atggcaacagaaacgatcgatcacaccacgctgcaccgtctggttgaggctggtgctgtccgtgcagcccacgtagtgggtacgtccggagggtgggcactgacagtgaagttcgggttaaatgaacgcccgctggccgcgcagcgcagtcgtaagatacggctattcaaaaaactggaaacgctggtcagttatctgaaagacgtaggtatcgcgcagtttgacgttgatgcttccaactacagtccggagaatcagaaccgtaacacccgacctgacaggtcggaggcgcttaaacgggcgcatgaagccgtggcatacgatgcgtggttccgggaacaggttcaggcatccattgatgatcctcgcccggcagtgcctgctgaggaaaccagacgacgctttgctgcccgaaagaatgccctgcgtaagggggcatga

SEQ ID NO: 398056 - DNA, 285 bp, Salmonella enterica
atgcgtctggaatggaaacccatggccctgacggacagggaaaatatcatggactatatcagccaggataacccgcaggcggcaatcgacctggatgatgagtttgaaacgtcggcagagcgggcctgtggcaatcctgacatgtacaaacctggtcgcgtcaaagacacccgggaagtagtagtcagacctcattacattctggtctatcagactacagaagaggaagttctgacggttttacgtgtccttcacgccgcccggcaatggtcacctgttcgatga

SEQ ID NO: 398057 - DNA, 642 bp, Salmonella enterica
gtgtccttcacgccgcccggcaatggtcacctgttcgatgacgtaaatttcggcggttgcggcgtagaaccccaatatgccgcgctcggcggaattatcctgtcggttgatgccagcctgacgcgcggcaaacagagtaacggacctcacggtgactacgacgtcgaaaccgggctgcaacacctgctgaacggtagccgcccgcaggtgaagccgctggggaataacagctggacgctggaacctgttcctgcaccccaggaagacgccctgacagtggtgggcgactggctgggggatacgacgtattcgaacatgctggcacacgtgacgttatccgccatgaagatcggcgcaaccactatgcgtgaggtgctcaaccgtattcctggcgttaccgctccggaaaacaacggtaccggcagccacgatctggcgatgaactttggtatccgtggactgaacccgcgtctcgccagtcgatcgaccgtactgatggacggcattcccgtgccgttcgccccctacggtcagccacagctttcgcttgctcccgtctcgctcggcaatatggatgcgatagatgtggtacgcggcggtggtgtggttcgctacgggccacagagcgtggcggcgtggtga

SEQ ID NO: 398058 - DNA, 351 bp, Salmonella enterica
gtggtgaacgttgttacccgcgctattccgcaagacttcggcattgaagcaagcgtagagggtcaactcagcccaacgtcctcacaagaaacgcacaacctgatggtgggcggcaccgctctgctttactccggcacgcgtggcagcgactggcgtgaacatagtgcaacgcgcatagatgatctgatgttgaaaggcaaatatacgccgaacgaggtgtatagctttaacagcctgttgcaatactacgacggtgaagctggcatgcccggcggcctgtctcatgcggattatgacgccgaccgctggcagtccacccgcccgtatgaccgcttctggcggccggcgtaa

SEQ ID NO: 398059 - DNA, 663 bp, Salmonella enterica
atgacgccgaccgctggcagtccacccgcccgtatgaccgcttctggcggccggcgtaagctggcaagcctgggctaccagttccagccagacagccagcataaattcaatattcagggcttttacaccgaaacgctgcgcagcggctacctggaacaaggcaaacgcatcatgctttccccgcgtaactactgggttcgcagcattgaaccacgctacagccaaagcttcaagattggcccaaccgcgcacgaagtgggtgtaggttatcgctatgcgaatgaatccatgcacgaaatgcgttactacaccgctacaatcagaggtcagttaccgaccgggtcaagcccttatgaccgcgatacccgttccggtactgaggtgcacgcctggtatctggatgacaaaatcaacgtcggaaactggaccattacaccttggatgcgcttcgaacatatcgagtcataccagaacaacgccatcaaaggcacgcatgaggaggtgagctataacgccccgcttccggcgttaaacgtgctctatcacctgactggcagctggaatctttatgcgaacaccgaaggctcgttaggcaccgtacagtacagccagattggcagcgaacctgggagttcggaacccgatacgacgatagcgcgctga

SEQ ID NO: 398060 - DNA, 339 bp, Salmonella enterica
atgagaacagtagcgaggagatcgatacagacgattgagcgtcggactcaactcgtcggttcttttgtggactcaacgacacataaagaattcttcgtgagaagattgagcgatcgtgtatcaccggcgcgccagttatttatcgtgacactgagtaatgacgttcgggacggcgatgttatcccatttgcggaaattgccatgaacaaccaaaagttgcgttatgtggtcaggcctgtagatcagtaccctcagtacgtgaatggcaatctgcttgagcgtattgaagcggagattgctcaatacatgaagaaccataaggaaatcaactaccattag

SEQ ID NO: 398061 - DNA, 768 bp, Salmonella enterica
atggctcctgcgctaataccgtcctacagcaaggatttgagcattacgccatttggcgaaaagcttctgattgaatctttctactttttcacgcttgaagctggccttttaagggctgatgaatacatcgtttcagccggagagtatcagtattatctcgatgtttatcagttgggctgttcgactgatgatttctttttagatcatggccttgacctgatagatatgaacattccaatgcaagatattgtgaacacacttctggcgctggatatggtcgacgatgacaaaacaattcgaattggtcgtattcaatttaatgattttaacttcattgaagaaaacggccagatgatgactggtaagcaggtcaaaagcgctgttatcgctccagacttccagtcagcgggtcttgcccgagaagtctacaaaatgctcgctaggaaacatgagtttctgatctgcgataatattcaaagtatcgccggtggtgccctttgggcaagcagcataatccgtatcgcagaggtcaggatctacaattcacgcacaaagaaattcatggacattcttggtcctggtgcgcgtggtgtttcaggtactttgccctggagtgcgaatgatttgtctgtagatgagatagttcgctggggccgtgcttatgatgatgaaaactgttgccgtcatattgtgcatgtaatctgcaaagaccgactcatagacgatcagttccatgagtatgtttccataggtggggcgacagaataa

SEQ ID NO: 398062 - DNA, 1179 bp, Salmonella enterica
gtgggcaagaaagaacaaggatcattatctctcccaagaggggtaaccattcgccagcataagactggcgacactctggtgatcactttcacatataaaggggttctgtgccgggagcccctctccagaatggaagcaaacgcgcgcggtgtgaagtacgccgagcgtctgcttggggagatacaaaaccagatcgtcagtggcacctttgaatatgcgaaatattttcccaactccaaaaagctggagctgttcgggatcgttaaaaagaccaaaaatataaagtcttatcttgatgaatacctgaaaatctgcgaaaaccgaaacctgtcaccatccacgatcggcggctatgaaaaatgcgtgtcggcgctgtcatcgttgcaccagttgcacgtcgccgaacttaccccggctgtattgaaaaactggatagccagccggaaaacaaagctgaaaacgaccaggaataacctttcgtttctgcgcagcgccatcgatgaagctgttacggatggcctgctgaccattaacccggtaaccctcgtcagcgccagccggtaccacgtgatcgacagcacaccgagcgccgacgattacgaggttgacccgttcacgccagcggagaccctcgccatttaccagaactgcaggtacccggaatgggaaaacctgttccgctttgctttcaataccggtctgcggagctccgaactgtgcgcgctgcgctggcctgatctcgacaccatcgcgaacacagcccacgttcaggcggccagtgtcgtaggggtacttaaaggcaccaagacaaaagccggtacccgcaaggtggagctgaacagtgaggcgctggcggccctgcaggcgcagaagcaatacacctttatgaaaagtgagttcatattcagcgatccgaaaacgggagaaccctgggcaaacgccgacgctatccgtaaaaaagcatgggtgccgaccctgaaaaaagctggcgtgcgctaccgtaacccgtaccagacgcggcacacattcgccaccaagcatattagccagggcgttaacctcttctggcttgctggacagatgggacacaaagggccggaaatgttattccgtaattacggtaaatacctggctgaatatgacggtaaaaccgcgattgaagttgggatgaagcagtaa

SEQ ID NO: 398063 - DNA, 309 bp, Salmonella enterica
atgagtgtgcaggcttcaaatccattttatgggggtgcctatgcgaattttgattcaggggatcctgaccacgcatttaattatgatattcagccgcccaaggatgcagagattacagggggaggcgcgacccttgtttattcaagggtatttgctcttgataatacccgtcctgtgcttatcaagcccggcagcgataattataccatgtcgtcaaaagttgatttgtcacggtggtcgggtatttccttggctaacgttggttctgcattaagtgccagctttacttataatatcacctaccagtaa

SEQ ID NO: 398064 - DNA, 1143 bp, Salmonella enterica
atgacgacgaataccttaaaaacgacaggcgctcagcgccacacagagaccgcggctctctcggcttcactggcatcatccgatgacgggtggtgccagttgctgccggccggtcgggtcagggcccgcgacggcagaccgaaaaagcctgctgcgggctggctgattaatgaaaagtcctgtgaccgtattaaggccaatctcgccgcccttaaacagcctttgctgattgactatgaccaccactccgaaatcgctcaggaaaaaggtgttaaagctgtcgctgccggctgggtgaaagctgaggatgtggcgtggcgcgaaggccagggcattttcattaaacccacctggacgccgcaggcgcagaagcatatcgacgatctggagtatgcctatctctcggcgaagctggagtattacgtggataacggcgagccggcgtccattcgaattgcgtccctgacgaacgatccagcgattaccggtatgaaatccgtcgcggccctcagcgctgacgacctttatgtaacaaccccttctacggagttaacccccatgaatgagcaattacgccagttactggcggcgctcggcctgactgtgcccgatgacggcgaactgacgccggaacttggtacggctgccctgtcggcgctgacggatattcaggcaaaagcgggtaagcatgacgagctgaaaacgcaggtcgccacgctgtccgctgaactggacaccgcgaaacaggctaataccacagtcgccggtgacgtcgacctgacgaagttcgtcccggttgagacctacaacaccctgcgtactgagtatgtcgccctgtctgcgcagcttggcaccaccacgcttgagcaggtgctggacaaggcagaggacgaaggtcgcgtgttcaaatccgagcgcagctatctggagggcctgggtaaacagattggcgttgcggcgctgtccgcgcaactggacgcccgccagccgattgctgcactgaccgcaaaacagacggacacgctgccctcgccgaaaaaagaaaccgcgtctgccgcgttgtctgcggaagacattcaggtaatgaaactgctcggcaagaccgaggaagagttccttaaagctaaaggggttaaccaatga

SEQ ID NO: 398065 - DNA, 477 bp, Salmonella enterica
atgtcgcagattgatgccgcagtagtcattgatgttaaacgcctgcaacgggtgtttctggaactgcaggcaatgggtgatgacggtaaggggctgacccgttccgtggcggccagcctgctgtcgtcatctgaaatggcctttgaacaacaaagggaacctgatggtgatgcatggcatgaatggtctgagccgtggcgggcatggcgcacaaagcacggttatgtgccgggtaaaatcctgacgttgcatggcaagcttgccggtgaaatgaccactgactacggcgatacgtatgcgatgattggttcgaatgaaccctacgccgccattcaccagtggggcggcacgcctgagatgagaccgggcccggcggctgttccggcgcgtccgtatatggggtttgataaggttgccgaaaaggaaatcctgaacctcatcaaaaaacgctttgagaaggccgtggacgcgtcgtaa

SEQ ID NO: 398066 - DNA, 1368 bp, Salmonella enterica
atgcgatgtttgcagcagaaacaaagggcatggtggacgaccttgagcgttgatttaggctatgccgccacgcttgcgcccaaagaggctgtcgcgtatttccgcgctaaagggcagcatatcggctggaactggtacgagacggccgcagatgttcacgcccgttcttttacggtggcaaaagccgcgcgcgtggatgtgctgaccaccattcagaccgaagccgaaagagcgatttcgcagggcgtctctcagcaggaatttatcgataccctcagtccccgcctgaaaaagctcggttggtggggtaagcaggtggttgtggacagcgccggcaatgccgaagaagtgcagcttggcagtccccgtcgtctggcgctgatatataacgtcaatacccgcgtggcgtataacgtcgggcgctacgcgcaactgatgaacagtaccgacacgcatccgttctggcagtacgtggcggtgatggacagccgcacgcgtccttctcacgcggcccttaacgggctggtattccgctacgacgatccgttctggaaaacccactacccgccgaacggctggaactgccgctgccgcgtccgggcgctctctcaggagcgcatgagtgcgctgggcctgcaagccacgcagggcgataaatacctcaccacgaagaaggtgcaggcggcggtggataaggcgacgggcgagatgattgagatggacgtgaccacctttgccgacggtgcgcgcgtgatgaccccggacgctggctggtcttataaccccggttcggcggcattcggcctcgatcagtcccttatccgcaagctcattgaagtgaaaagccctcagcttcgtgaaatggtggttcaggagatgaacaacagcccggagcggcaactggcgtttcgtatctgggcgaagaacatcatggaaacccggcgcggcggcaatgatatccgcacgctcggttttatgtcggaatccgttgcggatgcggttgagcaacgcactggtgaaccacccgcccgactgctggcaatgagcggtaagaacgtgctgcacgccgacagcgacaagcaccatacggatgagattgcgttaagtccggatgattttgcgttgctgccgtcgctgctggcacacccgaaggcggtactgtgggataaacgccacaacaacctgatgtacctgattgacacgaaagatggcaccgcaaagattgctgttaatgcgccttacagtatcaagcgccagccggatcagcttgacgttatcgtaaatgtctatcgggtggaaaacatggataagctgaaatcagatattcagggtgggcagcttgagttgcttgaaggacgtgtggattaa

SEQ ID NO: 398067 - DNA, 1257 bp, Salmonella enterica
atgcttgatgagtaccttcagggtgcggactggttcgacgcgatgctgtttgatgcaaccgatgcgatccttaaggggtattcctgccaggaaatcgaatggggtcgtattggccgcgcgtttgtgatcaataaggttatctggcgcgatgcggggcatttctgcctcaatccgcaggacttcagtgaactgcggctgcgcgacggcagtgccgaaggcgccccgttccagccgttcggctggatagttcaccaggcgcgatcgcgtaccggttacgccggcgcgcagggactggtccgcacgcttatctggccgtttatcttcaaaaactactcggtgcgtgatctggctgagtttctggaggtgtacggcctgccgatgaaggtcggcaaatacccggccggtgcaaccagagagcaaaaagccgccctgatgcgcgccgtcatggaaatcgggcggcgtaccggcggcatcatcccgaccggtatgagtctggaattcgaagcggcggccagcggtcaggcggacccgttcctcgccatgatgcagtggggcgagcgctccatctccaaagccattctgggcggtacgttgaccaccgatgccggcgataaaggcgcgcgcagcctgggtgaagtgcatgacgaggtgcgcaaggagatccgtgacgccgacctgcgccagttaaccaccacactgagccgcgatctggtctatccgctgtatgcgctcaataccacccatgcggtggatattcgtcgcctgccgcgtctggtcttccagacaaaagagccgggcgatatcaccaaaatcaccgcggccgtcgtgcagctcggtgccgggatgccggtgccgctggcgtggatacgtgaccagaccggcattcctgagccggtcggcgatgagccggtctttaccattgccagccctgaaatgaccctgccgccgccggagcgaccggaacgtcaggaaaaacaggcgacgctttcggcgcaattgcccgcgccggtgacaaccggcccgcgcgatgaactcgacgacctgggcgattccgtttccgccggtgtcctgcaggcggcgattgatccggtgctggagccggttatcaacgcgattaaaacgaagggtctcgcggaggcactgtctgacctgccggcgctgtatcagcagatggacgataaaaagctgatgacactgctgacggatgcgatgtttgcagcagaaacaaagggcatggtggacgaccttgagcgttga

SEQ ID NO: 398068 - DNA, 1152 bp, Salmonella enterica
atgacggaggcgcataagcagcttctggcgtttcagcagcgcattactgatttgtcaggcaaaaaactgacggcagacgaaaaaagtgtactggcccacagggatgaaatagagcaggcgttacagaagctcgatatctcacaacaggatttgcagcaccagaatgccctcaatgaactgaagaaaaagacgctcacattaaccagccagctcgctgacgaagaatcccgcgtcaggcagcagcacgccatggcgctggccacaatgggtatgggcgatcagcaacgaggccggtacgaagagcgtctgaaaattcagcagcgctaccaggaacaactggagcagcttaagcgcgacagtaaggcaaaggggacatacggttctgacgaataccgtcaggctgagcagaaacttcaggacagtctcgatcgccggctggctgagtgggcggattacaacgcaaaagtggatactgccagcggagactggacgctgggggcgtcgcgggcgctggataactttatgtcacagggcagcgacgtggcaggcatgacggaaaacgtcttcactgacgcgtttaacagcatggctgacggtatcgcgaattttgccctgaccgaaaaaatggattttcgcagttttacggtctccattctggcggatctggcaaaaatggaggcccgtattgccgcttctaaattgctggggtcagtactgggtatgtccggcgctggcgctggtgccggaggaggaacgccgtcaggagcttacaacgcggcggcgctgtcggttattccgaatgcggacggcggcgtgtaccgctcggcaggactcagccagtacagcggcagcattgttaacagaccgacgttctttgcctttgccaggggggctgcagtgatgggggaagccgggccggaggccattctgccgttacgccgtggcgcaaacggaaagcttggcgtggtggcggcgggaagtggcggaatgacaatgtttgcgccgcagtatcatattgccattactaacaccgggccggagctggggccgcaggcgctgaagacagtttacgatgtgagcaaaaaggccgcgtctgatttactgcagcagcaggggcgtgacggcggcagactgagcggggcatatcgctga

SEQ ID NO: 398069 - DNA, 696 bp, Salmonella enterica
atgcaggacataccgcaaagcaccctgaacgagaccacgaaaacggaacagcccgcaagagcggacttgtgggagttcgatttaaccgcgattggtggtggacgttattttttctgtaatgagcccaacgagaaaggtgagccggtgacctggcaggggcggcagtatgagccgtacccgatacaggcgcaggatgttgagatgaacggtaaaggaccgtcaccgagggtaacgcttgtcgtctccaacctcttcgggctggtcacgggcatggcagaggagctacaaagtctcgtcggcgcgtcagtaataaggcatcaggtttacagcaagtttcttgatgcggtgaacttcagtaacggcaatccggaagccgatcctgaacaggaggtggtagcgcgctataacgtggagcagttatcagaactggacgcatcgactgccacccttattctggcatcaccggcagaaaccgacggttctgtggtgccggggcgtaccatgctggcggactcctgcccgtgggattaccgggatgaaaactgcggatacgccggcccgcccgtggccgatgagttcgataagcccaccccggacccgaaaaaggataaatgcagtaagtgcatgaccgggtgcagactgagaaataaccttcagcgcgccggatttttcgcttccatcaacaaactgtcttaa

SEQ ID NO: 398070 - DNA, 1416 bp, Salmonella enterica
atgattattcctattataatggcaggaggttcaggaacacgtttatggcctctttcgcgatcattatatcctaagcaatttttgtctttaacaagtcaacatagtctgcttcaagaaacactaaataggttaaaggggctggattgtttatctccgattattgttagtaataatgagcatcgatttattgtagccgagcaactacgacaacttgggattaataatttccaaataattcttgaacctgtaggcaggaatacggcaccagctgtagccttagctgctttaaaggcgttggagttatacggcgatcacctcatgctggttcttgctgcagatcatgcaattcaaaatgtcgatgcctttcacactgcaatagtggcagccgaaaaagaagctttaaataataaactagtcacatttgggatagttccaacgaaacctgaaacaggttttggatatataaaaaaaggagagcgggttaatgactcatcatttcaggtcgagtcatttgttgaaaaaccagatatagaaactgctaaagattatcttaaacaaaattgctatttatggaatagcggcatgtttatgtttaaagcgagtacatatttagaagagctaaataaatatcgtcctgacattctatctgcatgtaaagagtcactttctggagcatgtactgatttagattttataagattaaattcagaaaagtttgctgcttgcccggatgaatctattgattatgcagtaatggaaaaaacgcaggattgtgttgttgttccacttgatgcaaattggagcgatataggatcatggtcatcgctttgggatatatccgaaaaagacaaaaataaaaatgtatctcatggcgatgtaataaattataatagtaaaaataattatatttattctgaaagtgcattaataagtaccgtaggagttaataatctaattatcgtacaaacaaaagacgcagtactcgttgcgcaacaagataatgtacaagatataaaaaaaatagttgaaatacttaaagatagtaaacgaaatgaacatatatcacaccgtgaagtttatcgcccttggggacgctatgattctgttgagcatggtgaacgctacaagataaaacgtattatggtaaaaccaggtgaatgtctatcaagccaaatgcatcatcatcgtgccgagcattgggttgtcgttgctggtacagcgaaggtgacttgtggagagcagacttactacgtagcggaaaatgagtctaccttcattccgattggaactatccattcaatagaaaatccaggtaagataccattggaagttattgaaattcagtcaggtccgtatttagaggacgatgacataattcgattagccgataagtatggacgtgttggagaaaaataa

SEQ ID NO: 398071 - DNA, 1203 bp, Salmonella enterica
atgagtagtcatgatataaataagaaaaggattttagttttaactcctcgttatcccttccctgtagttggtggagatcgattacgtatatataagatctgcaaggaattatctaaaaactataatctaaccttgttaagtctatgtgataagaaagaggagttggactatgaatatgatgaacaagtgttttgtagcgttcatcgagtttatcttcctaaaataagatctcttataaatgtggtcttttcattattgtcaaaaaaacctcttcaaataggatattacaaatctaaggaatttgaaaataaattaaaagcattaataggtgagcatgatgcatccctttctcacttaattagagttggtgattatgttaaagatgatagtgggataaaaatcttggagatgactgatgcgatatcgcttaattataaaagggtgaaagaaaaagcgtccttaatgagtttgaaggggcttatctattcatttgagcaaaagcgacttgaacagtatgaaaggaatattattactagttttgatttggctacgttagtttcgcaagttgattacgattacttatatcctgagaaaccagcaaatgttattgtctgtggaaatggagttgatgcaacaagtctgccttttatcagtcgtaaaattgatataaataaaactataactcttatatttattggtaatttatattcattgcaaaatatggacggtgtacgatggttttgtaaagaagtattgccttttctgaatgaatatggggattttaggtttaaagttattggacgtataacagaaaaggataaaaagtggctagaaaatcaatctggagttattgtcacaggagaagtggatagtataacgcatgctgcgcaggatggtcatatagggatatgccctattaggctaggtgcgggtattcagaataaagtgcttgaatatatggcgttgggattaccatgtatttcttccacagttgggttcgaagggttaggtgctacaggtggtaaagagatttatgtggccaatacaaaagaagaatatttacaaacaataaataattttataattaatccagataaatatgctgaaacagcaatatcggccaagcttttcatcgatgataatttttcctgggaagcgaaactgaatccttatattaaaaaaatcatggagagtgttaaataa

SEQ ID NO: 398072 - DNA, 465 bp, Salmonella enterica
atgaaaacggtagtgctacagcgcgatgcttatcgggtcgggcaacaccggttcaacccttcactgtggcagttcggcaaagagatgggcttctctccacggctgtgccgccccttcagagcacagactaaaggcaaggtggagcggatggtgcagtacacccgcaacagcttctacatcccgctaatgactcgcctgcgtccgttggggatcaccgtcgatgttgaaacagccaaccgctacggcctgcgctggttgcacgatgtcgctaatcagcgcaggcacgaaacaatccagacccgtccctgcgatcgctggatcgaagagcagcagtccatgctggctctaccgacggagaaaaaacagtatgacgtgcaggtagacgaaagcctggtgaccttcgacaggcagccactgcaccacccgctatccatctatgacacgttctgcagaggagccgcatga

SEQ ID NO: 398073 - DNA, 198 bp, Salmonella enterica
gtggaaaagctcactatcgaccagaaattacaggccgcgagaatggcaactgatattactatcaaatcgattgaaagtgataaaatcacaaaatgttaccattcatccctcaagactgaatcaacatatatggatatttataatactgtgtatgcgcagattataaaaaccattatggttgaacctgacaacatctga

SEQ ID NO: 398074 - DNA, 384 bp, Salmonella enterica
ttgttgtcccgttttcgcgtttttagtgtcccgctacatccggcttttgtgctggtgccaacggtgatggagtctgttgcaaaccaggtgattaagtccgtcagtgtcaaaggggcggatattaacgccgggatcattaacccggtgaaagatttcgccacggtgattgcggaaccccgtctcgatgatgccagccagacaacattttatctgacggccgcgaagggcagcgacactattgaagtggcctatcttaacggcgtggataagccgtatatcgatcagcaggaaggatttacggttgacggggtgaccaccaaagtcaggattgatgcgggcgtggcaccggtggattatcgcggactggtgaagtgctccgcataa

SEQ ID NO: 398075 - DNA, 486 bp, Salmonella enterica
atggccgcaaaaacacgtaaaaccccgaccgcagtaaaacaggacagtgacgaggcggcgctggccgccattcgccaggcgctggacggtgacgacccgcgcacggccgggctgacagaacagctacaaaacggctacgtcgatttactcgatggtctgccgttcggcgaggggcgtgtgtaccgcgtcaccttccgcgaactgtcggcaaaggacagcattgacgccgagaccgaggcggaacgcgtgatggacacccgtaacggcccgattctgattgcctctccgtcgctgcgcggcgtggcgctgctgcgccgccagattgccgccgtgggcgatatcgaaggcccgctctcgatgctgcaaatcgggcaactgagcgagcgcgacctgtcccgcctgatggtggcggttaacctgcgcgatacggcgctcgccggaaagctggcaggtgacaaggggcgactgggagcggtgccggagtga

SEQ ID NO: 398076 - DNA, 366 bp, Salmonella enterica
atggcaggaaatcagtatcagggcgtggcaaccgttcgcgtgaacggcagcgaatacgccacgctggaaggcgcaaccttcacgccgtctggctttgaacgaaaggtggttaaggggcccagggtgtatggctataaccagcaggcgaaagaggccacgctggaatgcaaattccctgccggtggcgatgactccccggacagtgacgtgatcaacacctggaccagtgtcactatcgaatttatcgccgataccggcgaggttcacatgatgacaaaggcgtggagttcggagccggcatcgcttgctgctaacggcgagatctccgcgaagttcgccagtgcaaaaagtacccgcgtgcagtag

SEQ ID NO: 398077 - DNA, 735 bp, Salmonella enterica
atgaacacagtaaccatcaataacaaacaacttccggaaatcgaatatcgcggtcagcgtgtagtgacgttgaaaatgattgataaagttcaccagcgcccggagggaacagcaagaaaacgttttaatgataacaaatgtcgttttgtagagggcgaggattacttcgtccgaaattcggacgaagcccgtgaaatgggggttacagcaccaaatggtattatttttcttactgaatccggctacctgatgcttgtcaaatctttcactgacgatttggcctggaaggttcagcgcgagttggttaataattatttccgcacccgtgaacccctgaccgaaatcgagatgatcgcagcaatggccgctgatgccgttcgccagcaaaagcgcctgaatcaagtcgaagtacggatcgagacagtaaccgaagccgtagagaacatcaaacgcggaaatatgcgcgccggatatgtcggctatcgccaggtggtcgccaaaagcggaatgactgacgcgaagtgtcgcaatctggtaaacgcttaccgtatccccaccgatacgcatgaatttatgacacctgacggccttttgtcccgccgggctatcgttgaacttgagccgttcatggaagcctttcatcagatgatgtcagaagctgaaccacgcggcacacgctggtatcacccgaagatggggctgtttcaggctatcggctgggagggcaaagcatga

SEQ ID NO: 398078 - DNA, 435 bp, Salmonella enterica
atgacgtttaaaatgagcgaacaggcgcagacgattaaagtttataatctgcgttcagatacaaacgaatttatcggtgcgggcgatgcatatatcccgccgcacaccggattaccagcaaactgtaccgatgttgccccgcccgatattccggccagccatacggctgtattcgaccgtgaatcaggagcgtggagcctgttcgaagaccaccgcggccagacggtttacgacacgacaaccggcaacccgatttatatttcagaacccggcccgctaccggaaaacaccaccacacaggcccctgcatcaccgatagataaattcgaaaacggccagtgggtggctgatttgaataccgcgcgtattcagaaacacgctgatattaataactggcgtaatacgcaggaaaacgcgaattacacttcagtttaa

SEQ ID NO: 398079 - DNA, 591 bp, Salmonella enterica
  misc_feature (571)..(580): n is a, c, g, or t
atgaataaagaatattatttactgccttcgaataaattaagatttaaacacttgattatatatcttgtggtatgcctgtgccttttttctggctttcttatcaatgatgcaaagactcagatagctcaagaaattactgatatattagcaataatatccagcgcattgctaattgtgctaattctgtattattatatatatcgggtgcgctttttttctctgacgctactattttcttttgttttttcactaataattggtttgccttcgatatatctcttttattttaaaaacacagataatgactttgggattatttgtatatgggcaatgctaattaatgttgctctctatctactttcaacaaaaactttttataaaaaagaagaaaggcgtttatccaacctcttttatgcgatattttttattgcagcattttgccagatctataaggttatgatttattttctttttattcttaattctggtgccgggcatctcgcaatatatacagaaagcgaagagttattatcccaagtgccctttgttatacgtgctataagtggttttnnnnnnnnnntccaagtataa

SEQ ID NO: 398080 - DNA, 654 bp, Salmonella enterica
atgatatgcatatttatactatatttatattcaaatgagattagagtaaagcatattttcaaaaaaatctcaaaacctactgttcttctggttggttttatattattttctttggtttcatattttagagaaggctaccagattaattttgtaaattatattggtattgtattagattctttgtcgtctactcttggtggtatgcagaatttatttagtggacaaatagggagttgggataagttaagtcctgaagtcgtattcacacagatattgccgttaagtggtttaggttttattaacaaccatcaaattgcaaaggatttttctatcattgtactaggcgatgtttcatcaggtattgcattgtcatcctccggattattagagtcgacaatattaagcctacactttggatctgtattttatttaatctatctaataggctttatttcattaataacacgcgcattgaatagtcaaaaagtattaataaacttcattgctatttcaatgatttccggtttcttctatgcagtgcggggagagttgatattacctttagctttcttattaaagtctctgcctatcgttataatatcccctttgcttgtaaaagggcattttagggctttgtcagtagaatcaaaatga

SEQ ID NO: 398081 - DNA, 321 bp, Salmonella enterica
atgaacgataaagagatattgcagaccgaatttctgcggagtatgaacgaaaaacttaaggcagaacttcttgatattctccctgcagatcatgcaacaacgaaagctgttcgctcctcccccactggttgtatcaccaccgaaacaatggatctcgttataaaatcattaaccccatccatgcttcgtcgggtaaaacgagaaattactgcatggcttgacgatgaactcagctacctcgactgccagtgggatgaacgatacgcgagcactcaaaaacgacgattattcagcatactttctggcgaaggaagaaactaa

SEQ ID NO: 398082 - DNA, 456 bp, Salmonella enterica
atgctgatggatctgcatgtcggtaattgtctcgttcgccagcttcaggctgtgagcagcggtgccgcgctgcgatttatatttcacggcgtcaacctggtcagcgagcggttacgctgccagcggaataaccctcttcgtcaatatggttcgtgctgtacacttacaataacacggatagcaaacactgttgcgttaatcagacgctcctctgctggcacatcaatttctaacccagtcataacggacaacctcaaaagaattcgcctgtccgggagacggtttacccggatgtcgggtgagtggaaaaagaaaagccgcattacgcggcttgctgaaaaatccctgcgttcgttactctggccttccagcccgccagtgtgtcagcactggcgttcaactcattactggagggatagctggttacttctggttgagataaaaaatgaacgataa

SEQ ID NO: 398083 - DNA, 183 bp, Salmonella enterica
atgccggatatgaaagatatcgtcaccgacgacagggtgaaaaacgccctcaaatcagacgcggtaaccaccgcggtgaaagcgcagattaaatccacactggataaagaaattgatactgcgctggcggatttgccgggcgtggagcaggccccgacaggagcgggtcagtgtcagccatga

SEQ ID NO: 398084 - DNA, 321 bp, Salmonella enterica; identical to SEQ ID NO: 398081

SEQ ID NO: 398085 - DNA, 456 bp, Salmonella enterica; identical to SEQ ID NO: 398082

SEQ ID NO: 398086 - DNA, 186 bp, Salmonella enterica
atgccggatatgaaagatatcgtcaccgacgacagggtgaaaaacgccctcaaatcagatgcggtcactactacggttaaagcacagattaaatccacactggaccagcagatcgatgctgcggttgatactgcgctggtggatttgccgggtgcggagcaggacccgacaggagcgggtcagtaa

SEQ ID NO: 398087 - DNA, 510 bp, Salmonella enterica
atgagcggaacactcgccggtaaaacgggcggtcacgctgacgacactgctggttgcgtccacgtcagcgccggcgggagccgcagacgccgccgtaaagggtgcatctcgatcggcattaatcagcgcggccagtttgtcagccagttctttacctttctggccgctgctgactgccaccaggtagcgacgtccacccacataaacgcggagcacaccgtcaccggtagccgtgccgctcagtgtaaggctgccggcgtcagctttaccggttccggccccctgagcaatcacgtacagttcagtatccgggttgatgctaataaactctttcaccatccacgccagcatggagccacgcccgaacaggctgaccgcctgcgagtcgcgggtgatgcgtaccggcgtgtcaagctggccggctccgtcaaccttaccgtctttcaggtttgcctggccgaacatcagtaccgtctgatgctgcgctggcgtaccgaccaccgccattga

SEQ ID NO: 398088 - DNA, 510 bp, Salmonella enterica
atgagcggaacactcgccggtaaagcgggcggtcaccgataccacgctgcttgtggcgtccacgtcagcgccagtgggagccgcagacgccgcggtaaagggcgcatcacgatcggcattaatcagcgcggccagtttgtcagccagcgctttacctttctggccgctgctgactgccaccaggtagcgacgtccacccacataaacgcggagcacaccgtcaccggtggccgtgccgctcagggtgagactgccggcgtcagctttaccggttccggccccctgagcaatgacgtaaagctcagtgtccgggttaatggcgataaactctttcaccatccacgccagcatggagccacgcccgaacagactgaccgcctgcgagtcgcgggtgatgcgtaccggcgtgtcaagctggccggttccgtcaaccttaccgtctttgatgttcgcctggccgaacatcagcaccgcctgatgctgcgctggcgtaccgaccaccgccattga

SEQ ID NO: 398089 - DNA, 219 bp, Salmonella enterica
atgaagaccttttttattaaacccgcgccggggcgcatggttcgcgaccccgacacgctggggtttttaaagcctgacggtgaagaaaagcccttcaccccgtactggtgccgccggctcgatgacggtgatgtgatcgaattcaatccgaatgaggcgcagccagccgtaaccgccgggaaagttaaaacggctgctgacgtggagaaaagtgcatga

SEQ ID NO: 398090 - DNA, 282 bp, Salmonella enterica
gtgattgttaaactgaaagacgtaattcgcattttcctgcgtattacgccaggtgttaatttcggtgtgtttccggcggcgggcatcgtcaatatccggcagcgggatatccacccagcagggcaggccgtcactaccggctgcgcgttctttaccgtcgggcgggtgattaccggcgaactcaagccagacatcatcgctgacctcaacggtgtcagccgggaatgtcccggcatcgatatagacctgtttcatctggtcagggtaaaacatattttttga

SEQ ID NO: 398091 - DNA, 720 bp, Salmonella enterica
atgcaaaaaagccagaacggcgcagacgtccccgacaaaccggcgtttttacagaacgtgggggcattccccgttaccggggggcggcttaacggcccgctgggtattggcactgacaatgtactgggggggaattcgattgtactcggtgataacgacaccggaattaagtggataagtgacggcgtttttggactgtatgccaacggtgctcagatcggttatatcgaccctgccgggctgcacctcaatagcgaaggtctgcatgtcggtggcgcgaggatgagcagcgacggaaatgtctgggggacacgctggaacgcgtcagggcagtggctatgggatgccattgttgagcaactgaatacccgcggtacgattgactggatcaacagtcagttgtcagagcgcgacaacaacatcaacgcccgcgcgcccaggaataccgccagtcttgccgtcaatggctggttccgtgatgcgtcaaccggctggatatttcagtggggaataacgccatttgccggaaacaccaccatcaccgtcagtctccccataccgtttcccaaccagggatttctggcgctgggcgggcctgcatcggcgctctggtacggcgaggacgataattccagttacgcagcactgctgaataacagtcagttacaggtcaccacggacaccaacgtgggaacggcctggatagtcatgggacattaa

SEQ ID NO: 398092 - DNA, 762 bp, Salmonella enterica
atgggcgaggtctacaataacggctatccaacggaatacgggaatattttgcgtctgaccggaaccggtgatggggaaatcctcattggctggagcgggacaaacggtgagccagcgcccgcatatattcgcagtcatcgggataccgccgatgctgagtggtcagaatgggcgatgctctatacctcacttaatccgcctccggactcgtgtcctgtcggcgcgccgatcccctggccgtctgacaccatccctgccggttacgccctgatgcagggacagtccttcgataagtctgcttacccgttactggcgctggcctacacatccgggataatccccgacctgcgcaggctggttattaaaggggccgggaatggccggtcagcactcagttatgaggcggacggtaacaagcggcacacgcacaccgcgcgggcgcaggataccgatttaggaacgaagagcacctcgtcatttgactatggcacgaaaagttccggttctggcggcggccacgtccacgaattcggtagttacgtaaattcatactggggggactctaaccatacctcctttttaaccggagatggtgcgtggacaaaagaggccggtatccatgcccacaccacctggattggccctcatggacatacgatgtacatcggcccccacggtcacctggttattgttgaccctgacggtaatgaagaggtcacggttaaaaacatcgcctttaactatattgtgaggttagcgtaa

SEQ ID NO: 398093 - DNA, 264 bp, Salmonella enterica
atgcaacagaaatatggctggtacgagtttagccgcgaactttgtgaacagaatttaaaaaatagcggcgctcgtgcgggtatacctcactgtcttcctcagcttgttacgatggcgattgatatgagaatgaccagggaggcgtttctcagggctgtgcgtgttgttcagtgtataaacattaccgcaaaagcacgagccgaagggcttcacggcgctgagttgtatctgtttgttcgttattttgtgggtaaaacatcatga

SEQ ID NO: 398094 - DNA, 615 bp, Salmonella enterica
gtgaaaaagagtatggcaggtcagggtgtggcaggggcgttactgctggcagggctgatggtgagtgtgggcgcaatggcggcatctggtgacccggtaaccggtggttccggtactgtcaacttaagcatccccgttatgaccacttcctgcagcatttcggttcctaacacttcatttacttttaaggcacttagcaaaaatggaactgataaagtctggaccgtgctggacaagcagaaatttgatatcctgtttaaggattgcagtctggatgccttgtctgttaagttacaggcggctactctgccaataccaacagattattctattggggatactgcagcttttgattcatcaagtgatcctgatcaggcattttattacagagtcatgttaccgaaagaagatactgcgataaaagcgggggcaatccactatactaatggagacgaatactttaacttaacaggtgcttcttctgttattatcaaccccagttctgatgactatacgctatccagcaatctcttgcttatgtccagtggtaaatcccgcactaatgtagcatcgactgtcaacggaagttttaattataatatcacctaccagtaa

SEQ ID NO: 398095 - DNA, 501 bp, Salmonella enterica
ttgccgctcgtgctggcctatcgttactccgcaccttacaaaacgggtgccgggtttagcagcctgattgcgatagcgggtagccgcttaatttccgatatgcggtttttttgtgcccgttacaccaccctaccccgtattatggcgggacgtagtggggaggccgcaaggcctgctggttcctatcgcgccagtctgctaaccttgctacgtctcgccaccccgtttagcagcgtgttagcgagactccataaaaccgcattggaggccgctaatatggctaattccccacaatctcaactcgtcattttaccgtatgtatccgccgttgatccggaaggtatccagcttggccagtggctacaggagacagaaaaccggcttcttgaccgcgtaaaagccgcgcttaatgaagctggcgtagcctggattgacccgcgcaccaaagaacgcagcaaacccgccgcagccgacagcatggagggttccgacaatgcgtaa

SEQ ID NO: 398096 - DNA, 801 bp, Salmonella enterica
atggtacgcggcgttcccattctgaccttcgaagcgccggaggatttcctcagtcgtgcggcgtggctgcgcgagtctgagattaactcctggtgtgaagaacatttaaaaccacttttaaccgcccttaatccacgttcgcgctacagcttcggcgaggactttgcccgccgcggcgatctgacctgctttaccgtgctggaaatcaccgaagacctgcagaagcgcgaggcgttccgcgttgagctgcgcaacatgccctacgagcagcagaaacacatcatgctctacatcctgacgcgcatagcccggcttatcggcgcagcgttcgacgccaccggtaatggcggctttctggcagaggcggcccttgagcgcttcggccccgaactggtggactgcgtgatgctctccgcgaagtggtacggcgagtggatgccgaagctgaaagcggagtttgaggaccagaatatctttgtcgcccgtcaccagaccacgcttgacgacctgcgtcatatcaaggtcgtggcaggcactccacagattgataagggccgcaccaaagacgagaacgccaccgcagccggcagccgtcgtcacggcgactttgcggtggcgttgtgtatggcaaaccgggcggcttatatggatggcttcgtgctcgatgacgaggcatgtctggcgatgccggaacgcggacgcacgatggaagacgccgaagacaggggccggttctttatgacaccggaggaagaagacgctgacagcgcatatcacgagtttgagcaggggtgctggtaa

SEQ ID NO: 398097 - DNA, 366 bp, Salmonella enterica
atgagcatcagtcccgtcagtcagattgctgagggtacgggtgatatagctcacggctcctgtagtggcgtcagtaatcttctgtccgatactgacctgattatccttgtccgccacagagtttgcgccaagagccacgctgttctttcctttagcctgagcactctgtccggtggcggtgctgccatttccggtagcctgagcattctgtccggtggcggtactgcctggtccagtagcaatagcactctgtccggtggcggtgctgccatttccggtagcctgagcattctgtccggtggcggtgctgatctctccagtagccgtagcatcttggccgatagaaaaagcgtttttggtggttga

SEQ ID NO: 398098 - DNA, 615 bp, Salmonella enterica; identical to SEQ ID NO: 398094

SEQ ID NO: 398099 - DNA, 393 bp, Salmonella enterica
atgagtaaattcaccacccccgcgattctggagatgctggagcactacagatggcgggtatacgaaccatttgagttttacctgagcgatgacaacagcgatgttattgaggtgccggccggttttgtcaccgacctcgccagcgtgccgcgtatcttctggacaattctcccgccagacggcaaatacgccaaagcggccatcattcacgattacctttacgacaacgcactgcgcacaaagaaggaagccgacctgatatttctcgacgggatgacggtgctgggtgtgccgaagtggaagagaacggtaatgtactgggctgtgagattatttggtagagggatgtacgggaaagagcaaaatactgtcattaatggcaacggaagatga

SEQ ID NO: 398100 - DNA, 249 bp, Salmonella enterica
atggcgcgggaatcgctgtgtgacgaaggtgcgcagggagtagcgcaggtacgacagcgtgtagatggtctcaacgtcgagatagctcggatcaacgtcgccgtatttattaacgcggtacatggtcacctggcgctcaatctgcaccacgtcgccggccgctacggtgacggtcgcaatgccgccgtgcagcagcaggttacgctcctcgctggtcaggcggtcagcaagctgaggcgccaggcgtga

SEQ ID NO: 398101 - DNA, 180 bp, Salmonella enterica
atggacagaatacttatgactatgctgtcggtaaaaaagccgctgaggatttcatgggaaagtccggtgatgaagagctttggggcatgggattcaggattgaagatcgggaagggaggctggtggtatgcgacgaaaatggtgagagtgaaccaaccagcgaacatcgcgataaaataa

SEQ ID NO: 398102 - DNA, 444 bp, Salmonella enterica
gtgaccatcaatgttccgatagtgacgtccacctgcagtgtttcggtgccgacggaagtgaattttgacccgattaacaaaaattcgctgcgcttcagcggcttaatagcaagtagaaaccttgatgttgcgttttcgaactgtaaggataaaacactgcagatgagtgtgctggcttcacattcaatggggggctgggcgtattttgattcaggggatcctgaccacgcattgtattataatattcagacgccactaggagggggtacgaccgtcgcttttagaggatttgctcttgataataccactcctgtgcttatcaagcccggcagcgataattataccatgtcggcaaacgttaacttgtactgggatgtgggtgttcccttggctaaccttggttctgtaagtgccagctttacttataatattacctaccagtaa

SEQ ID NO: 398103 - DNA, 261 bp, Salmonella enterica
atgagaacaatccagttttttggaatggatattcccgttccaaccctggacgtgcaactcgaactacctgctgattataccggttgccagttggtttatttcaaagatggagaggttacctctcatacgccactacgcaaaggtgagtttatcacaacatttgatggctttattcaactagctcaccgcagcggttgggttgttaccccccccccagtcagaaagaacgttattcgggagaaattaaacgatgatcgataa

SEQ ID NO: 398104 - DNA, 444 bp, Salmonella enterica; identical to SEQ ID NO: 398102

SEQ ID NO: 398105 - DNA, 375 bp, Salmonella enterica
atgtttcgtgatggttcattcctgaaaattggctggccgtccataatcgttttttcttcgtcggattacaagcgggtggcgctgaccgactatgaccgtttccctgaagatatcgatggcgagggagatggtttttccctggcatccaaacgtaccaccacctttatgtctgcggggatgacactggcagagagttcgcctggtcgggaaatcaccgatgtgaaatggcggcgttcttcgccgcacgaagccccgcccacgacaggcattctttctctttataaccggggcgatcgccgtcggtggtactggccctgtccacactgcggcgactggttccagcccgcgatggaaaacatggtggggtatgggtga

SEQ ID NO: 398106 - DNA, 447 bp, Salmonella enterica
gtgaccatcaatgttccgatagtgacgtccacctgcagtgtttcggtgccgacggaagtgaattttgacccgattaacaaaaattcgctgcgcttcagcggcttaatagcaagtagaaaccttgatgttgcgttttcgaactgtaaggataaaacactgcagatgagtgtgctggcttcacattcaatggggggctgggcgtattttgattcaggggatcctgaccacgcattgtattataatattcagacgccactaggagggggtacgaccgtcgcttttagaggatttgctcttgataataccactcctgtgcttatcaagcccggcagcgataattataccatgtcgtcaaaagttgatttgtcatggtggccgggtgttcccgtgactagcgttggctctgcagtaagtggcagctttacttataatatcacctaccagtaa

SEQ ID NO: 398107 - DNA, 546 bp, Salmonella enterica
gtgagtgacgggctgatttttgcagccgtacagtttgacggtgccacgaacccggacgggacgccagtgtatttacccgtcacggtgaccgatgacgaatccggcccggacgcgtggatgctggcccggataaaatcgctgtacagcattacggtaccggaattcatcctggaggccgccaggcagaaaaagcgggccgaaattaacgcgtggcgtgacgctcaggaaaacggcagtgtgatttttaccctcaacggccaccgctgggactgtggtaaggcgtcacagacgcggctgtctcccgtggtggccgtggcaaagtccggtatgctcccgcctggctttttctggacggatgcggacaacatcgatgtcccgatgaccacggacgaactcaccgcgctggaagcggcgatgcagcagaatatggtgttgcagggctttaaaatccacgaacgccagcggcagatgaaagagggggtggacaaattaacggactataaggcgattaaggattacgccgtgggctggcctgagggaagttaa

SEQ ID NO: 398108 - DNA, 306 bp, Salmonella enterica
atgagtgtgcaggcttcaaatccattttatgggggtgcctatgcgaattttgattcaggggatcctgaccacgcatttaattatgatattcagccgcccaaggatgcagagattacagggggaggcgcgacccttgtttattcaagggtatttgctcttgataatacccgtcctgtgcttatcaagcccggcagcgataattataccatgtcgtcaaaagttgacttgtcacacaacccgtcagacacggctaacattggttctgcattaagtaccagctttacttataatatcacctaccagtaa

SEQ ID NO: 398109 - DNA, 285 bp, Salmonella enterica
atgaaaaaaagacattcaaaagcagaaatgattgaaaaaagaaactcagaccttgagataaataaacgtcttcgccgtatgcagatgttatcgatttctatgtcatgcgctttaattagcgatccatctgtagccaagcagatctctatgtgtatgggggaattgttttcttatctatatgatgatgttttttatgtgcgtagtgaactaaataacaggaaactggtggggggggtaagagattggtgcgagaatcagaaagaaattgcagataactacaaataa

SEQ ID NO: 398110 - DNA, 387 bp, Salmonella enterica
gtgccggaattcatcctggcggacgcgaggcagaagaagcgggccgaaattaacgcgtggcgtgacgctcaggaaaacggcagcgtgattttcgtcctcaacggccaccgctgggactgtggcaaggcgtcacagacgcggctggcccctgttgttgccgtggcgaagtccggtatgctcccgccaggtttcttctggacggatgcggacaacatcgatgtcccgatgaccacagacgaactcaccgcactggaagcggcgatgcaacagaatatggtgttgcagggctttaaaatccacgaacgccagcggcagatgaaggaggaagtggacaaattaacggactataaggcgattaaggattacgccgtgggctggccagaataa

SEQ ID NO: 398111 - DNA, 294 bp, Salmonella enterica
atgagcaataaagtacaggtcatttttaccgccgaatgtgagcagggagacgcgcgcaccaaatcagggtttaaggttattcccactaccatctcaattctggttaattctgacggactggaaaggggtaatagctcgccggaacagcttttcggcaagatattaatgaaagaggctcctgttattgcgcaagtgatacagggacaggtctacgacgttatgcgcaaaaatggttcgttcattttcggtgaggaaatgactgaaaccaccataaataaagaacaggctcactga

SEQ ID NO: 398112 - DNA, 324 bp, Salmonella enterica
atgagtgtgcaggcttcaaattcattggctgataagtcatttattgcgggtaccgttgcgtattttgattcaggggatcctgaccacgcattgaattatgatattcagccgcccgggggggcagagattacagggggaggtacgaccatcggttattcaagggtattttctcttgataataccaagcctgtgcttattaagcccggcagcgataattataccatgtcgtcaaaagttgacttgtcaaggagagtgggtgttaccttggttaacgttggttctgcagtaagtggcagctttacttataatattacctaccagtaa

SEQ ID NO: 398113 - DNA, 351 bp, Salmonella enterica
atggatatcacactcagtcactgtaatggtaaaaccctgctgatgaatacgcgtggtcacgctgtttctccgagtaattatacagacggatactttagttccggagatccggataatgcgctgatgtataatatttatgtcccacagtccacggagattactggtgggcacgcatactcaggttcgtattggatccaggacctgagtaatacttttcctttgactattaagcccaacagtgacagttatcagattgccagtttgattaacctgataagtgcagcaagtaattctacaaatgtgggttctgccgtcagcggtggttttgattatacctttacctaccagtaa

SEQ ID NO: 398114 - DNA, 126 bp, Salmonella enterica
atgcaacagaatatggtgttgcagggctttaaaatccacgaacgccagcggcagatgaaggaggaagtggacaaattaacggactataaggcgattaaggattacgccgtgggctggccagaataa

SEQ ID NO: 398115 - DNA, 168 bp, Salmonella enterica
atgaccacggacgaactcaccgcgctggaagcggcaatgcagcagaatatggtgttgcagggctttaaaatccacgaacgccagcggcagatgaaagaggaagtggacaaattaacggactataaggcgattaaggattacgccgtgggctggcctgagggaagttaa

SEQ ID NO: 398116 - DNA, 168 bp, Salmonella enterica
atgatgttctcccggttgcaatacataacgaacaacaccagcgaagctcttaccccttttgatcttccgcatacccttcacgatagctactcccaaaatcagttcttagaaggttattgcgaagctctacgagtagtcgcttcactgcgaaaagctctgtatgagtaa

SEQ ID NO: 398117 - DNA, 234 bp, Salmonella enterica
atgactatgtttagctcggtatacaaaagtctgacaagcaatcttctacaacgattaaataacaaagaaggagttattagggagctaaactcgcttgttaattacatagataacaatcaagaaaaagcaaacaatgtttataactgcattgtcgatgcctctattagtaatatgaaacagacaaagcctgttaagcttgtgaaagcagatggtatctggaaagaagttcagtag

SEQ ID NO: 398118 - DNA, 240 bp, Salmonella enterica
gtggcgtttcagataaagattgcgccgaatacgccggagaaccaggcggcggtcagacaggcactggttgatttgctctataacgaagcgaagcccggcgggattattctgccgtcggcgttctggcgggctgttgccggcgtgaaagcgctgaacgacttcgaactcagatcaccgctggagtccgtcagcgccggcgcaatggagttgcttaccgtgggggatatcacatggctgtaa

SEQ ID NO: 398119 - DNA, 291 bp, Salmonella enterica
atgtttaattttaaaggaaaaatagaaaattatacagagatggaatttttggagcttctcggagagattagaaatgacactcgtacagaaaaatcattgaaaggagatgagttagaaaactatattgtttctatagtaaatcattttattcatattacggaacatccggcaaagggcgatctcattttctaccctgaaaacccaggagatgaggaaccagaaaaaattttgcaaatcgtcaaggaatggcggcgctcccaaggattgccattgttcaaagattcaaagtaa

SEQ ID NO: 398120 - DNA, 336 bp, Salmonella enterica; identical to SEQ ID NO: 397380

SEQ ID NO: 398121 - DNA, 1341 bp, Salmonella enterica
atgactttaatgcataaaaacatcggtgatttctatcctctcatacataaggtgatgaatcataaggctcctgtacttccttatctctctgcaacaaaatacgaggggaaaacaacccatattggcagtaccttgattaaggcttttttgccgaaagcgaaaattggagcgctttatcgaattgaaccagggacagacctggcagaagtcatctctatcaatgaaagcgaagttttgttactccctttcgaacatgtttcggggatgttctatggtcaatggcttagttaccaggatgcggagtttaaaattcgtgtcggtgacgcgttattaggaacaataattgatggtattggccgacctttagggcatttatcaaaagcggaaaaccttccttttgagcgaagtttgttcgccccacctccggatccactgctacgtagagttattgataaaccttttcctatgggagttcgagtgatcgatggtttactcacttgtggaatcggacaacgtattggcatttttgctggttctggagtggggaaaagtactctgcttggaatgatatgcaacggtgcctccgctgacgttatagttcttgcgctcattggtgaacgtggtagggaagtgaatgagtttctttctctattaccacctgagactcgggaaaaaagtgtgcttgtcgtaacgacctctgaaaaaccagcccttgaaagagtgaaatctgcttttactgcgacgacgatagctgaatattttcgcgatcaagggaaaaacgttttattgatgatggattctgttactcgttatgcacgtgctgcgcgtgatgttgggctggctgcaggtgaaccagatattcgtgggggatttacccccagcgttttttcatctttacccaaattacttgaacgtgctggccctgccgaaaaaggctctataactgcaatatataccgttttgttagaaagcgataatgttaacgatcctgttgcggatgaagttcgttctattcttgatggacatatcgttttgaccagagaactttctgaggctaatcattttcctgcaattgatgttgggctaagcgccagtcgggtcatgcataatgtcgttactccagagcatttgcaggcagcagcggaatgtaaaaaacttattgcaacatataaagacattgagttacttatcagaattggagaatatgccactggacaggatccctttgccgatagagctatcaaaaattggaatgctattcagtcatttagacagcaaaaaattaatgatatctgcaattattcacaaactataaatcatttatctcggataataatatag

SEQ ID NO: 398122 - DNA, 2409 bp, Salmonella enterica
  misc_feature (2357)..(2384): n is a, c, g, or t
atgagcggaaaaccggcggcccgcatgggcgatatgactcaattcggcgggccgattgtacagggctctgcgggcgtgtttatcggcgcccccaccggtatcgcctgctcggtctgtcccggcggcagaacctccggcagcccggtgaaccccctgctgggggccaaagtcctgcccggcgaaaccgatattgcgttcccggggccactgccgcttatgctcacccgcgcatacagcagttatcagacgaaaacccctgcgccggtgggtcttttcggccccggctggaaagcccctttcgatatccgcttacagcttcgcgatgaggaacttatcctcaacgataacggcggacgcagcattcactttgagccgctctttcccggtgaaaccgccttcagccgcagcgagtccctgtggctggcccgcggcggcgtggctaaactgcatgagagcaatgtgctgcatgtgctgtggcaggccctgccggaggacctgcgcttaagtccgcacatgtatctggcgaccggcagcgcacaggggccgtggtgggtacccggctggcctgagcgcgtaccgggggtggatgaagcgctccctgccccgctgccgccgtaccgggtgcttacatcgctggccgaccgcttcgggcgcacgcaaacctttcaccgggatgcggacggggaatttgccgggaatatcaccgccgtcaccgacggcgcaggccgccgcttccggctggcgctgaccacgcaggcgcagcgggcggaggcggcgcgtaaacaggcgaccgcttccggtgtcagcgcaccggaatatccgcagacgatgccggtttccggttacggcgcagacagcggcatccgccttgaagcggtgtggctgacgcacgacccggcatacccggataacctcccggcgttgccactggtccgctatatgtacaccctgcgcggcgagctgtcggcggtgtatgaccgcagcggtacgcaggtacgtggtttcacttacgatgataaacatccggggcgcatgacggcgcaccggtacgccggccgcccgcagaccacctaccgctatgatgccagcgggcgggtgacggagcagcacaatccggcggggttaagttatacctacggctatgagaaaaatgccgtcatcattaccgacagcctgaaccgccgcgaggtgctgcacaccgaaggcgaaggcggactgaaacgggtgattaaggaagaacaggccgacggcagtacgattacgcgggaattcgataacgcaggccgcatggtggcgatgacggatgctgccgggcgtaaaaccgggttccggctgaatatcggctccgggaatgtgacggaaattgtcacgcctgatggaaggcgtgtacgcttcagttataacgaccagcgccagctcatcgccaccaccggccctgacggcctgcgcagccagcagacatttgatgagcgggggcgtctggcgcaggagaaatcccgcagcggcgatatcacccgttatttttatgatgacccgcacagcgaactgccctctgccactgaagacgccaccggcagccggaaacagatgacgtggagccgctacggacagttgctgaccctgaccgactgttccggctaccagacccgctatgaatacaaccgcttcgggcaggtcaccgcccttcaccgggaggaagggctcagccagtaccgcgcttacgatgaacggggcaggctggtcagccagcaggatgccgcgggccatgagacccgctatgaatacagcgtcgcgggcgacctgaccgccgtcattcatccggacggcagcaaacaaaccataagctacgacgccgcagggcatccggtgagcaccaccgaaggcggcctgacgcggcagatggaatacgacgctgccgggcgcgtcacccggcttgtcaatgagaacggagctggcaccacttttacttacgacctgctggacaggctggtgcaggaaacgggcttcgacgggcggacgcagcgttatcactacagccccaccggacagcttatccgcagcgaggatgaaaacctcatcaccctgtggcactacgatgcgtcggaccggctggcatacagaacggtgaatgatgaagaggctgaacgctggcagtacaacgaacgcggctggctgaccggagtcagccatctctgcgacggtcaccgcgtcaccgtgcagtatgagtacgataaacagggacggatgaactgcgaacgccagacggtgcagcatcccggaacgggggaactgctgtggcagcacgccaccagacacgattatccggagggactggcgacccggcccccccccccccnnnnnnnnnnnnnnnnnnnnnnnnnnnncgacccggccccccccccccgataa

SEQ ID NO: 398123 - DNA, 627 bp, Salmonella enterica
atgccaccagtatttataacattgccggtaaacgaacatggaaatgtacttcccatttcgtcacatgatttgggaagtataaggggagcagctcaacatgctgatgacgctgttgatgtgcagatgggaaatagcagttacagggtaagatatctgcctcgtctggatagtttttctgttaatcccaatacaggtttcaacccgctacattctgctatggaatttattacaacggtgaataacagcacccgccttgaagaacatctcaaccagggaagaacatttttatctgccctcgaggccgccctgtcacgatgtcaggcgcgtatatcaactaaaattgactcctgtagcttcagtattgagcaggcaactctttcactgtcagcagggcatcttacctgcccgataacgctgtgcgtccctgaaaagggcgtctttgtccggacgtcattacagtcagatgtctgttgcttatatgactcaactgcactgaaagagctggtgtcccggcgtttgcctcatccgattagcagggaagccataacaggggcacatataattccgaaagaacagtgtcattttaatcaggataagggcgcatttattcattctgcatcacaatag

SEQ ID NO: 398124 - DNA, 1044 bp, Salmonella enterica
gtgtacgcgccggggagcttcacgccgcttctccgggtggaaacagaaaatacggaactggcgaaaacacgccaccgcagcctggcggagaagctggagcaggaagggagcggggacggcgaggcggtgcagttcccggcggcgctgcgggcgatgctggacagactggaggatgagctgaggcgtgacgcggtgagtgaggaaagccgggcatggcttacgcagtgcgggctgacggcggagcagatgaaaaatcagctggagccgcgccctgagccggagaggaaagtacatctttaccactgcgaccaccgcgggctgccgctggcgctgataagcccggacaacacggtggcgtggcgcgcggagtatgacgagtggggaaacctgctgggtgaggagaaccctgagcacctggagcagctgatacggctgccggggcagcagtatgatgaggagtcggggctgtattacaaccggcaccggtactacagtccggggcaggggcggtatatcacgcaggaccctatcggattagccgggggatggaatctttatacgtaccccctgaacccgatagtaaatatagatccattaggtttaaccttatctgatataccaaactataaatttaatagtcaagatgaagctgcgctttttgccataaaaatgtgtaatagcacatcaattgcagagagtagagaatatggcgggttagtgtgtaaaacctctaataataaatatattgcaactgaagctaagcagggaagcttggctggtttttctccgtcaaatagctcttgtccttttggcgcgactaaggttggtgattatcacacacatggtttttactctgatctaaaggggaatccagtatcacctcaaaatgatgcatatgactctttacatttttcaccgcaagatatttctgggattacaagtgatgggataggtaatcctgattatactagctatctgggaactccagataataaatattataagtttacccctggaactggaaaaactgaggaaatgaaatga

SEQ ID NO: 398125 - DNA, 507 bp, Salmonella enterica
atgaagtatgtttttattgaaaaacatcaggctgagttcagtatcaaagccatgtgtcgtgtacttcaggttgcccgtagcggctggtacgtctggcatcagcgtcgtcatcagataaaccggcgtcagcagttccgccttgtctgtgataacgtcgtccgggaggcattcagtgacgcaaaacagcgctatggcgcgccacgcctgacggatgagcttcgggctcagggacgggtgtataacataaaaaccgtggcggccagcctgcgccggcagggactgcgggagaaagcgtcacgaaagttcagcccggtcagttaccgcgaacatagtttgccagtctcagagaatctgctgaagcaggacttttacgccagcggcccgaatcagaagtgggggggggtgacatcacgtatcttcgcaccggtgaaggctggctttatcttgccgtggttatcgacctgtggtcgcggtcagtcattggctggtcgatgtcctcgcggatga

SEQ ID NO: 398126 - DNA, 624 bp, Salmonella enterica
atggggatgacggcgctggatgtggccctggccggatttgaagccgatgtggccgttccggagccaacagatgcagcctggccgaagtgggtcgggtggggggttgttattgctgcatcggcggcttttacatacctgacctgctcgtctgatgaagattcatctgaggatgcagagaacccaaacgttggtaaggatctgacagatgaagagaagaatgaactgggtggggttggttctggttcgccaaatggatggggaccggaagatgaggagaatgcaaggaataatgaagcgtcttctgataattttgatagcaagtttaatcaaaaagatttaacttcttctgcgaataaacctattaacgaacaagggttatctgccgctgctcgtgcatgggaaaaacatgcgggaagacctggtggcgtatttgaccctctgaaaggaaatgtagcacaaaaaaatgaagctgcaggtcaatttgtgaatgaagtgttaagcaacacaagtactgtcagaacgaatctctcaaaaggtggggtagaatatcgtttgcctgacggtagaggtattcgttataactcagatggttcattttcaggcttcctggatccgaagagataa

SEQ ID NO: 398127 - DNA, 387 bp, Salmonella enterica; identical to SEQ ID NO: 393901

SEQ ID NO: 398128 - DNA, 456 bp, Salmonella enterica
atgttttatcagtactccaaacgatatagagtcttgtctatcttttctatagtgatagcagtgatagtgtttttatattttctgcttgataaaattcaatcagacggcagttttcaaagtaagttttatatatttgatttgtttttaaactatatcaaagttgcaccgctatttgatgtgttaacgggagttggtttcggtaatacattttcatacattggtattggacctcataatatatatatagccttatttattgagacaggattaatcggactgattttatatttattaatttttatctatatctatattaaatacaagatttctaggctaattattttaccaattatgatcatgggattatcgttttcgccaattgcgttaccatatttttatgttgctctatcttggttaatgtatttagagagaaaaaatggatattttgaaaggtaa

SEQ ID NO: 398129 - DNA, 582 bp, Salmonella enterica
atgagtattgatggtgatatgcgcgcaggtgttatcgatgccgttgaagcgaaagggcttcgctcaaaagtacaaaaagagagtcaattttatggtgctatggatggcgcgatgaaattcgtaaaaggtgatgctattgcaggtattattattgtactggtaaatctttttggaggcgtattgatcggaatgtggcagtttgatatgccttttagccaggctcttacgttgttctccgttttatccgttggtgatgctcttgtagcccagatacctgctctcttaatttgtgttactgctggtgttgttgtcactcgtgttcctggtgaaaatgataaagaaaataaccttgcaggcgatattattcatcaggtttccacgaataaccggcctttcatgattagcgcggtgttaatgctagtctttgccataatacctggatttccgaccagcgtttttatgattttagcattatgtctgctgggaatatcatggcagcttaaaaagaaatctgttgcaggcatgaaaggtacactggatctgtctcttatacacatctccgagcccacgagaccgtactag

SEQ ID NO: 398130 - DNA, 291 bp, Salmonella enterica
atgtttaattttaaagaaaaaatagaaaattatacagagatggaatttttggagcttctcggagagattagaaatgacactcgtacagaaaaatcattgaaaggagatgagttagaaaactatattgtttctatagtaaatcattttattcatattacggaacatccggcaaagggcgatctcattttctaccctgaaaacccaggagatgaggaaccagaaaaaattttgcaaatcgtcaaggaatggcggcgctcccaaggattgccattgttcaaagattcaaagtaa

SEQ ID NO: 398131 - DNA, 324 bp, Salmonella enterica; identical to SEQ ID NO: 393892

SEQ ID NO: 398132 - DNA, 219 bp, Salmonella enterica
atgagtcagcattacggggagccacaggctaacgaccttagctctgagtattcggcgctggtaattgggctgaagaagcgggtccaccgaatctttccctatgccctggtgaacgttaagcctatgcaggggaatgcgttaaatagcgacgccagtaaaagtgatcgggaaaagctgaaccgcatgctggaggagatgttcgaagaggctgatatgtga

SEQ ID NO: 398133 - DNA, 672 bp, Salmonella enterica
atgtgcggacgctttgcccagtcaatgacgcgtgaagactacctcattcttctcgctgaagaagcagaacgcaacatcccatatgatcctgaaccgatcgggagattcaacgtagcaccaggcaccaaagttttgctactaagtgaacgtgatgaaaaattacatctcgacccggtgctttggggttacgctcccggatggtgggataaagctacactgattaacgcccgcgtcgagacagcgccttccagcagaatgtttaaaccactatggcagcatggccgggctatctgttttgccgatggatggttcgagtggaagaaggaaggcgacaaaaaacagccgtatttcattcacagaaaggacgggaagccgatattcatggccgccattggtagtacaccgtttgagcgcggcgatgacgcagagggattcctgattgttacctccgcagctgataaaggtctggtagacattcacgaccgtcgtcctctcgttctgtcacctgacgccgcgcgagaatggatgcgccagggcataagcgggaaggagatagaggagataattactgatggtgccgtgccgacagataaatttacctggcacgccgtgaagcgcgccgttggcaatgtgaaaaatcaaggggaagagctgatcaaacccgttacctga

SEQ ID NO: 398134 - DNA, 558 bp, Salmonella enterica
gtgcaaattggctatgtgcgggtgtcaacaaatgaccagaacaccgatttacagcgaaacgcgctgaattgcgcaggatgtgaactgatatttgaagacaaaataagcggaactaaagcagaaaggccggggctaaaaaaactgctccggacattaactgcaggagacacactggtcgtatggaagctcgatcgtctgggtcgcagtatgcgtcacctggtcgttatggtagaagaattgcgcgaacgcggcgttaatttccgcagcctgaccgacagcatagacacgtcgacgccaatggggcgattcttctttcatgtcatgggcgcactcgctgaaatggagagggaactgattgtggaaagaactcgcgccggactggaggcggcaagggcgagggggcgtattggtggccgacgaccgaagctaacatcggaacaatgggcgcaggccgggcgtctgattggggcaggagtaccgcgacagcaggtagcgattatttatgatgtggggttgtcgacgctgtacagaaaattcccggcctctaaactggcttaa

SEQ ID NO: 398135 - DNA, 414 bp, Salmonella enterica
atgccgatcactatagggaatggttatttaaaaagtgaaatatttatcacccccccagaaaacacaagagaagcatggtggaaagtgttatgggaaaaaattaaagacttctttttttctactggtaaagcaaaagcggaccgttgtctacatgagatcttgtttgccgatcgcccacccactcgagaacggcttacagagatttttttcgagttgaaaacattagcctgcacgtcacacagagatagatttcaggttcataatcctcatgaaaatgatgccaccattatttttcgcatcatggatcaaaacgaagaggatgaactgttacgcatcacacaaagtaccgatacctttagctgtaacatcatgggaaagtcttatcttttcatgaaagattgccttgtattttaa

SEQ ID NO: 398136 - DNA, 177 bp, Salmonella enterica
atgtacctgcttaaccgatggtttaaggactggaggggaagacgtgttcacgttatccgctgggaaccggaaaccgaacgcgttatctacatgcgcgacgggtatcccgacgagtgttttagccctttgtggaaattcaggcgtgattttgtggagtgtgaagcgccgccagagtga

SEQ ID NO: 398137 - DNA, 246 bp, Salmonella enterica
atgctaagtacggcaggcggtaacgcaaaaagcgatttacgcaaacggcggcgaaagccgtggtatagtcagcaatgcgtaagcaggccaggagaggatgactcgccactgcgtggctcgccctgcgggccgttgctgacgcaacgttctctcgcgtcgctcgagtcgaacctcttgcccccggaggttctcatcctcttcaggcttcagatacaaaaaaccctgctcattgagcagggtttctga

SEQ ID NO: 398138 - DNA, 696 bp, Salmonella enterica
atgaagaaaatattgattgcaaccgcggttgcactgtctttgtctgcggctgcgcaagcagctgaatctaccgccgtgttaaaagtgaccggcgttctgaccaacgatgcctgcaccccggagctggacggcggcggcgtggttgattttggtaccaaatatatcaatgaactgtcggcaacagagaccaaccagttaggccacaaagacctctctttcagaatttcctgcaccgcgccaaccaaagttggttttactatcagcgacgatcgtgctgactctacagcaagtatcaccgttgaaaacaccagctttaccacccctaacgagaccgcctggaccgattctatccgttacggagtcgggaaaacggcaggcggtgttaacattggcgcctactctgttgcgctaaaccacaccgcgcttatcgcagacggtgaaacactgtctgctgtgcgagccacgccgggcactaatgtagacagcgaatggagtgtatggaccgataacaaagaccttctgagccacgatggtacattcgagtacagcgtaggcaatgcggcaggaccggttgcctttaccaacgcagaatttcctttacgtatcgccctggccgttcaaaaaacggatgcgctggctattaccgacaatacaacacttgatggccaggccaccattaccctgcgttatctgtaa

SEQ ID NO: 398139 - DNA, 753 bp, Salmonella enterica
atggctgtaactaagctggttctggtacgtcatggtgaaagtcaatggaacaaagagaaccgtttcactggctggtatgatgttgacctctctgaaaaaggcgtaagcgaagcaaaagcagcaggtaaactgctaaaagaagaaggtttcagctttgattttgcctacacttccgtactgaaacgcgctatccatacgctgtggaacgtactggatgaactggatcaggcgtggctgccagtggaaaaatcctggaaactcaatgaacgtcactatggcgcgttgcaggggctgaataaagcggaaacggcagaaaaatatggtgacgagcaggttaagcagtggcgccgcggttttgccgtgacgccgccggaactgaccaaagatgatgagcgttatccgggtcacgatccacgttatgccaaactgagcgagaaagagctgccgctgaccgaaagcctggcgctgaccatcgaccgcgttattccttactggaacgacactatcctgccgcgtatgaagagcggtgagcgcgtgatcatcgcagctcacggtaactcattgcgtgcgctggtgaaatacctggataacatgagtgaagatgagattcttgagttaaacatcccgaccggcgtgccgctggtgtatgagttcgacgaaaactttacgccggtaaaacgctactatctgggcaacgctgacgagatcgcagcgaaagcggctgccgtggcgaaccagggtaaagcgaagtaa

SEQ ID NO: 398140 - DNA, 1260 bp, Salmonella enterica
atgtcatcagacaaacaacaaaaagccagctctacgcaacatcatgacatcagtacaagtgtaagcgtacatggagcaagaactcataacctcagggacatttcgtttacattcccccgcgatgcaatggtagtatttactgggatctcgggttcgggtaaatcctcactggcctttgataccctctatgcggaagcccagcggcgttttatggaatctattgctcctcatgcacggcgtctgattgagcaggcgtccacaccggatgttgatggtatcgatggcctgccgcctgccgttgctcttcaacagagtcggaccggggctcaggagcgctcaaccgtcggtagcctgacccgtatttccgtcaccttaaggctgctgttttcacgcgcaggtattcgccccgaaggtatcccgttcctgcccgccgagtcgttttcacccaatactccccaaggggcttgcccggtctgccagggtatgggaatgattcatgaagtgaaagccgatgcacttgttccggacggtgcgctgagcatccgcgaaggtgctatcgcttcctggccgaatggctggcaggcgaaaaaccttcgttctattctcgatacgcttggctacgacattgatgcaccgtggaatacgctgtctgaacaggacaaagagtggatcctgtttaccgaagaacagccttctgtacctatttttatgggtctcaatgcagagcagcgtcaggaagcaatagcagcaggaaccgaacctgcttataacggtacttataccagtgcccggaaatacgtcctgcaaagctattccggcgggaaagactctgtgaaaaaacgtctctcacgctttattaccgtggcaccgtgcaccgaatgccacggtaaaaggctcaatcagaatgcactgtctgtgacttttgccgggcatgatatcgctcaaatcggcgagctgacgataacccaattgaaatctttatttttaccctttgccaacgggcactctcagtctttgcctggcgaagctgcattaagggaagccactatcaaaatgacgaccgacatttgcggacgtctcgaacaactcgaaaaactgggtcttggtcatttgtctctcggtcgccggaccacaatgttgtcttcaggggaactcagcgtatccggcttgcaacccagctcatctctcgccttttcggtgtgctgtatgtacttgacgaacctgcggccggattgcacccggatgacgtgcgggcgctga

SEQ ID NO: 398141 - DNA, 444 bp, Salmonella enterica
atgtatattatgttaaatgattcattttggcgatccttgaaaccggcacacagtaagatgacaatctcgtcgccgtcctgtatcagatacacccgcaaaccggcgctccagtttatccggtatggaagccccccccctattctcaaccatctcctcataggctgtcctgaacaatgtgtttgtttgagtaacttacgacaattgcttcaaaaactatcaaatgccagacttccgctaccagaaggtatacacggtattactatttctttttatatgccccatacaaaagcgatacgggtgttttttctaatatctggatttcatttttatgtgctcttttttaattccagatcggaaagcgcagtaaggaattttacttccgcggctgaaaggcccattgtaatcgcttgctcttcagaagaaagaggatttaatttaccataa

SEQ ID NO: 398142 - DNA, 645 bp, Salmonella enterica
atgatttgtggggcagtcgggtttaacgccacctcccccggcgcgggtgccggatgtgttatcccgcctggcgagcccgttccaggcccgccaggcgtcaacgtcaccgggctggtttgtcccttaatcttcgggtccagcgcatcgcgcagcccgtcgcctaacaggttaaacgccagcactgtcagaaaaatcgccaccgccgggaagagcgctacgtgcggcgcgatgaccatatccgcccgcgcttcattgagcatcgctccccactccggcgttggcggctgcgcgcctaatccgagaaatgacaggcttgctgcggaaatgattgacgtaccgatacgcatcgtaaagaaaaccacaattgacgagaccgttcctggcaagatatggctaaacaaaatcgtcgtgtcgctggcgccgatactgcgggctgactcaataaacgtctgctgttttaagaccagggtatttccgcgcaccagacgagcaaacgccggaatagaaaaaatcgccaccgcaacgatcacattagcgataccgctgcctaacaccgccacaacggcaatcgccagcaaaatgccggggaaggcaaacagcacatcgcaaatgcgcataatgaaacgatcccaccagccttcataa

SEQ ID NO: 398143 - DNA, 153 bp, Salmonella enterica
atgaaaaccagtaatctgaagctatcacaagacgttgaagttactctggaagatattggtagtgtcattgaggaaaaaccgttctatgaatataccgcggtagaagatggagaaagggtggaatttagtatttttgccgtggacgaaagttga

SEQ ID NO: 398144 - DNA, 198 bp, Salmonella enterica
atgacaactaaaataaaagcatccaccaatgagcttgttgcgattaaatatgctctcgcccttatcctttacaagcttcataattcatgtgaagcaaacgttattctcgatgaattacgcgcatccgggtttcaggaatgtatagcgctggcggatgagatagctaaatttgctccggctcctcctccgcgcttatag

SEQ ID NO: 398145 - DNA, 849 bp, Salmonella enterica
atgttgaatgtagctattgaaaaccagaacgggtggaattatagtgcatctgcacctcataaaacgggtgccgggattgcaaccccgatgttcatcatggcgcataaccgcgccaaagcggtttttttatgcgctaagcacagccgcattcgcattatggtggggcgtgcagggcagccgcaaggctggccgggttccatgatgaccggttgttgcaaccctgtacgtctcaccacccatgagattgcaacctcacgtggtgagttaatcaaattcatcatggaggctgccattatggctactacccctgccctttctcacccttgtgtaaccatcgaaaatggtcgcgctgtcaccacgtctgtcgccatcgcggaattcttccgtaaaatgcataaagacgtactgaaaaaaatcgacaacctggaatgctcagcggaatttagcgagcgcaattttgcgcccgccgaatataccgacgagcaaggtaaaaagcgccccgcctacaaaatcaccaaaaacggcttcgtttttctggtgatgggattcacaggcaaaaaagccgccgcgttcaaggaagcttacattgccgagttcgaccggatggagaacgagctgcaccagaataacacgccgccccatgacaaaataatcaagggcgacgatcgcactctggttgttcacttcgacgaacacggcaatatcaaattcacagaaaccgctcctgaaggcgcaatggtctgtaccctggacatcttccagttttatctggaacaacagggctggacgttaatcaatcgtaaaaaaataaaaagcatgaccgttgaacagttattgtcactgaaataa

SEQ ID NO: 398146 - DNA, 1110 bp, Salmonella enterica
atgtctaatatgctcatcgacatcaaagcaaacctcgatcgagaacttgttccggttcagtcactattgcctgcgcatgtaagctttgaccgatttactaacgctgccgcagtggctctggctgctaacaatgacctgttcaatgctgaccgtcagtccgtaattaatgccctaacagcgtgcgcaaaagacggccttattccggataaccgcgaagccgcaatggtggtctacaagaaaaaacaggcaggcggcgactggaaactgatcgcccaatatatgccaatgatagatggcgtcctgaagcgcgctcgccagtcaggagagatttcaatcatcgcagctcgtgcagtctatgagaacgataaatttcgcgtctggcttgatgacagtggcgaacatatccactacgaaccaacattgggagcccggggcgagatgatcggggcagtagcatatgcccggatgaaaacaggggaattccaattcgaatggctgaatcttgacgacattgccaaagttcgcgccgccagcaagaacagcgataaaggtccatgggttgactggtatgagtccatggcgcgcaaatcggctgcacatcgactctgccgtcgcctgccaaataactcggaaattatggagatgcttgagcgcggaactgaaatggtctggcagaaaggaaatgacgttacaccgcagccttcaggttcgtcattaatcgagcagcgtgatgctcaggatgccgaacagtcaggagattttgatgctgaagttattgctgaggaattccgccagcaaatcgattctgtagaagttgcagaagatgcaaaggcaatcggctcccgaatcgacgcagtaaaaaatgaactgggcgcaaacctctacacggagctgaaaaacaaggcgctgggtcgtttccaccagctcaacgctgataaaaaaatcaaggaccttatcaatggattgcctaaggcaggaagtgaagaagcctcagcagcatttgctgatgtagagaaaaagctcgaattcctgaggccgcggcttggtgatgttttgtatcaagcatactgcatcaatttgcgggacatgaaaccggaatacatcggctaa

SEQ ID NO: 398147 - DNA, 444 bp, Salmonella enterica
atgagcgcctccgccctgcgcgatattcacacgctgttttatcgcggctatcttaaatcgtgtaattatcattgcggctattgcccgttccataaacacgcccgcaacgataaaaaacgggacgaaaccgcgctatggcgcatggttgaccatttgcctcttttcggtacgccgttgaatgtgatgattacgccttatggcgaggcgctgcgcttgcgttattacatggcggcgctggcagaaattagccgctatcctcatgttcaggcggtaggcatacaaactaacgcctctttttcgttaatgtcattactggagtcatttcgtactggcggcggagatatctcaaagcttcggttatggtgttcttttcatccctcgcaaattgccgctgagcgctttctccagcagtgtttagcgctctctgccgccgggataacctag

SEQ ID NO: 398148 - DNA, 348 bp, Salmonella enterica
atgccgcgtggcctggaattactgattgctcaaaccatcctgcaaggctttgacgcgcagtatggtcgatttctggaagtgacttccggcgcgcagcagcgttttgaacaggccgactggcacgccgtccagcaggcgatgaaaagccgtatccatctctatgatcatcatgtgggtctggtggtgaacaactgcgctgtattaccgatggcaaaagtaccgacgcggatttccttttacgcgttaaagagcattacacccggctgttgccggattacccgcgcttcgagattgcggagagctttttcaactccgtttattgccggttatttgaccaccgctcgttaa

SEQ ID NO: 398149 - DNA, 174 bp, Salmonella enterica
atggcctggctggtttttctgggggatttttctaccttgccactcttaaaatcaggcaaagcaggtaccgccggtgcagttcctttcgccagcgccttccagtatccggcgagtggtctcggtattagtaattcagcgcatcgtttttccagttgctctttgctgatgctatag

SEQ ID NO: 398150 - DNA, 252 bp, Salmonella enterica; identical to SEQ ID NO: 393570

SEQ ID NO: 398151 - DNA, 696 bp, Salmonella enterica
atgcaggatatccggcaggaaacactgaatgaatgcacccgtgcggagcagtcggccagcgtggtgctctgggaaatcgatctgacagaagtcggtggagaacgttactttttctgcaatgagcagaacgaaaaaggtgagccggtcacctggcagggccggaagtatgacgtttacccgatacagggaaccgggttcgacctggtggggaaagggacgtcggcccgaccaacgctggcggtgtcgaacctgtttggcatggtcacgggactcgcagaagatgtgcagagcctcgtcggggccacagtggtaaggcgcgtggtatatgcccgttttcttgatgcggtgaactttacaggcggcaacccggaggccgatccggaacaggaagtggtcagccgctgggtgattgaacaactgtcggagctgaaagccaccacggcgacctttgtgctggccaccccgaccgaaacggacggcagcgtgtttccggcgcggatcatgctggctgatgtctgcaactggacctaccgttctgatgagtgtggctatgccgggccgcctgtggcggatgaatttgataagcccacgtcagacccggcaaaagatgcctgcagcaaatgccgtaccggctgcgagctgcgtaataacctgccgcgcattggctgtttcctctccattaaccgtctttcctga

SEQ ID NO: 398152 - DNA, 330 bp, Salmonella enterica
atgaaaaccttccgctggaaagtgaaacctggtatggatgtggcttcggccccttccgtcagaaaggtgcgctttggtgatggttattcccagcgtgcgcctgcagggctgaacactgacctgaaaacgtacagcgtgacgctttctgtctcccgtgaggaggccacggcgctggagtcgtttctggcagaacacgggggctggaaggcctttctgtggacgccaccttatggttaccggcagataaaggtgacctgcgcaaaatggtcgtcgcgggtcagtatgctgcgtgttgagttcagcgcagagtttgaacaggtggtgaactga

SEQ ID NO: 398153 - DNA, 2562 bp, Salmonella enterica
atggctgaaccggtaggcgatctggtcgttgatttaagtctggatgcggccaggtttgacgagcagatggccagagtcaggcgtcatttttccggtacggaaagtgatgcgaaaaaaacagcagcagtcgttgaacagtcgatgagccgacaggcgctggctgcacagaaagcggggatttccgtcgggcagtataaagccgccatgcgtttgctgcctgcgcagttcaccgacgtggccacgcagcttgcaggcgggcagaacctgtggctcatcctgctgcaacagggtggtcaggtgaaggactccttcggcgggatgatccccatgttcagggggcttgccggtgcgattaccctgccgatggtcggggccacctcgctggcggtggcgaccggtgcgctgacgtatgcctggtatcagggcaactcaaccctgtccgatttcaacaaaacgctggtcctttccggtcatcagtcaggtctgacagcagatcgtatgctggccctgtccagagccggacagacagcagggctgacgtttaaccagaccagcgaatcactcagtgcactggttaaggcgggggtacgcggtgaggctcagattgcatccatcagccagagtgtggcgcgtttctcctctgcatccggcgtggaggtggacaaggtcgctgaagccttcgggaagctgaccactgacccgacgtcggggctgacggcgatggcgcgccagttccataacgtgacggcggagcagattgcgtatgttgctcagttgcagcgctccggcgatgaggccggggcattgcaggccgcgaacgaggcagcaacgaaagggtttgatgaccagacccgccgcctgaaagagaacatgggcacgctggagacctgggcagacaggacagcgcgggcattcaaatccatgtgggatgcagtgctggatattggtcgtcctgataccgctcaggagatgctgattaaggcagaggctgcgtttaagaaagcggatgacatctggaatctgcgcaaggatgattattttgttaacgatgaagcgcgggcgcgttactgggatgatcgtgaaaaggcccgtcttgcgcttgaagccgcccgaaagaaggctgagcagcagactcaacaggacaaaaatgcgcagcagcagagcgataccgaagcaacacggctgaaatataccgaagaggcgcagaaggcttacgaacgcctgcagacgccgctggagaaatataccgccagtcaggaagaactgaataaggcactgaaagacggaaaaatcctgcaggcagattacaacacgctgatggcggcagcgaaaaaggactatgaagcgacgctgaaaaagccgaaacagtccggcgtgaaggtgtctgcgggcgatcgtcaggaagacagtgctcatgctgctctgctgacgcttcaggcagaactccggacgctggagaagcatgccggagcgaatgagaaaatcagccagcagcgccgggatttgtggaaggcggaaagtcagttcgcggtactggaggaggcggcacaacgtcgccagctgtccgcacaggagaaatccctgctggcgcataaagatgagacgctggagtacaaacgccagctggctgcacttggcgataaggtcacgtatcaggagcacctgaatgtgctggcgcagcaggcggataaattcgcacagcaacaacgggcaaaacgggcagccattgatgcgaaaaaccgggggctgactgaccggcaggcagcgcgggaagctacggaacagcgcctgaaggaacagtatggcgataatccgctggcgctgaataacgtcatgtcagagcagaaaaagacctgggcggctgaagaccagcttcgcgggagctggatggctggcctgaagtccggctggagcgagtggaaagagagtgccacggacagtatgtcgcaggttaaaagtgctgccacgcagacctttgatggtattgcgcagaatatggcggcgatgctgaccggcagtgagcagaactggcgcagcttcacccgttccgtgctgtccatgatgacagaaattttgcttaagcaggcaatggtggggattgtcgggagtatcggcagcgccattggtggggccgttggtggcggcgcatcagcgtcaggcggtacagccattcatgcagctgcggcgaaattccattttgcgaccggaggatttacgggaaccggcggcaaatatgagcctgcggggattgttcaccgtggtgaatttgtcttcacgaaggaggcaaccagccggattggcgtggtgaatctttaccggctgatgcgcggctatgccaccggcggttatgtcggtacaccgggcagcatggcggacaaccggtcgcaggcgtccgggaagtttgagcagaataaccatgtggtgattaacaacgacggcacgaacggtcagatagggccacaggcgctgaaggctgtttatgacgtagcccgtaaggcggcaatggatgttgtgaccgggcagatgcgcgatggtggtctgttctccggaggtggacgatga

SEQ ID NO: 398154 - DNA, 435 bp, Salmonella enterica
gtgttcgacggtgagctgagttttgccctgaaactggcgcgtgagatggggcgaccagactggcgcgccatgcttgccgggatgtcatccacggagtatgccgactggcaccgcttttacagtacccattattttcatgatgttctgctggatatgcacttttccgggctgacatacaccgtgctcagcctgtttttcagcgatccggatatgcatccgctggatttcagtctgctgaaccggcgcgaggctgacgaagagcctgaagatgatgtgctgatgcagaaagcggcagggcttgccggaggcgtccgctttggcccggacgggaatgaagttatccccgcgtctccggatgtggcggacatgacggaggatgacgtaatgctgatgacagtatcagaagggatcgcaggaggagtccggtatggctga

SEQ ID NO: 398155 - DNA, 423 bp, Salmonella enterica
atgttcctgaaaaccgaatcatttgaacataacggtgtgagcgtcacgctttctgaactgtcagccctgcagcgtattgagcaccttgctttaatgaaacgacaggcagaacaggcgggatccgacagcaaccggcaggttactgtggtagacgtcatcagaaccggcgcgtttgtggtggcgatgtccctgtggcataaccatccacagaagacaaagccgccgtccatgaatgaagccgttaaacagattgagcaggaagtgcttaccacctggcccacagaggcaatttctcatgctgaaaacgttgtgtaccggctgtccggtatgtatgagtttgtggtgaataatgcccctgaacaggcagaggacgccgggcctgcagagcctgtttctgcgggaaagtgttcgacggtgagctga

SEQ ID NO: 398156 - DNA, 741 bp, Salmonella enterica
atgcctgtaccaaatccagtaatgccggtgaaaggtgccggaaccaccctgtgggtttataacgggagcggcgacccttatgcaaacccgctttcagatgttgactggtcgcgtctggcaaaagttaaagacctgacgccaggcgaactgaccgctgagtcctatgatgacagctatctcgatgatgaagatacggactggtccgcgaccgggcaggggcagaaatcagccggagataccagcttcacgctggcgtggatgcccggagagcaggggcagcaggcgctgctggtgtggtttaatgaaggtgatacccgtgcttataaaatccgcttcccgaacggcacggtcgatgtgttccgtggctgggtcagcagtatcggtaaggcggtgacggcgaaggaagttatcacccgcacggtgaaggtcaccaatgtgggccgtccgtcaatggcagaagatcgcagtacggtgacagcggcaaccggtatgaccgtgacgcctgccagcacctcggtggtgaaagggcagagcaccacgctgaccgtggcattccagccggagggcgcaaccgacaagagcttccgtgcggtgtcagcggataaaacaaaagccaccgtgtcggtcagtggtatgaccatcaccgtgaaaggcggcgctgcaggtaaggtcaacattccggtcgtatccggtaatggtgaacttgctgcggttgcagaaatcaacgtcaccgacagctaa

SEQ ID NO: 398157 - DNA, 396 bp, Salmonella enterica
atgaaacatactgaactccgtgcagccgtactggatgcactggagaagcatgacaccggggcgacgctttttgatggtcgccccgctgtttttgatgaggcggattttccggcaattgccgtttatctcaccggcgctgaatacacgggcgaagagctggacagcgatacctggcaggcggagctgcatattgaagttttcctgcctgctcaggtgccggattcagagctggattcgtggatggagtcccggatttatccggtgatgagcgatatcccggcactgtcagatttgatcaccagtatggtggcctgcggctatgactaccggcgcgatgatgatgcggggctgtggagttcagccgatctgacttatgtcattacctatgaaatgtga

SEQ ID NO: 398158 - DNA, 579 bp, Salmonella enterica
atggccataaaaggtcttgagcaggccgttgaaaacctcagccgtatcagcaaaacggcggtgcccggtgccgccgcaatggccattaaccgcgttgcttcatccgcgatatcgcagtcggcggcacaggttgcccgtgagacaaaggtgcgccggaaactggtaaaggaaagggccaggctgaaaagggccacggtcaaaaatccgcaggccagaatcaaagttaaccggggggatttgcccgtaatcaagctgggtaatgcgcgggttgtcctgtcccgacgcaggcgtcgtaaaaaggggcagcgttcatccctgaaaggtggcggcagtgtgcttgtggtgggtaaccgtcgcattcccggcgcgtttattcagcaactgaaaaatggccggtggcatgtcatgcagcgtgtggccgggaaaaaccgttaccccattgatgtggtgaaaatcccgatggcggtgccgctgaccacggcgtttaaacagaatattgaacggatacggcgtgaacgtcttccgaaggagctgggctatgcgctgcagcatcaactgagaatggtaataaagcgatga

SEQ ID NO: 398159 - DNA, 354 bp, Salmonella enterica
atgtcgcagtccgaaaacctgtttgatgccgcgctttctcaggccgatgacactatccggcgtgtgatgggaagcggggtaacggcgacctccggtgctcttgtgggcgtcacgttgagtggtgtttttgatgaccctgaaaatatcagctatgccgggccgggcgtgcgtgttgaaggctccagcccgtccctgtttgtccggactgatgatgtgcggcagctgcggcgcggagacacgctgaccatcggtgaggaaaacttctggatagactgggtttcgccggatgatggcggaagctgtcatctctggcttgggcggggcgtgccgcctgccgttaaccgtcgccgctga

SEQ ID NO: 398160 - DNA, 834 bp, Salmonella enterica
ttgggtgatcaggcatgtgaagttaaattgatattcactggaattggtgactcactagtaacattaattggcgggcataaatctagcgaacgccagattcatcaggtccatcttgatagtttgccttggaatggacgtttccaaattattgacaatgcttttgacgagttcggcttatccgttgaagagtcagttcgttataaaattgcaggtcttagcgatgggtttccaaactacattcacttgatttgtgagaaaattcttttaacctgtcaaagctcaatgagagaatttgatattgttgattattcactatttatcaaagggttaaatgatgcaattgattctgtgtctgagacgttaaggcaaagctatactgatgcaactgaagggcgtgatgagtcgtataaacatattatttgggcaatgtcagatatggcggacctcactcgccataaaacgcacatctcagaatcctacgttaaaatatgcaagtctctcgatgtgattccattagacaaatccacattcgaacggaagtttagtgcgcttaaaaaaccagcttttggctgtatcatcatccctgcattagggaatcgtcctgcttggttccgttttcgtgagaatatgctacgtggttacattcgcatgagagcagagcaacatggacttgaattagatttccaaaattaccgagtcgcaggggaacattcagctcgtgcaattggtaaatatgcagcttataagccattaactaacgttgaaggtcgtgtcgctaagttgagaggcgatgatgattggcttgaagatctaaaaagcgaattaagaaagtaa

SEQ ID NO: 398161 - DNA, 915 bp, Salmonella enterica
  misc_feature (875)..(884): n is a, c, g, or t
atggcggtggtcggttctcagtggcaaaaggaagcgggcatcaccgatgattcatgggaactgcttctggccgatattgagaaagaggcccggggatataaccatagtgatctcacaaaaaccattgcacagaatacgttatctctatttaattttctgtgcgaccacggtgttgagtttgataaaacgatgggtaacggcaccgggattaaagcgctgggaggacattctcgtccccgttgcgtctggccagtgaacggtggcagtggtattgtcaaaagtttgcagaagtacgtgaaagaaaacctgccgaatattgaaattcgcaaacaggtactgctggaagaaattatccgtaacgagacaggccgggtaatcggtgtaagagtcagggaaaactatatatttaatcgtgaagttaaagattttggcctgaatgattccccagacttcaacagtacaggcacagtaaagtattacagagtcagacgcggtcttgtaatggcaaccggagggtataaccaggaccggaaattcagaggggatgaagttggcgcactctataattctgtatcaacagctaaccctggagcaactgccggagccttaaaggcgatgattaaagccgggcttaaacccatccatatgacactttttagatttgcgttccctattcccacggaagatattctgtggggcatattagttaatccacgaacctgcaaacgttttgttgatgaatacaataacaatgaccgccaggggctgggtttaaaaatactgtccgagcgcatgaaaattgatggtgagcagatcattctgatctatgaccagaccggaattgataattaccatgataagcagagactcaatcnnnnnnnnnngtcccgttctttccttcaagcgaaagattga

SEQ ID NO: 398162 - DNA, 330 bp, Salmonella enterica
atgaccactttcgtacagggaagcaggactgagcatattaatctgactgataccagctcagcattgggcgcaaagatgatcaatgccggagaaatgatttctattagcgccggaacgctgttgagtctggtttctgggaaaaatagtaaagagatatgtggaggagtgaaaatggttcaggcggttgacggaatagagttacatacgggagctgcgtcattagttttaaagaataatggtcagattgaaattagaggcgttaatattatttttgaaggcagtagtgaggtagtaattaaaagcccggcggttagtgtttatgataaataa

SEQ ID NO: 398163 - DNA, 579 bp, Salmonella enterica
atgatttatccaaccagtaccggaaaaccgggcgaatattttcgactgcatacactggaaagcgtgtggattcagggaaaactccgtatgtggggacgatggtcatacattggcagcggtaaacccggcaatatgtttaaccagttgctggcctccagaaaactgacaaaaacagccatcaatgaggctttacgccgtctgaaaaaatcaggaacaagcaagccagagctggaggcctttcttcgtgaaatactcgacagcaagaataagtcaggattagcattctgtactgacgaggagggattgaaaatagacggtgttattggcaccactctggttagagaaggtcattcaggactttacggcatcatagtgaatcgatatcgcctgcgtaagagcaaacgccttatggctgaagaactacaggcaaaacacccggagtggtgttatatgacttgccgtcgccgtattgactcctggctaagttttgctgaatccatgctttacgcgccaatgtgtgacacatttggtacaaatagcgacagattttacttgaaaagtgagccaataaatgattga

SEQ ID NO: 398164 - DNA, 282 bp, Salmonella enterica
atgcaagtacaaaccaaaaacaagttatttggcattactaatcaagctgagatagctcgtcagttaggtacaagtcagcagaacgtaagcttatgggttacatcgggcaagtttccgccacgccggatacttccattttgtcgggcagttggatttgctgtaactccacatcaacttgatccaatactttatccaaaccctagtgatgccttacccgttccacatgaacacatcataccgtcggtaaagcctcagggggtgaacaaccatgatcacccctga

SEQ ID NO: 398165 - DNA, 132 bp, Salmonella enterica
atgacaatattcaagaaaattaaacactgtttgtctggggggataaatccgtcgaattgcggctggggccggcagaaatcctggtgtctgatgacaatggcgttattcctgagcagggcggcagggttttga

SEQ ID NO: 398166 - DNA, 3321 bp, Salmonella enterica
atgccggaaaatagcgccgacggtgactatcaggtgcaatttgttgctactgatatcgctggcaacagagttgaatctgcagttacgacagtgacaatcgattctcaaatagccgtctttaatattgatgaagattcattaccggccatctctaataaccgggcattgtcagtctcaggcgtgggcgaggctggctcacaggtcagcatctttgtcgatggtaaattagtcaacgttgttatggttgaggctgatggctcatggcgcgcgccgatactgctgcaagatgatggtacatttaatattcatctcagtattactgacgttgctggcaacactcaagtaagcaagaattacagtgtggatgtcgattcatcaaccgcatttccaacgctcagccttgaggattcgagtaactcaggctcagttgatgatcttattactaatcataacaagccatcatttgtgggaaccgcagaagcgggggcaacaatccatatctatgtggatgaaaagatcgtggcaaatgttcttgtgcgggaagatggaacctggtcctatcagtttgataatgcgttaaaagatggtgaatattctatccgggtggttgccgaagaccctgcaggtaatacggcagaatcgcctcgcttactcgtcacgatagataccagtacatacattgatcctcctacactgactgcgggatctgataatggtatgtactttaacgacggtatcacaaatcaaacccgacctaaatttagtatcaacggtgagtttaatcagagtgttcagatctatattgatgggaaattagtcgatacgataacagtgacggacagaaatcaggtttatcaacctgcggttccattgggtgatggtgcccatactattcattacgttatcactgataaagcaggcaacacagcgacgtcgaaaacgttaaactttacggtagatacctttaatacgacacctgtcgtcatcgattctatcgacggtcaaaccttagcagagatgactgccaatgatgggaagatatatataaaagatacgacacataatcttatatttagtgggagtgctgaacccaatagcttaatagatttaactatcaatgggctaaatgtgggacaggtttgggttaataataaaggagaatggcagataccagttaatccggtttatctctcacaaggtcttctggagataaatgttaaatctacggactgtggtggtaacgtaaatcaggaaaactactctatttgggttgacacgatgattcaggagtttaccagcgagcttgatgacaataaatcatcatcgaaaacggactggtggagtaatagctccactattaccatgagaggtatgggggaaattggcgctacggtatcattaatcgtggcaggggtcacgctggcaaccgctgtcgttgcggctaatgggcagtgggagttatcgaccgatcggcttccggaagggaaatacgatatcactttgagtattgaggataacgcaggcaaccgtaaagaagaggtgcgtgaaatatttattgatcgaacgccgccaaacgctccggtcgtaaattattcagatattgttaacgatctaattattatgcaggggacggcggaagccaaatcgcagctaataataaccgatagtgaggggaatacttacacgttaacagttcctgataatggtaaatggagtatggcgatcccgtatccatcggaagggaagtttaccattacgagtgtggatgcgattggtaaccggagtgatgatgtccctctcgatatcatgaaagagactcctgttatttcattatctgtagattcagacagtggtacggtgggcgataatattacgcgagataatcaacctacctttattatcgggaatctggaaagcgatgttgtggtagttcaggtcgatattaatgggaccgtatataatgctgaaaaaaatgccgatggcgtttggttctttatgccaggtacaccgttagctgatggttcctatacgatatcggtaatcgcaagcgatgtcgcgggtaatcagaaaaactcgttacccattaccgttacgatcgacagtacgctgacagtgccagagattgcgctggcggcaggtgaggacaatggcgcttcagacagcgataacgtgacgaatcacacccagcctaagttcacgctgcagcatattgatgctgatgtgaccggggtgaccgtaaacgtggcgcataatggagtgacagacacttaccaggcgacgcaaggcgcggatggctggaccttcacgccgccagccgcctggaatgacggtacctacacgctgagcgtgacggtggtggatcgcgcggggaattcacagcaatctgccttgctggaggtgacggttgattcaacggtgacagtgccagagattgcgctggcggcaggtgaggacaatggcgcttcagacagcgataacgtgacgaatcacacccagcctaagttcacgctgcagcatattgatgctgatgtgaccggggtgaccgtaaacgtggcgcataatggagtgacagacacctatcaggcgacgcaaggcgcggatggctggaccttcacgccgccagccgcctggaatgacggtacctacacgctgagcgtgacggtggtggatcgcgcggggaattcacagcaatctgccttgctggaggtgacggttgattcaacggtgacagtaacagcggataacctgcatgacgatgcgagcgatgacgccacgccaacagtggttactccaccggagtctgaaacagcgaatgccgaaagtgatacgcatcttcgtacagtgccgtctgcggcggaagaaagcgtggtgaaggagccggcctatagcattacattgttaaacgctgactctggggatgaaatagatcgttcaattagtcagacaccttcttttgaaatatcagtacctgagaatattgttaatgtcagtgttatgtttgaaggagaagagtttactctgccgataactaaccagaaagcaatattcgaagttccgctatctttggaagatggtgaatatactatggacgtgaaattcattgataaggatgctgatttcctgattatggagaaaacattctcagtcgatcactcctcggcggatattgtgaacgcaatgaatgcaagaggaaagaccgaggatgatattaatgattccccttcaacgaattctgtagggcacaataataacggtgctattgatgttttcgccgttaatgaagttacgctacctgtagataatcaagaagaacacgcataa

SEQ ID NO: 398167 - DNA, 633 bp, Salmonella enterica
atgccaccagtatttataacattgccggtaaacgaacatggaaatgtacttcccatttcgtcacatgatttgggaaatataaggggagcagctcaacatgctgatgacgctgttaatgtgcagatgggcaatggcctttacagggtaagatatctgcctcgtctggatagtttttctgttaatcccaatacaggtttcaacccgctacattctgctatggaatttattacaacagtgaataacagcacccatcttgaagagcatcttaaccaggggagaacatttttatctgcccttgaggccgctctgctacgatgccaatcgcgtatatcaactaaaattgactcctgtagcttcagtatggagcgggagaatctctcactggcggcagagtacctcacctgcccgataacgttatgcgtccctgagaggggggtctttgcccggacatcattacagtcagatgtctgttgcttatatgactcaactgcactgaaagagctggtgtcccggcgtctgcctcatccgattagcagggaagccataacaggggcacatattgttccgaaagaacagtgtcattttgacccggagaagggcgcatttattcattctgcatctgaatcgcgatga

SEQ ID NO: 398168 - DNA, 900 bp, Salmonella enterica
atgactaaccaaatcatcatctccgatatcgccatccgtaaagacactcagggccgttactcgcttaacgaccttcatcaggcgtcaggcagtgaacagcgccaccgccccaaatactggttagaacttcaacaagcatctgatttgattgatgaaattctaaaaggcgtgattccgccctttaaccatgagagcaattctaattctgcaaaatcgcagaattggaaacctgtcaccacaaagagtgggcgctacggtggcacctatgtttgcaaggaactggtgtacgcctacgccatgtggatcagcgctgcgttcgctctcaaggtgatccgggcatatgacgcgctggtatctggcaatgtggaagtgaagccaaaggttcgccagtgtacggcaactcagctcatcccgttgcgccagacggcagaacggttaatcacgactggcctcggcaaaatctatcccgacatctggaagctggtacatcatcgctttgatgttgagcacatccatcagttgcagcctgagcaggtcggtgaagctattgaatacctgaacgtgctggaaggtgaatacctggggcgcgaggcacttccggcaaccccatcagtgcatttcaccaacgaggagctttgcgctctctgctgggtatggaatgccgccgaatacatgcgggagaagatcgaactggcctatcccgcaatgaaaactcttaaatctgaatacgcaccaagcttctactcaatagcatttgagtatcagcgtactctcgaagccggtagaaaggttctcgaacgggaaacgaaacacatcgttccacaccctcatagcgtgtcagatgaaaactggcgtcgagtcctgcctcgcctgcgtcaggacagcctacctcgcggataa

SEQ ID NO: 398169 - DNA, 366 bp, Salmonella enterica
gtggccccgaccgatgcgccggataccctgaatgcgtttctcgatgtgccaaaggatgccgacctgcgtccggaagccattaagcgttttgaactcatggtaacggcggccgcacgcgatgcactggcaagcgccgcagcccgcgatgaggcagcgcaggccgcaggggatgcgcgggagcttgtggaaaacccggttgttattgtgccgacggcagctgaattaccggaatccccccgggggctgtatctggtggaagccgatgagaggaaaggtggcggcccgcagatttattattatcccggaagcggtcgccgtttctggtttgccagtgtggaggataccgaagtggagggtaccgaatga

SEQ ID NO: 398170 - DNA, 303 bp, Salmonella enterica; identical to SEQ ID NO: 392685

SEQ ID NO: 398171 - DNA, 639 bp, Salmonella enterica
ttgtttgttgatgccgggaaggccagggttagagttaatggtcgcagatttaatccaaataaaccgctaccatccagcggggttttgcaggttgcgggagtggctatcgcgtttggtaaacaggattgtgaacttgctggttatcaaatacccgtttcaagatcagggtactggtggttgacgggcgtattcttgattttcatcggtggaatgggcgtcctgttaagtgttggcggtcagcctgaaacggtaaatgacttacctttgcgtgttaagtttttattagacaaaagcaacatacattatgtgcgggcgcaatggaaagaagatggaagcctgaagttgtccggttattgctcgtcaagcgaacagatgcaaaaggtgagagcgacgctcgaatcatggggggtcatgtaccgggatagtgtaatctgtgatgatttattggtacgagaagtgcaggatattttgataaaaatgggttacccccatgctgaagtatccagcgaaggaccgggtagcgtgttaattcatgatgatatacagatggatcagcgatggcgtaaggttcaaccattacttgcagatatccccgggtcaaagttgtcattttccactcacttaaaatctaatggatag

SEQ ID NO: 398172 - DNA, 567 bp, Salmonella enterica
gtgccgccgcctgatcgcgataagcccgctgtatttctctatgtagggcgtcttaaatttgaagggcagaaaagagttaaagatttatttgatggcttagctcgtacgacaggggaatggcagttacatattattggtgatggctcagattttgaaaagtgccaggcctatagccgggagcttggtattgagcagcatgtgatctggtatggttggcaaagcgcgccgtggcaagttgtacaaaaagaaataaaaaatgtcaccgcgttactacttacctctgcatttgagggatttcctatgaccctgttggaagcaatgtcatatggaattccgtgtattagttctgattgtatgtctggtccgcgcgatatgattaaacccggtttgaatggtgagctttacacgccgggtgctatagatgattttgtaggacatcttaatcgagttatttccggtgaagtaaaatatcagcacgatataattcccggcacgattgagagattttacgatgtgctatattttgaaaattttaataatgcgatattctcgaaattacaaaagtga

SEQ ID NO: 398173 - DNA, 393 bp, Salmonella enterica; identical to SEQ ID NO: 393638

SEQ ID NO: 398174 - DNA, 342 bp, Salmonella enterica
gtgtccggtcataagggcttaacgccgaccttgacgccttcaattgttggtacggcggaagagaatgctaaggttgacatttatgtagataataaactggttgccagcgttgatgtcgataaagatggaaactggagttatgaatttaaaaatcacctcttcgccagtctcaatatttatgacacttataatagcatttggctcagttttacctgtaaaggttgggcgagtattgttagtaacgttatctccgacaataccgctatcatcagtcgcttcaatctcagcactgaaatagctgatacgtgtatcaatagtaaaaggcagatttgccgtctctga

SEQ ID NO: 398175 - DNA, 276 bp, Salmonella enterica
atgacgatccagttcaagctgtcccggattcgccaccagatccagtttcagggcaacgccacatctggtgtaattctccagcccggtaatctggataagcccacgtccgcgatacttccagccatctccggcgtctttgttacccatgcggccaccataaaccagattggctatttgtggctggtgggcaacctggcgatcatcaatacgtcccagcatttcgcactgatacggcgtcagacctttaccaaacgtctttttcagcgcctccactga

SEQ ID NO: 398176 - DNA, 1317 bp, Salmonella enterica
atgcaattaaccgaaatggatcaggcataccttgctggcacggctgggcctggtgtgcaaaagtgtatgcaggtacttgtcaacttctcgagagcctttggcgcgtctaagttggttaacattgccagtgcgcacgttattcccaatattcccttgggactgctggaaacgctgactgagggtgttgaaacgttgcctgtcatgacaactttgcatccccatatgtccgcactttgccccaacgcttggccgttgatgggtatcgatacacagtatgcgcaggcgaagctacccgacgttaaacgccgtagggctttgttcgcggagaaaggctttaaccaaacctacacttgctatccggcgatggttggcagcctgccgaaaaagggggattacatctcttggatcggttccgggggacaggtgttggttaattcgacgatcggggcgcgctgcaatcgagatggggcgctcctcacgctggcggcggcaatcacggggcgttcaccttattatggattgttcttggacagcaatcggttggcggaagtattggttacgtttgacggacttgatgcgaatcgtctctcgaaaacggagctcagcgcgataggttattacttgggggcgcaggccaagtcgcacaatattgtgatcgacggtattgaccgtgagcttggtatggactacttgaagcagattatgatcccgctgacggtcacgggggcggtgggagtttgtcatgttctcggggtaacaccggaagccaacacgttgaaagaggcgcttggcgggcaccatccggtgaaaaaaatttcgatcgatcgcgagatattacgccgctcgctggcgctgtatacgctgaagagtggggcggacgctcccttgctgtctccacaggctggtgtaacagtgaagagggacattgctccgaccgatatggtggtgcttgggtgcccccacctaagcatccaggaggttcgtttacttgctggtttgctgagagggcgacatattccaaatcataagcatttatggattggattggcacatcagcaataccagcttgccagggaaatgggatatgtggcgactattgaaagggctggggggattatggtcagcgcttgtatgtctactattcccgactctcctattccggcacgagttagttccgtaatgacgtcttcgatgaaggctgctcattatatctctcaattaaatcagaaacgcctctccgtgggcgtcgcggatatcgaatgctgcattcggtcattgcttgattcaaccattcacacaccacaggtggccatatga

SEQ ID NO: 398177 - DNA, 399 bp, Salmonella enterica
atgaaactacaggccagagcactaaatcccgggaatgtaactgctgaggtgtttctcgtcgaacaggcgttttcgtttatcggcgactttgatcctcaaactggggcgttgcttatcccgcaccacccgcgctatggcgagtcactggcgggaaaggcgctagtgtgccctagtggcaaaggagggactatggcaccatttctaatttacgaggcgtatcaacagggtaacgcgccagctgcaattatttgcaatcgagcagatccgattctttttgagtcggcgatggcaataaatatccctatttttgacagctttgaaggagacgtattggcgttgctcaaaaacggccaattggtgataattaacggtgagaatattgctattaatgcatattag

SEQ ID NO: 398178 - DNA, 327 bp, Salmonella enterica
atgcatcaactctacacttatctttgtgctatccatgcgctgccgtcatctgtgaaagcagtcaataaaacggaaaccattgatcgattccatgaaggggaaaacataatcgtagaacgcgaaattatttacacgtttaataatggcgttcaaattttatataaaatagagtccgacaccttccaatcggatgatgtttgtcatgaatgctggataagttatgatgtagtgcacgatggcggatatgccatttcaccgaagaaaaagcgattttacaatcgctgccaggaaaaattctggttaaaaatgcagagtgaactcgattga

SEQ ID NO: 398179 - DNA, 1704 bp, Salmonella enterica
atgttaattatgagtactgagtttgctgattctatttttgatccacgtgggaaaaactgcttttacgaattacagttagcacctcgtcccagcctacaggcattaagggatagcacggttttgttttttgacaataccaaattagatttctgtcattaccgcgaaatattcatccgtcttgagacgatattgaatgagaatggtattcatcgtatcgagcatgttcgtcagtctgtgcgtggcaccatgacggaacagattcgtgaactggctgacaaattagcgggaaaagaggttcaggctgcagtgatagcgttggctgacatgggaacctcagtaatgaccactatcctcgccattgagcttgaaaaaagagggatcgccacgttattgattgcctcgccccctggggataatttggccgagcacgtggcgcattaccgggcggggcaattgtgtatttgccacctcgacatctatcaggcgagcactgtcagcgacatccgcaagcaggttgatgcacagcgcgcttatgtattggaagctctcacttgcgctggcaatatacagtcctccgcagtgcttcatccgaaaatggatcttgaccgaagtcattctggggctgaaatgatgccctactacggcctagaagcgctgatggcggagtatgaatgccagtctatcggtgatggtttgccggtgataccaccgacgccagcgcgttttgccgctatgctggcatactgcccagagtgcttggataccgtgctgatcccagaggcaggcccctcaggaaaagacattcgggtgcgggatgtagtcattaacagcattctggctggctgtaaacctgcatttttgcccattgtgacagcgacgatccgtgccatggccgatcccgctttcaacttccagcaatccattactacttcgtacaacggcggcaacttggttctggtcagcggcccgatcgccgatgaactagggatcagttctggtcagggctgcatgggaccaggatttcgagccaacgccaccattggccgggccgttaacctgacgattctcaacgtgtgccgcgcctacccaggcaaggcggatctgggctgcctcggctcgccggttgaattcacttactgttttgccgaaagccaaagtcacagtctatggccgacgctgaatgaagaacgatttggggctgaggccaccacagtgtatctgatgaaggcggaaccgccgaccgacgtggtcgattttctgagccaaacagcggatagcctgcttggcgtgattgtcgatagcgccacccatttggggcgcatgaatgcgtacatcccggggcgaattttaattgtattgacgcccgatcacgctcaaatcctgcataacgcaggctggagtaagtgcgcactacgggaatatttgcacgcacatatccataacccacttgatgccttgcagggcagaggtctggttcccgtgaggccggcacaattcgccgaccgcgatcctatgcccgcgacgcgtaacccacatgatatcgatctggttgttgctggaggacggggcgggcactccgccattttggcgagttggggcctctactgcgatgcggtgcttacaccgttgacgctacctggagggcagcttgcgcgcaatattgaagatttccagactacgccatcaacttcgaggagccactga

SEQ ID NO: 398180 - DNA, 1254 bp, Salmonella enterica
atgccggccattatagatatacgtgctcgtgaagtgtttgactctcgagcagacattacgctggaggttgaagtcgtgctggatagcggcaaacgtggccgcagtatcatccctacgggctgctctaaaggtaaacatgaggcgatcgaagtacgtgacaacgaccccttgcgctttaacggtcaaggtgttctgcgggcgatagacattgtacatactctgattaaaccgcagttgtgcggcatgtccccttatgcgcaggaggatattgaccgtatgttgatctcgctggatggtacccccaacaaaagccgattgggggccaatgcgattctgggtgtgtcgctggcagtggcgaacgcggcagcagagcaccgtaatctgtcgctgtgtgactacatcagctgtggccgagaaaagtccataccacagcctattttttccatgttatccggtggcatgcatggtgatggcaattgcgattttcaggattatcagataatcgcactaaaggccccccatctcgaagcagcgttgcaagttggcaagaacgtgcatatggccttgaagtccctactgagggctcgcggaatcagcactggcgtttccggtacgggagggtatctgccgccgctgagctccaatgaacaaggattgtcgctgctgatggaagctattggcaaagcgggctataaaccgggtgtggatgttgggttgagtatggatattgcggccgagatgttctttaacaacaaccggtatcaccttgcagcagaaggtagagtactcacgaccgcagcctttattgactacctgacatcgctctgtgagcgttacccgatcatgctgatggaagatccgttgggagaagacgacttcgagggctggatcgctctgacgcagcggctgggcggtaaaacagagctggtgggtgacgatctgttcacgaccaatttggctcgttttgaacagggtatcgccatgaagatggccaattccattttggtgaaaccgaaccaggtcggtacgttgagcgaaaccgtgcgattggtggccttggccaaagaagccggatacggcattgtgttctcacgacgttcgggtgaaaccgaagacaccagtatcgccgatctggcggtagcgttgaacggtactaaggtgaaatttggttccctggctcgcaccgaggcaatggccaaatacaaccagttgctgcggctgcaggacgcgatagccgatgtgcagagcgtctga

SEQ ID NO: 398181 - DNA, 711 bp, Salmonella enterica
atgaagccgatgcatccctttattcagggcaataaagatgccatgcccctgttgcttggcttattgcctttcgctgtgcttaccggcgtcagcgccattcaggcgggaatgacgccttgggttgctctgctgtcgtctttgttgctgatgtccggagcgtcacaaattgctgcagcaacgctaatgacggcaggcgccgcgcctttcgtggtgatcgccacgcacattgcgatcaattttcgctatgctatctacagtgccgggctgtctcagttgaagctctatttcactccgctgaccaaacttgcggcagcacaagtgttgattgatcaaacttacgcactgacgtttttacgtagccaggcccagccattgagcgcgaaagaaaaaactctatattattttggcacggcgctgccaatgtggctggtgtggcaagtggggacggcagtggggatcattgctggcccgctgattcctgccgattggcatttggagttcgccattaccttgtgctttatctccctgttgatacctatgctgaaaaatggcccgattgtgattgctgccgcggttgcaggggtggtttcagcctttacctgcggatggccctataatttgggttttttattttcaatggctgtaggtgtattagctggtggcttttttcgcaagactcgatggtcccaacgccggggggagttgtcatga

SEQ ID NO: 398182 - DNA, 321 bp, Salmonella enterica
atgagtgagacgactattttatgggtgttggtcgtcagtactttggggacgtttttattacgctactcctttctgtggctcaatgatcgtttaccgttttccgagcgtgtggccgaatggttgaagctgctcccggctacggccatcgtgtctttaatcgtgccagccctgatcgcatctccctcggcgttgacggctgaaggtgcaccaaagctgtgcgctgctatcgtggcgacgctggtgatgtggaaaacgcgtaatgccacctggatgctgttgctaggtatggcgacgttttggctgatccgcgcgctcagctaa

SEQ ID NO: 398183 - DNA, 840 bp, Salmonella enterica
atgccagaaatcaccgaatccattttcgtcaattcagatctacttaaccaacattttgatcccgacgccattgacacacctatcgtgtcgatctacgcctcttactcgcatgagaaagaacactcattacgctcgagaatgcatacccatgctaagggccaactggtctacatcaaatcgggtgccgctatcgtcatgttggaagctcgtatttgttctgtgctgccgcagcagttgctctggatccccagcggggtttcccacaatgtgatcctacgcgacaacgttgattttcgagccgtttacctcgatcaaaaacgctttgcgtcgctgtcaaaaaacgtcgaagtctttaccatcactccactaatgggagaggttatcgaggccatgtgccactcccctttccacacaaactggatgatgggagctgagttccatctgcaatccctgctcattgacaaaatccaggccaccgtcccttccccctcctggcctgctttaccgcacgactccagagtgcgaaattacctgaaatgttaccgcctgaaaggcgagatggtgcctcgattgaatgaattagcctcccactgcggcgcatccgagcgtaccattcatcggctgttcgttcagggaaccggcatgtgttatcagcagtggcgccagcaggtgcgtttgaggctggccctggagttgctgatcaccgataagtcgattaccgagattgcccactatctcgagttctcaaccaccagcgccttcatctcttttttcaaacaccacagaggcatcacaccgaagaaataccgcgaccaattgtacaagtctgacgtgcgctaa

SEQ ID NO: 398184 - DNA, 210 bp, Salmonella enterica
atgttggaaaacctggacgaagtggaatccgattttgtcatactgatgagcctccgcgaccagcctcagatgcgccatgatgtatttgaagaggctgaagtcgggtggatcagggatgaaaactgccgttataacccgctcgccttacaacggttctccggtaatgccggagggcccggcagacatttcttgtctccaacgtcgatgtaa

SEQ ID NO: 398185 - DNA, 2211 bp, Salmonella enterica
atggctcaactcaggatccgaggcgtaagaagctacgcgcccgacagggatatctgctttgatcttagcagcaaagtaacgctcatttatggtcagaacggctcgggaaaatccacggtatctggctatttttatgacagtcaggccgataaatatcggcactgcgcatttgaaagttcgcacatcagccactttcaggtctttaatcaggaatacattgacagcaaattcacccgttcggactatcagcctgggatcttcactctcagcgaggccaatcaggaaagccaggatcaaataaacagtaataataaagaaaggacaaaactgagtgttcgcatagataagctcaatgaagagatcgcagaaaaaaaagggatgaaagaaacggttatcgaccgttgtgctagggatatttttaaccggacagttaatgacagaaaaagcctcagcgattttcttgatggcgctaaaattaaaagatcgttttacgaacgtatggtggctacaccactttcagacgttcgtaccacaacggaggaactggctgataaatggcggatattaagtcaaagcgaagggacgcttgtcgccgaaattcatattcctcagaccacagcattaacggaagacacccaaaaactgatgcaggaacctgttatgcctgcaagcagcacgcaattctctgcactcattcagaaaatcggtaatgcagactgggtgcgccaggggcagcattatatacacgatgatgtttgcccgttctgccagcagaacctggatatcacggcgttttcgcgcgaactcaatcagatgttcgatgagacctatcagacttctcttggagcgctgagcagggctgcagaacgacttactgaggactgtgataacctggccgaatttgaacgccgtgttgcgatccatgctttcattgatgatggaagtcagatgttatctctggtgaaagcggttaataaaggctttcaaattttgttacagcaactccttcataaaattaaagaaccttctctgaagatacaacctgagaacattcaggaaccccttttgttactccaaaatgaagtgaatgcattcaatacccgggtacgggaaaacaaccgtcttgctgaaaactttactcaggaaaaacagtccctgtacgctgatgtcatggcgcacctcagagggatctgcaatgagttctttgccgagcgcgacaggcagcttggtgagcttcataatgacgttaacaacaggttgcgtgaagccgagatcctcacggcaaataagaagcaactggatgatgaaacaaatgcgctgactagacaactctccgacatacaaccaaccattgacagtatcaacgcgaatctcagactgctggggatcaccggctttgaaatcatttgccatgatgctgaaatgaaactataccgcctgcgccggggaagcgaacccgaaaagtcggaagtattcaaatccctcagtgaaggtgagaaaacaatggtttctttcctctatttcatagaatcatgctccggcagtctcactcctgaaaccattaatccagagaataagctcattgttattgacgatccgatttccagcctgtcgcataattatatctatgaagtcgcagcgctcattaagcgcaaaataataaaagcgggtgcagcgagacatgttgtgatactgactcacaatatgtttttcttccaggaaattttgttaaacagtggtcgcctgcaggataacagagaggcaccggtaaactggtctcttcttcgaatcgttaagtctgactacagttcctgtgaaaagctttctatgcacgggatgctcaatgaatatcaggcactatggcagaccctgaaagacgtcagggatggaaaaacccagccgattgtgctttttaatacgatgagaaatattcttgagtattatttcagcttttcctgcaaaaatgaaaaacttaaagaggctctggagtctctggcaagcgaacacagcgatgccggagaatatgattcattttaccgggctatcaaccggcactctcattcggacggccgaaatctcttttctaccggcgtcatcgataaggaacgctatctggggatgttcagaaaagtgttcattcagactgatgacgatgatcattatctagccatgatgggggaatcagaagaactgcaggaaacaggagagtag

SEQ ID NO: 398186 - DNA, 1347 bp, Salmonella enterica
atgacagacgatgctgtgcaaactaatactgctgtttctccccctgtgcctctacatcctcctcgtttcaactggaatacggtttttcgtggtgatcccgagcgagcctcctataacgcctgcgtgggaaacaacggagagcctgatatttatcactatgcagacggctatgctgagagtgtcaaactgctcattaacgatctgacagagggacggggaatgctggatatcctgatttaccccatctgtttctgcatgcgccactcagttgaactcgccattaaggggcaaattacagatcttgtctggctggcaacagtacgccagcaaccgctaggaacggacacgcaaattgaaaacatacttggcaagcatgatatcaagaatctgtgggatttctttgtgcagggcaccctcaaaacagatcgccgttatgccgcagtgattaccccccttacaccacttattaagtgtattgcagatacagaccctacaggacagactttccggtacagctacagtacggaagcagtaaaacatctgaccgatgttagcattattaacatactggtgttgcaagagcagtttggtatcatctggaatacactcgaggctctccgggaactgacagagctactgagcagagaatatcagactggaacatttacccgtcgtctcagtcggaatgatctcgtgaacatcgcaaaacggttgcctgcgcgaagtacatggggagagtcagatttcgctgaaataaaaacagcaatcaaggctgaatatgaaattggcagtaaggaactgaccctggcctgtaacctgattcagaaaacccgtgataccgcgagaatgattggaattcaggtttctattccaggattgtccggggacgattttatccagttaaacgaaatctggaagacgggatgggacttgagcgagctggaaagtgatctgcgtgacgacattgacgggcatagggagcccaggtcagcaccagtgaatatgcaggaaagcatacagcgcgagaggtctgcagaaaaaaatctcccgcattctcttgaacggttcagacaatggggtacaccagacaaactggccgggcttcttactcttctggaggccggaatggattgttactgcgagatatacgacagtcggtttgcccgaaaccaaagctatatgatgaccgttttcgatggtacatcagaagcctatgaaactcaggttctggacatatggagacgaagtgtcggaagaaaatgttaccccgctctgattataagaaaactgcgacaggctggatttcgtcaggagtcttctgccgttattaacaacctttttgcctga

SEQ ID NO: 398187 - DNA, 144 bp, Salmonella enterica
atgggaaaaatctttaataatagatccggttctaatagcctcaagaacagcaatgttcgtgtgtttaaggagccggatttaacatttagagaacttctctgtggacataatccgtatgtgaagtccccctctaaaagtgaatag

SEQ ID NO: 398188 - DNA, 1719 bp, Salmonella enterica
atgaataagaaaagtccgtcaatggttaacttgcctgcaccgcgtgagccaattaaccagaaaatcgataccaataacgcattggtgttaaaccataacgccatacatgaacaacgactagcggagatcacgcagtctaatacctgtgacaaggccattgtaaccgtaaatccctacgggaccgctccgttgagtctctatctgggggtttggattgatgaagctgccgcgctagagatcaatgttgttgatagcgaagcgacggcagaggcggtgcgttatcaatatgatgtacatccgggcgctaaccttattccggtgtgtgggatggtatccgcggtgaataatcagattaccctgcgccttgcctcgcaaattgtcgggcaatatactgtaatgacagacgcattaccgcctacggattcggctaacgtgagcctcggtttccccattattagcgtttcctatcctgcgcagcaggcctcgctgatggatgaagggctttatttctccacctattttgatcggtataatctggcttttgatcataacgggattgtccggtggtatgtaagtcaggaaatcccttcttataattttgtcagaatggataatggccatttcctggcgacgtcacagggaataaaccattgtctgaatatgtatgaatttgacattatgggacgggtttatacggtttatcttctcgacaatgagtttcatcactccattcttcccattgagaacaatctggcgattgcgccttcagaatacagcaatggacggccagatggttactcaaccgggaaagatggcgtatctattattaacttatctaccggacttgaagtcgcttattacgatatgttgcatgtgatggattattccagatcgccgcgtccttccggaagcgcgccaggtcaggacgtatcaatggatgactggctacatatcaaccaaagctatattaatgaacccaacaatttgctgatctgttccggtcgacatcagagcgcgatttttggcgtaaatgtggattccggcgatctgcgctttatcatggcgaaccatgaggattggtctgacgaatttaaacaatacttattaacccctgtcgatgatgatggcgtcccactgtatgatcttacctcgccgggagggattgatgcggcagataagaatttctggacctgggggcagcataacattgttgaaattccaaatgacgagcctggtattctggagtttatggtctttgataatggtaactatcgttcacgcgaagatgcgaaaagtctgttgccgctcgataacttcagccgggtggttcagtttaaaataaaccttaacgcgatgaccgtaacgcgtccgtatgagtatggtaaaacggaagtcgggaaccggggctatagcagttttgtgagcgctaagcatttattgagtaatggtcacctggttattcacttcggcgcgacgacggttgatgagtttgagcataccattaccgcgcaaccaggctccagcgatcttgtcgatccggatgaagggcaacaggcattaggccgactggtattacaagaaatcaataaagagacgaaagaggtcttgttcgaagcgacggtgacgtcgggctatttcaagaacgaagagacgaatggcgcgaattatcgttatgatatttctgcatttcgggtatataaaatgccgttgtttgcataa

SEQ ID NO: 398189 - DNA, 4002 bp, Salmonella enterica
gtgtacttaacaatgaaatcatccataaaaggcaataatagtttttttcttagcctgaaaagtaagctgattatctggagccagattgtccttcagattctgttccctctttttaccgtattcccggttcactccgcccctgcgacgacgacaaaagagaccacggcagccatgccgtattctcaggaactgagcacgctcgccagcagcacagccagcggtacggacggggcaaaaagcgccgcaaccggcatggcgaccagtgctgcggcctcgtcggtacagcaatggctgagtcagtttggtaccgcgcgggtgcagcttaacgtcgatgataacggcaactgggatgacagcgccgttgacctgctcgtccccctgtacgacaacaaaaaagccgtgctcttcacccagcttggtctgcgggccccggacggacgcaccaccggcaacctgggcatgggcgtgcgcaccttttacctcgaaaactggatgttcggcggcaacgtcttttttgatgacgacttcaccgggaagaaccgtcgggtgggttttggcgcagaggcctggaccaactacctgaaactgtctgccaacacttacgttggcaccactgactggcacagctcgcgcgactttgatgattacaacgaaaaaccggcggacggttatgacatccgcgccgaggggtatctcccggcttatccgcagctgggcgcgaaggtgatgtacgaacagtattatggcgataaggtagccctgtttgacaccgaccatctgcagagcaacccgtcggcggtcaccaccggcatcagctataccccggtcccgctggtgcaactggcggtggactacaagcgcgggcaggattcaatggacgacacgcagttccaggtgaatttccgctatgactttggccacgactggcgttaccaggttgacccggagaacgtgaaagcggaacgcagcctggcgggcagccgctacgacctggtggagcgtaacaaccagattgtgctgcagtataagaaaaaagacgagcagggcgtcagcaatctgaacctgcaggtgaccgtcgacaacagtccgtcagacgggctgacgccgaataccgcgcaggtgcaggcgacagacaaagacggccagcccgtgcgcaatgcggccatcaactggacgaccaccgggtcggcaaaatttgccagcgcgaccagcatgaccaatgacagcggcgtggccacggtgaactacaccgataccgtagcggaggcggtgaacatcacggcctccagcggcgcggtgacggccagccagaacagccatttcaatgaggtcaccgtcagcagcgttacgctgaaaatcacgaaggataacagcgtggcggacgggcaggctgccgaccaggcgcaggccacggtgacggacattaacgggcgcgcgattgccaacagcaaagtgaactggagcgtaggcagcccggcggtactgaagaatgcggaaaccaccacggatgcgaacggtaacgtgacggcggacttcacctccacgtcagcgggtgccgcgacgataagcgtgaccgccggggacaagagcgcctcgggtgaggggcattttacggcgaatgcggccacagcggtaatcgacaccatggacgtgacccgtgacggtagcccggcgaacggcaccacggccaacatggtgaaggtgacggtgaaagacggcggtgggtcgccgctgggcaataccgccgtgtcgctgagcgcagataaaagtacggttgctttcgcagcggcaaaagcaaaagcctctgcaggcagatcgtatcagacggatgctcagggagcggtgacggttgaatttaccgatacggttgcggagtcggttactctgacggccagccttgataacggcaataccaaaacggcatcagccagctttgttgctgacagcagcacggcgaaactcagcaacctgacggtaaccagcggagcggtggccaacggtacggccactaatcaggcgactgtaactgtgacggatgccagtaataacccgctcgccaatatggatgtcagctggtcacaggatggttctgccgttctggggagttcagccaaaactgatgccagtggtaaaaccacggtgacctttaccgatgtcaaagccgagacggtaaacattacggctggtgtaaatggcgacagtcagtcgggggcgagtacgtttgtggcggatcccggctcggctaaagtaaacgctctgacagtgaccaccggcgcgctggcaaatggcacggccaccaatcaggcgaccgtgaccgttacggataccaacaacaacccattaaccggtgttgatgtgacctggtcacaggatggttctgccgttctgggtacgtccgcgaaaacggatgccagtggtaaaactaccgtgaccttcaccgataagaaagccgagacggtgaacattaccgccaccgttgatggtggcagcagccagacaaaaccggctgagtttgttgctgacagcagcacggcgaaactcagcaacctgacggtaaccagcggagcggtggccaacggtacggccactaatcaggcgactgtgactgtgacggatgccagtaataacccgctcgccaatatggatgtcagctggtcacaggacggctctgccgttctggggagttcagccaaaactgatgccagtggtaaaaccacggtaacctttaccgatgtcaaagcggagacggtgaacatcacggctggcgtgaatggcgatagccagtcagaggcgagtacgtttgtggcagataccggctcggctaaagtgaacgacctgaccgttaccacgggtgcgctggccaatggtaccgccaccaatcaggcgaccgtgaccgttacggataccaacaacaacccattaaccggtgttgatgtgacctggtcacaggatggttctgccgttctgggtacgtccgcgaaaacggatgccagtggtaaaactaccgtgaccttcaccgataagaaagccgaaacggtaaatatcacggcaacggtgaacagctcaacggccacgaaaggaagcgaatttattgcggatgcctcaacggcgcagattattgatatggaaaccacaaccggagccgtggcagacggctcgtcgacgaacaaggcaacagtgaccattgcagacaaaaatggcaatgtgttatccgggcaaaatgtcgcatggagtagtgacaagggggtgcaattaagcgcatcgtcaacgataacggggagtgatggtaaggcgacaatcgagtttactgacctgaccgctgaaacggccaccattacagcaacgctggataacggtaataaacagtcgaagacgagttcatttgttgccgtggcagtcgttacactcacggcagataaaacatcgacaataccttcatggggaggggctgaagggaatgaggtggttcaattgacgaccaaagtggtggattcgaaagggaacccggtttctggagcaaccgtgacatggcattcttcatcagtactgcaggggatggctggcacctcaacaacgaataacgaaggtattgcgacgaggacggtatatgatgtgtcgtctgaaacggtttcggtcaatgcagttgcaagagttaatgggcaggatatatccagtaattcagtctcgattaaattctttgttaatctcacggtcaccgcatcgccgggtactacggtcaatacgggaagcattgtcactattaccgcaacattaacggatgatgaaggcaacccggttgataaccatacgctaagcttccagctaaccgcaagcagcgttggacaccttcctggaggctccaactataaggacggagagacaaatagcgacggtaagctttcatatggactatcctcattggtcgctggcgatgctgatttgacagtgtcatatgccgatgtaacgcaaaaaatcaccataacatacgtttcggcaccataa

SEQ ID NO: 398190 - DNA, 450 bp, Salmonella enterica
atggctcgctacgaccttcctgatgaagcatggattatcatccagcctttattgcctgctgaacccgtatccccacgggccggacgcccatgggctgagcatcataaaattatcaacggtatcttctgggtgttgtgttccggtaccccatggcgttatttacctgaacgatacggaccatggaaaacggtttataaccgctttaaccagtggtcaaaatcaggtgttataaatattattttcaacaggttgctttcgctacctgatgccaacaatcttgttgactggtctgctacggcactggatggcagcaatatccgggcactgaaatgtgctgccggagctcaaaaaaacatcccgatatcgccggagataatggactgggtcgctctcgtggtggttttggcaccaaaatccctctggcgacagacggaaacggtctcccgttaa

SEQ ID NO: 398191 - DNA, 954 bp, Salmonella enterica
atgagaaaggcgctagttattggcattgatcattacgataaaatatcccctttgtttgggtgcgttaatgatgcatacagtgtaaagagtgtactcgaacgacattctgatggctcagttaactttgctgttaaattaatgacggctactggtccgacaaagcctataatcagaaaagaaataaaacaagcaacggagcaattatttgaaggcgactgtgatgtagccttattctacttcgcaggtcatggttatatagaaagtgtaggtggttttctttgtggtagtgattgtgaaactggtgatgatggtttttcactccatgagttaatacatatagccaataaatccagagcgcgaaacaaaataataattttggatagttgccattcgggtgtagcaggcagcaaagatagaagtgatcctactgcagagcttaccgaagggatgaccatccttacggcatcaactgaagagcagtattcgatggaggaaaatggttctggtatattcactacattactagttgatgctttaaacggttctgctgcaaacttgattggtgatattactccaggcagtgtctacgcacacattgatcaatctttaggcccttgggatcaacgtcctttattcaaaacaaacgtcaaaagcttcgtttcactaagaagtgtgcaatctccattagatttagccgatttgaggaaattagtagattatttcccgcagcccggttttaaatttcaattagacccatcttacgaaccgaaaagtgattgtcctgatccagataaaacggaggtttttgcaattctccagcaatttaatcgcgttaatcttctcgttcctgaggatgctcctcatatgtactttgctgcgatggaaaacaagtcctgcagacttactgtattaggcgagcattaccggcgactcattgaaagaggattaatttaa

SEQ ID NO: 398192 - DNA, 126 bp, Salmonella enterica
atgatcaccgtaaacagaaatcgtattcggtctctgtttatctatttgttttacgagggtttttatgtcttaacacgacatcccccaaaaattactcgaatattccataatctgtctaaaccataa

SEQ ID NO: 398193 - DNA, 330 bp, Salmonella enterica
gtgcgtgtgaccggtaaatcccgcgacgatctgcaggcagcgatagcgctggtgcgcggcggcaatctgggccggctgttccagttcaaaaacttccgcgattggtttttcccgcccgccgccttcccgcatgtgagaaaggtggccgggcggttaaatcgattaaggcgtggcttttttaggctctgcggccttgttatacaacgcctgaatcagcgcctgctgttccgctcctggtgtgatacccaatctgtgaaaaatattcccaatctgataaagctgctgattaccggtgtcgtcttggcgggtaatcgacgcctgcgtggttaa

SEQ ID NO: 398194 - DNA, 162 bp, Salmonella enterica
atgtccctgtccaatgcgaaaatccacagtattaagccttctgataaaccctttaaactgaccgattctcattctgtatctgctcatcaatccgggcaatggcctgtagcgcactggtggaatctgaactctggtcgcgggatgccgtggagcgccagatga

SEQ ID NO: 398195 - DNA, 315 bp, Salmonella enterica
atgagtgatgatattaagaaaatattaatcaatgccggaatgaaagaaaagaaagcttttttcttgcttaaatttgcggaaaggaaaaaaattagcgtaagccgagctttctttatttatttctggaaatactatacgtggggtggtgcactatttgtttctatgctttttcctgcaaccttggcagattttgaattattcataatttatatgctttgttgtctggctttagtattagtttccatttgcttcacacctttttttattattctggtctggagccttaaggtacaaatcaaactgataggtaagtaa

SEQ ID NO: 398196 - DNA, 327 bp, Salmonella enterica
atggatactcaatcctcaatagaaaaacttataacgttaggtttaactgagtataaagcagaacgtttggtgaaatttgctaaagaagagaatatgagtcttcaaaaagcgtattatgaaacgtactgtggcatttttagagttgatgcgatattgctcagtatatttctgttttttttgataaatattcttattgacgaggatcgagatgggcttttcgtattgctttttataatattgttagtgatatttatggagtttttttatcctttccataaaggatactggaaacgatttaagatctatcgtggtctgaaaggattgtaa

SEQ ID NO: 398197 - DNA, 786 bp, Salmonella enterica
ttgaatagttatggattgatgagtctgagtcgtgaaaaagaaaaaattgaacagcttgtttttgatacgggatttgagtatttacatgatattaatcttcgtaccgagtttttcttagaagagaattctatttcatctggatatgttgatgactatatccatggttttgtgagtttttcacaggcaatggctaatttaactaaacaatatcaacgattgaatcaaaatagaatccagttacaaatggggagtataaaactttatgccattgctcagaaggagagagatactacgtctctgagcacgctttcgctaaaaggtgtcgggtttgcgagtggagcatttcaaatcctgggtggtgttggattttgtgttaaaaatgttcgtagtgcatgcgggaagttaggtataccattaatgatacaaggaggggaaaatctctatgagaatctttattaccttcttatgcacaaagatcctaaaaatatgcctgttcgtaaggcctatcgttacatagcaaaattactgggtggtgatgataaagtaggagatatcgctttttcttcagttgatgttgctctttctgcaggggctctgggaagtttaactcgtattgatgatgccagaaaactcttttactacatccgtgaagattttatacgtggctggcgagcgatgggtggggttggaataggtaccgagcttgtgggagacgtttctagtggattttctatatatcagattgtttctcggccagaaatagactggtctgatttgaaggattaa

SEQ ID NO: 398198 - DNA, 1050 bp, Salmonella enterica
atgctactttcatcgtacctaaaacgagataacaataaccttgatttagttagaataattgctgcatgcatggttatttatgggcatgcatatgcaatatcaccgcaagtaggtaaagacgatattatccatcaactcattggatttgactactcagggtcattggctgttaaaattttcttttttgtaagcggactggtagtaaccaactcttttttctcaaaaagaaatattaacgattttgtttcctcaagattttttagaatatggccagcatttgcaactgtagtaattataggatatttgatcgggataagtatttctacattatccgcatctgaatttatgattcagattccatttattccatatcttttaaaatcccttacgttagatattacatggtcattccctggagttttcagcacaaacaacattcacacattcaatggttcactttggactattatttatgaggttggggcttacatagttttaatggcaaccatggtgctatttaaatacaataaaacagccattacactattttgtttatttatcattgcagacccgatcattctagatggtttcatattaaaactgacatcattaaacgatgaagttaaatatttaccagtttgtttttcaattggggttttattcggaataaataaagacagtatagaaataaagtccactacactccttatgctagtgttaattacggctatcttttcttctcaggatagtggtttatcaaaactacttttttatatatcattgatgtatggtgttttatatttttcatcaacaccattgtttctttcactaaaagtaaaaaatgatatatcttacggcatttatttatggggatttccagttcagcaaatcgttgcaagtacaattggaaattataacattatttacaatcaagtggcgtctatttttatttctattattgccggaacgcttagttggattttaattgaaaaaagatttatagaatacgggaagaaattcacaaagatgaataaagcaatttcacaataa

SEQ ID NO: 398199 - DNA, 1773 bp, Salmonella enterica
atgtcagatatcactgccaatgttgtagtatcaatgccgagccagctcttcacaatgtctcgatattttaaagccgtagccaatggcaaaatttatatcggtaaaattgacactgacccggtaaatcctgaaaaccagattcaggtttatttagagaatgaagacggttctcacattcctgtttcgcaaccaatcaccattaacgctgctggttaccctgtatataacggacagatttccaagttcgtaaccgtgcaaggccattctatggctgtatatgacgcttatggagctcagcaattctactatcctaatgttattaaatatgaccctgaccaattacgacaagagctggctggaccagacggatatattttggttccttcagtattccctgaggctgacaagcaaagatggaaagatactggtgacataagggggtggggagctgtagagggagaagattgttcagaggcattgcaggcagcaataaaagacagggcagcaaaacactggggtaatagttctgatgtgatcattgatggggcatacagaattgataaaaaagtactaatacctactgatttgaggttgaaaggtaattgggccacaattacctcatctcttgatgattatatctttgagtcagcttacgtagatgataatggtgagttggtttcaaactggtacctatccgacgatgaagcgatcgcaaaagctagactgaagggcaccacaattactggaataacttttgtagattgtgcaaaagttattaagtttagaaatttcaatgaaaggtgtggcctacaagatttatattttgaaaggtgtggggtggcatgggaaatggtgagtcctttttattcatttttcaacaacatatttatcagagaaacaaaggaaggatacgaggagtggtatgcatgctatcttggaagacagtcaaatttagttgatcattttaaagtatcaataacagagagaaagtacggaaccttattgggtgatattgacacacttccaggtaaaaaaaatgttttctatgaaatggtaaccatgcgtcagtgctcgtgggaacacgtagattttccagttactatagaaatggatggttatgcttttagggttgaggatctttacgcagaagttataagcggtcctttatttagaataaaatcaggtgaccaatatgatatgaagattgaaagtccagcatggcttgctggtgttgaaaattttggtgaattcaaaggattaaaaggcaggagtgagatatctcagggaagtcaaaatgattataagccaccaaagccatcttcaattcttcttgaagatagcatatgcttggttagaacagcaaacgaaaatggttatggaaatagaataaatttcgactctagcagtactgtagagtattgttttccactagtggagagattaaataatattacaaactttaatagtattacaaactcaattggtgaagtatatgaaaatatagacaaaacaaatgtggtttcagttatatccggcagtgttttaatctcaacaaaaataaaaaaatcaaagaataatatgttggttatatcgattgatttaaataactacgattgtggtgcggtatttattggggatcaacaaataaaacaatatggatacacatttaggcttgataatgatattgatggatatacgactgttattatagataatacaggacttgcaggaattagtgaagtgattatatctggatgcataaggtacgtttaa

SEQ ID NO: 398200 - DNA, 606 bp, Salmonella enterica
atggctaaaccagcgcgaaggaaatgcaaaatctgtaaggaatggtttcacccagcattctcaaatcagtggtggtgcagcccggaacacggaacacaattagcactggaaagacgaagcaaagaacgcgaaaaagcggaaaaagcagcagagaagaaacgacgacgagaggagcagaaacagaaagataaactcaaaattcgaaaactcgcacttcaacccctcagctacttccacaaacttacccagcaagcctttaacgaatacatccgcacccgagacgtgggagagccctgcataagctgcggtaggcttaccggcgcaaaaatgaacgcaggtcatttccgtactgtcggcgcatcaccagaaaccagatacgacgaaaccaactgccacgctcaatgtgagcattgtaattcgtatctgtcggggaatatcggcgcataccgaccaaggctaatcgaaaaaatcggacagggggcctacgacaggttaatgggcccacacgagcggaagaaatggacgcgagaagagttacaggaactggcgaggtattacaggcagaaaacgaaagagctgcgcaacagcagaagtgaggccgcatga

SEQ ID NO: 398201 - DNA, 348 bp, Salmonella enterica
atggattattcacagttaagtgattttgaaattaacaagcgactatttaaagcgatagttggggcaaaaccattaggttatccgcacaacgcagatggacggtctgtcggcaatgaatcaaatggtaattatcgatggtacgactactgcaataatcctgaagatgcagagccgattatcgtagagaacagaattggcattattccagcgccagaaaatggattatggaaggcagcgcatagaaaagttggcagtgatagtaccccatatcatatgactcaagatgaaaacccactccgcgccgccatgattgtctttctcatgatgcaggacgccaataatgcttag

SEQ ID NO: 398202 - DNA, 234 bp, Salmonella enterica
atgattgagcagctcaatttttacatgacacaggcatcaccagagcttcttgaaatgcgccgtgaatacatcgagcgcgtcattgtcggaaagctaagacgaggcatagaagaacagaagcggtggtcacaggaaatgcggtctcaaccagattctttagagctaatcaatgcctatcaggcggggattcagtttttcataacgctaggttttgcaggtaatcgcagaggttaa

SEQ ID NO: 398203 - DNA, 168 bp, Salmonella enterica
atgggtattgaaataccagagagtttcgatccggaatggcagcagataatgcttcggcagtcagcaggaaacattgaggctcttaaaaatcgagaagatgaacatgacgaactacttatcgactgcgaggaaattatcgaagctctacgcgaatattcaggattttaa

SEQ ID NO: 398204 - DNA, 300 bp, Salmonella enterica
atgaaagatttaatcgttcaacggtacaacatcgtgaccgtacacagtaacggtgagacgtttgatgatttgcgtgaaaaacctaatggtatgttttgctattacaaggaagcaaacgaatatcataaagagattttggctgagtatagcgagcctgttaacgaagagcttctcgaagctctgcaagagacggtgtatcgaattgatgtgttcatatcaacaggtaaggcgacagagcttgacattgtagcggcacaaaaagctcgcgctgccatcagcaaggctcttggggaggagtga

SEQ ID NO: 398205 - DNA, 1101 bp, Salmonella enterica
atggaaatacaagaaatagcaattcagtttaaggctcttaagcaaaaaagcaaagacacattcactcagaatcttttatccttattcaatcagattgaaagcgctgtaattcttgaaggtccgtacaggttagtattagattcgaacataatcatgagactagagtcataccggcaagggaacgtctcagaagggctcctatctatccttctggcatttaaactcataaagaagctaccttttcattttgatctagtggtaaggccaactgtattttatgaataccttcggcaaaaaaatttaaaaagtactcatgagcactggattaaattcaaagaattaaaaaacctgatagaggaagaattgggctcaaagttattctttgatggcattgagacatatcagggggccgaacaatatttacaattaattcaaagcgacgctgaaaaaataaaaaaaactttgattgcatatcaaaatgaaaactggcatatcaactttgtacaacgtgctggttctggcgtggctggattccctataacaggtacagaatacatactagtcccaccagcctttgcagctgatgcactttttcatcctttagggcttgaatattttgacgaaacaaaatcaagtcaattctttactcagtacatacacaaatatattgttgagtgtaaaagtaacgacagacatgtcatcgataaatataatagtgagaaagattttttatttactcaaattttaaagttaacttcaaaagggaatttaatgggtgttgcagatttagacatttatacaaactgtaacattcacagtcaattctcagatcaaagtcattctcgctatgcccccgcttcggctgccttaactatagatggaaaactggcgagagcattgagaaattcgaattctcatcatatcacttctggggggatggtttgtggaccagaaaatgaagacgataataatgctaaaatggaagcattcattgaagaacacaagcgaatgcaggaaagtgaaaaacgctatcggattgctatcgaagcaagcagggactttgtgaaagagttgctttcaagtgggaatttttctgactag

SEQ ID NO: 398206 - DNA, 1050 bp, Salmonella enterica
atgaatgaaaacaccattccaattaaaaacatttattacatgctctgttatgcttgggggtatatcaggcaagcaaaaacaataaatttatcgtcgctaaaaggagataatatctatgatcttctcagcattgtattaatacaaggaacgcagcatatttatagaagaggattcgagttaggatacaaaaatcataatgatattctaagcggtgttaaaggaaaaattgacataacaaatacaaccaagcgtttcttaacacataatggtaaattgcattgtgtctttgatgaactcaccgtcgacgttattacaaatcaaataataaaaagtacgcttaaattattatatacaaataaaaatattgacaatgacttaaaattaaaaattagttctgtgttgaagtatatgcgtcctattagagaaattgacttaaactcaaaaattttcagaataatacaactcaatggtaataataaattttataaatttattattaccatttgccaattagtatacacttcatcgtttatatcgcaagaaaaaggtcgtgttaatttttatgattttatacgagatgaacgtgaaatgtcacggatatttcaagagttcttgtatcagtttatgaaaaaagaatatattggttggagtgtaaaccgaccacatataaaatgggatgcttctagtgatactgatccagaattaaaactcttacctaggatggaaagtgatataatactgtcaaatgtaaataaaaccattatcatagatgccaaatactataaaaacatgtataccaacaggtacaatagagcaaaattccgctcaaacaacctttatcaattaatgtgttatttgcataattacgattttcaagaaacaaaacaaaataagaacatagatggcatgcttatatatccaatgacaggagataatgttaatgaaacatatacaataaacaattataaaattactctcagaactcttaatctcaatcaggagtggaacaaaattcatgatgaattattaaatattttcatcactccttga

SEQ ID NO: 398207 - DNA, 1389 bp, Salmonella enterica
ttgatagctgaactcatcaaaaattttcttaagcaagcagacgaaaaatcatcacaaagcacgtcttcatacaataaagaatatcgtaatctaaaaataacgctgagctttggaaaaggaagttacgcagatgtcccatggatcgcatttcttggtggtgggcaaacaccgtcaaatgggatttatcctgtaatattatattataaaaattacaatgaattaatccttgcttatggtgttagtagtattacaaaaccagaactatcatgggaagggttgccgcctaagaccatcaccattaatgattactttaaggaataccataataaacctgcagagaaatatggcacttcattatttcactctgtttaccaaaccaataatgaagttgattataactctctagtatctggactgaatgaagcaattgataaatataataatttaataaacaaagaaactaataccaacaagttaaataacaacaaaaatgaaatcaccacatataatttcaataatgccagtgaagatttattccttccaactgacacactcaacaagataattaaaaagctgaacaacaaaaaaaacataatactacaaggtcctcctggagttggtaaatcttttattgccaagagattggcatacctccaaattggaagtaaagatattaataaggttggtatgattcaatttcatcaatcttatagttatgaggattttattcaaggctttcgacctaatacgaccggtttcactagaaaaaatggtattttctatgagttttgccagaaagctaaagatgaccccgaaaataattatgtatttataattgacgaaattaacagagcgaatttgagcaaagtattgggtgagctaatgatgctcattgaagcagacaaaagaggccccgagtgggcaattcctttgacttattccgaagatgaaaaggacacttttttcgtcccggaaaatatattcattataggattaatgaatactgcagaccgttctttggctgttgttgattatgcattacgtcgtcgtttttcatttattgatatagcaccgggattcgatactgagcaatatcgctcctatatgttatccaaaggtgtaagcgaagaagttattaatctcattcgtaccagcatgcacaaattgaatttagagatcggtcatgacaaaaataaccttggaaaaggatacatgattggccacagtttcttttgcccttcgagtaatatcgaaaaaggattagactatgaatggtataaagaaaccatcatgtctgacattggccaattattagaggaatattggttcgatgaaccagaaaaatatgaaaaatggttaaacatactcttggtgaatatcgatgaatga

SEQ ID NO: 398208 - DNA, 420 bp, Salmonella enterica
gtgacaacctattacaacatcagtaaatatcgtgaaatgattgatggcgtaaatctggagaaagagttttataaaaagatgctggaaactttttcgttactggtatcttccggtgtagctatgcaatctgatatgcgtaaagtacaagtatctatcgatgcattaaataccagaagcattatgtatcagtcgatgctggatgatgaaatgtataaaatgcagaacatgactggtctgaatttatcacccgatcagattcaaagtgatgaaaaattcaacctcttcaaaaaatatatctttgtcgaaagccctgaaaaacttatggacatggtgatgaaatacaacgatgactataagatgctggtcaatacccgaaaagccgcgaccgaagatattaatgccgcaaaatcatcttcataa

SEQ ID NO: 398209 - DNA, 693 bp, Salmonella enterica
ttgatccagaaaataaaaactgaatcagaaagtattaacaaggagattgaactactcaaatctaatatagaattagcgactggtattgcttttcctgagcaaggcgttaacttacccgatggtataattaataaaattaaagcttataatattaacgagaaggaaatttataataaccttgattataaattattgagcgaacaggctagtgctgcaaaatttaacgcgtggcagcaagattcattagttcaggtcagtctggttgctgaggagagatataataatagccaacgtattgataaagactcctggggaggcgttcaggtctcggtgaatttatttgattatgataaaaagattgccagtcaaaccggtatgaagtcattccagatattaaagacaaagatggattttaaatataaagaattattagcaaaaatgaaatcattacaactaacgattaattctaatcagaaggagcttaaaggactggaagagcaaagcagaacgacagaagtaattttagccaatcagaaaagagaatataatatttcacagtcatcttattatgaaatgttaaacacgcaatatgactattttgcattagagcgaaaaatggttgaaatgaaaatcagtgacgctatcaacaagatctctttgctacagatatctggtgaactgttaagtttgtaa

SEQ ID NO: 398210 - DNA, 321 bp, Salmonella enterica
gtgcggcgcaacggcggtgaactgcgcgaacggacacgcggcgtgtatgagcttcccggccacggctacagcagcctggtgcatgacggcgataaacgccccttcccccgcgtcgagaccttaagtcgggatgtctggcgggtgacacttgatgtagcggttgaggagtattaccagaacgagccggtgaaaaaagcactggtgcgctacccgttgcaggtggtgcgttacgccattgatgcggagaaaaatccgtggggactggcgatcgactgtaccgatgccgcgccgcagcgtctggtggcagaggagaaactatga

SEQ ID NO: 398211 - DNA, 366 bp, Salmonella enterica
atgtcctgtaatatggcgaccatcccttttctccccgaccgcctcaaccgcgagcccgtggtctggcgcggcctgaccacgggcgaactgtttctggcactggcaagcggtcttggtggtggttgcatatccggcattctgctggccctgctcagcggttactggccgttgatccccggctcggcgctggcaggcgcggcgttgttgattcagggcggcgggcgcattctggcgcacgccaaacgcggcaagccagacacctggctaccacaggcaatccttgcctggctggaacgccatcatcttcggggtacgcaactaatccagcacagcgctgtctgggtggtgcgcaggagtccgcgatga

SEQ ID NO: 398212 - DNA, 234 bp, Salmonella enterica
atgactgactcgcaacttatcgctttccaggccgccagtctgactaagccggagagcgtcaacctgctggtgctcggcctgtttaccagcgccctgctgctgtggtacgcctggacgctgctggtcgcctggcagggcgtctgccgccagcgcctgagctggcagagttttggctcggtagcggcccgttcactgttactggtgctggtcagcttctggctgatactgagctaa

SEQ ID NO: 398213 - DNA, 306 bp, Salmonella enterica
atgaaaaatcgattcactttaacacttttgattgtctcattttattcaatagccgattcgcctgaacccacccaactggccctcgcactgaagcaactcgacggcgtaaaaacctcgctggcgcgagcccaaaccagcgccagcaccgacccgcagtcgcgctacttcttcgactacttacaggcgcagcaagatatcaccgccgttgaacagggcatccgccgctacctttcctcggcaagggcgcagccgcgcgccgttcagcctctaagcgccagctaccagcgggagaaccctgatgactga

SEQ ID NO: 398214 - DNA, 1563 bp, Salmonella enterica
gtgaaatttaaacgtgttcctcgaaattttaagttgtcagatataggtgaacccataatgtatcttattgacgataactgggatgattttagttttcgaacaacgttcaaaagtgttgtatatgatgagcaaaatgaaaggcatgacttggggattttaaaaatcggttgtatagggcaagatgaaagccgaacagagatagatgaaagtttttccgcgctaaaggataactatttttctttagggcaaagtgtcgattattatttaggtattagaacgttaagtagagcattgcaaactgaaatattaagtggtctaaaagatgttgtatataatgctgacctgctttcaaaggtctcaaatgaaagagtaatgacttattctttattaagagatgttagtctttccaccgtaaaaaatcaatttaggcgattaatagaaggtggtgatattcttactgaatatcattttggttttgtttcaggtaatgctaaaagcacgatggatcttgattttcatgttattccagaggcaaacccaccgactaatattcatgtgataattggttcaaatggagttggtaaaacaagtttgctcaatcatatgattgaatcagtgttaaaaatcaaaaaaataaatacaaaacactctcaattttatttgactgatgaggatgatgataagacaaaaattaatgatatcaatgaaatattttcgggggttgtatcggtcgcttttagtgcattcgacccatttcccccacttcctgaggaaaaagataaaactaaatcggtaaaatattcttatattggtttgaagcgagtaaataatattgggggtaaaataggtactcacaaaagtaaaagaatgcttgaaaatgagtttgccgaaagtttatacagttgttgtaaaaaagagaagtcaaacagttggttacgttcaattcacattttggaatccgatgttctattgaaggatcataactttggtgatttgattgatttatatactcaaatggatgtgagtgatagtgatgaagatacattcaaaagaaactgcagaaataaattcaggaaactgagttcaggacatgcaattactatgttaacaattactaagcttgtagaggttttagaagaaaaaacattagtcctaatggatgaacctgagtctcatttacatccgccattactttcatcttttattcgagcagtttctgagctattgatatataaaaatggtgtagcaatcattgcaactcattcgccaattattctccaggaagtacctaaagtctgtgtgtggaaaattaaacgctttggtgagatctctaaagctgaaagacctcaaaaagagacatttggtgagaatgtcggattactaacaagtgatatatttggtttagaggttactgaatctggattccacactttattaaataatgaaattaggtctaatcccggggcaagttataaaaaaattctaaggaaatttgacgggcaacttggttcagaagctaaaatgattttgcaaggattgttgtattccgaaggagaaaattga

SEQ ID NO: 398215 - DNA, 840 bp, Salmonella enterica
atgaaaaggatgaataaaccaaatgacaatgctatggaggtatttactctttgtattagcaaggtaaaaaatgtgaatttaaagagaaatcttggggatattaaacaattaattaatcaggctgctatagaatatgatgagcatgctcaaaatgctgatttataccgcgtgccacaatcgataaatattaatgataacataacaaaagtagttatggagaaagtatacacacaacgaatggctaaagcatcttctccgggacgtaacgtttatgaccgattacgttcatctgctgagtttaatctatgtccattatgtggacataggcaagttaaaacattagatcattacttaccgaaatctaattatacaaagcacgttgttatgccttttaatttaattcctgcatgttcagactgtaataaagataaattagacgtagttgctttggataaggaaagtcaaactctacatccttactatgataatgtaactgaatatcaatggttatttgcagaggttatcgaaggtgagcctgcatctgctcatttttacacgcgtaatgttcctgaatatgatgatgttttaaatagtcggattagaaatcattttgaaatttttaagttaaactcattgtatgtttctcagtctggtgccctattatctaatctcagatatagagtgattgatttatatgaaagaggaggttcagaagctgttactgattatttttgtgcagaagcagaaagcagggttagatattgcctgaattcatgggaaacagctatttacttagctttgtcagagagcgaatggtactgtaatggaggatttaggtaa

SEQ ID NO: 398216 - DNA, 633 bp, Salmonella enterica
atgagtgagcagcgaccgcctccgtcacgcccaccacagggagcgattggctggttgctatctctgaccgggcggcttatcgggctggttattggtgcgctggtgttacgagtggtgctggagctggcagggctgtatttctggtggccgcaggaggggagcaggcatgttttccaggtgatgaagcgggaacagtcggaactggttattgcactacaaccgcatccgttcgggaatgacattgtgatgctgctggagaacggggtatctcacgagcttataaccaacagactcattcaaaaaccactcacagttctggcttatacactggtcagttttatgctgcgcctgacgtggctggtcgccacgttccccctgctctgtctgtgtgtgttaatcgggctgacagagggtctggtgcggcgggatctgaggcggtttggctccgggctggaatccgtttttctccaccgctatgtcatcagatccggcagttcagtcgccaccacgctgtgggtgttttatctggcacagccgctgtttctgcctgcgatgctggtttcactgcctgccgccttatggtttgggataacggtgtggatggcggcagggagttttaagcgatatatatag

SEQ ID NO: 398217 - DNA, 345 bp, Salmonella enterica
ttggccaccttatcgactgttttccagcgtaagatggctgaatggaatgaccataccgatgtcgcgactggtgaagtatgtcgtggttttatggatgtagtatgtgggctggtacagcgtcttcccgaaccctccaccattgaaaaacaggctaacaagaacgccttgcaaaccttggatatgagcgatccggaggctggggaagcgtttaaagccgaacactatttagatatgaaaaattggttgagttgcaaaccatacggcagcccaccgatcgtaaggttcaggattaccgctttacctacaacgacatctgtgactggcaacgtcgtcaaaaaacagtga

SEQ ID NO: 398218 - DNA, 1410 bp, Salmonella enterica
atgaagtttgcagatgtgtttctcaatgaacaccaacaagcaagtttagattttattaatatcccactagatactgatttacaattttttatagatccaaccgctataaaagcactaaaaaccacatggggaaataatctggagaagttaattaaaaattacttttcagatatcatggcaagtatcaagaatggcgatcttaaacgtgcaggcatcttgctttcatcattaagagagtcaaatgcatttcatttgggctattcagcaaaaaaatcatcaggaaaagcattgggagaaaaaactgctcaacttattttagactcattgataaatagtaaagcagcacaatcaggcttattaactgatcttgaagacactgcattaacaatagatggtattgcatcagataggatatcagattctgtttgtaatatattaaaactgccattcatagaatacactcagacgatatgtgatttctatggcgtaagtatgtcagaagtctctggaattaggttatgggatcctattagtggaaggtgggtaaaaaaaacggtcaaacttcctattcataatggtgaggagataatactaatacctaaaataatggcacgtgaaaaaattgcttactctcacacctcattttatagaaaatatatcataccggagataagaaatgagcatctcgcatctggttcggcactagtttcccttttaaaaggaaaaccaaccgtaacagctaaaaaaattatagaagaatttgggcaatcaaaagatttcattgaaggacaaatagttaaatatccaaattcgataaaacagtataaggaagaacttttactatcaccaccatccccactacctcacaatagttttgacgactcagcaaacgctataaagaacaacctgtcagatgacataaacaaattaaaatcctctatcaagagtagtaacaaagagctgtatgaagatagtattaagaagttacttttgactattttctacccctctcttttctatccaaccacttctattagtcatactgaaaattatagttttactctactgaatgagtcgcgtggaggattcttttttgatttctcaatctttgggattaaagcagagaaaattttaataaacgttattatgtccagtgataatctcaatgcagaatatttgaaaaaaataattcatgatatggataacattgaaacttcagtttgtttaatcgcctgctgcgtagcagacaataatactcttcatcaagatttaaaaaacattgccaaagataaaaataaatacattttcattatggatgaaaatatcattaatgatatgctaggtgaatacctaagaataggagagcaacatttcgaaatactcagaagaaaatttaaagaacttaattga

SEQ ID NO: 398219 - DNA, 309 bp, Salmonella enterica
atgaacaataacgatctggtcgccaaactgtggaaactgtgcgacaacctgcgcgacggcggcgtctcctatcaaaactacgtcaatgaactcgcctcgctgctgtttttgaaaatgtgtaaagagaccggccaggaagcggactacctgccggaaggctaccgctgggatgacctgaaatcgcgtattggtcaggatcagatgcagttctaccgtaacctgctggtacagttaggctctgatgagaaaaagctgggcaggcggtattccataatgtcagcaccaccattgagcaacccaaacagctga

SEQ ID NO: 398220 - DNA, 1023 bp, Salmonella enterica
atgtcatctcttgatgcatattttcgtgatgttactcatcacgaatttgttttagatacagcttttagaactcaaaagctagatgatgttgataaagacacttgcaattgtccaatacccgaacttcatgagcttgcacctttaattattgctcaaaaggatttctcatacccatatttatccaatactcttgttcttactctacaagatgctcagtactttcctcagggtagtagtaacccaacacacctatgcctcttgttcaacgcaacagacaggaacggttcaactacagtcctgaggaatccaaaacggaaaacaagaagaaaaatagaaccagatcataaggatggagaaggttacgagttctcttcccacatattaatttctctttcaggccttaaaagatcctacaaggcagtaataagccgcgcaccaaaaatttcaacaaacttaatagagttgttttttaacaaaattttattccagatatcacgaactaatacagaaattttctctattaatgcaaaaaccaatgccactgatacatctacaggtaaaactaaaaaagttttatacaaacccgtagccgaattacgtggaacattagatatagagctattcaataaaatgaacagtggcggcttgtcggaggttacgctgataagatatgacactgggacaatcaatgtccctgatatgaatggggtagtaattccaattgaaagcacaatgaaaatcaaaccagtacagcaatctaaagatgtaatttcctggctaaaaaatattggtggacattttaataaaaagacaaatggtaattacaaagacatcagagtcaaatattatgatgacaatagtaaaacgcgaactgtaacaatgcacactaataatataaaattagaatcacttgaaaaaacctttatcaaaagaagtgtaattgatggcttcagttcgcgcttaagcaactcatatgataatatagacgcagagattacaattaaactccatagcattttatga

SEQ ID NO: 398221 - DNA, 573 bp, Salmonella enterica
atgtacataatacatcaattatttagaccatttggatacctaagcataaaaggcgtcaatggaaaattcatatatgactggatgatcccattaattttatcacttttatcaatgggttacttctatggcctgaccacgccatccatttctttgagcaatgatggtttttttaaaaacaccatatcattcatttccattctgccggggttttacatcgctgctttagccgccatcgctacattcaatagaaagcaaatagatgatcctttaattagcgataatggcaccccttacatttatgtaaaaggggtaaaagagaatggaaaaccatatcgaacaaaagaggatatgacacgcagattattcctctgcatgttattttcctttctcactgctgaaagtattgttcttattatgttacataatttcgtgtcacctctaatatcgacagcaacaaatatttattgcttagcattttattcatttgttttcttactaattctttggcagctgttagtgaccactttttttggtctttactatctcggagatagaattcatctcaataactga

SEQ ID NO: 398222 - DNA, 123 bp, Salmonella enterica
atgttggaaatggtgcgggggtcattgatggagtgcccacaccatcccttatcgaatttacaatcagttattgagatgaattctatctccgagatagtaaagaccaaaaaaagtggtcactaa

SEQ ID NO: 398223 - DNA, 882 bp, Salmonella enterica
atggataaaactgattacatcctacgttcacttacgaaaacctcaaaaaaacgatgggaacattatgcagtaactcgcatttatcatcttttaaatgatcccgacattgaatttgtctgccagcaatgtgtcagaaaagaaaatggaaaaatctatttggcagatttatttttcccacaactggaactttatcttgaaattgatgaagggcatcacaacagtgagcaatcacaaatagatgatgcgaaacgtcgtatggatattactgaagttacaggatttttagagaaaagaattcccgccagcgaaataagtcttgaaattttcgatcgttatatcaatgaatttattgagttgatacgtaatcgtaaaaatagaatgattaaagataaaaaattcaaagaatgggattatgataataaatatacagctcgtcctcatcttaaggcaggaaggatatctgtaggtccagatgccgtcttcagataccaccgggatgctttgaactgtttcggttacaacaaaggacatcatcagtctggcggttggagcattccttctcacataagtgaagcaatgggtctatcaggaaaatgcatggtttggtttccaaaactatatggaaattcagattggggaaatgaattgactgatgatggtaacaaaatcatagagcggaatataaaagatgatgagggatacacagaacgctgggataaacgaattgttatggcacattctcgtgatgagttgaacaggacactgtaccgatttcttggggtgtttgaagctatccctggtcaccatactggcaacatattagagtttcatcgtgtaagtacatcggtcaatgtataccctcctaatgatgctgccccatga

SEQ ID NO: 398224 - DNA, 312 bp, Salmonella enterica
atgcctggatgtataagtgcctgttcgtgcgttgccagcccgatgcctcccgagcctaaggctccccctaagcccaggtggatagagttaaaaggttattgtgttacatgtactcatcaggaagatattcgtccacctaaagaggatgaaccaaagaaaagaataacagccaaggaattagtgatggcacgacgtcttttaaaagagatggggataacacaaaatccctggcaagacccgacagtaaaacccaataactgtgggttgccatttttcccggtagaatcgggagaacgagaaaccgatgtctga

SEQ ID NO: 398225 - DNA, 177 bp, Salmonella enterica
atgatgaaaaaagtactgtatggcatttttgccataaccgcgcttgcggcgggaagctcctccgccaccagcgttagcaccgtaagttcggcggtgggcgtcgcgttggcggcaaccggcggcggcgatggttccaataccggaaccacgaccaccacgaccaccagtacccagtag

SEQ ID NO: 398226 - DNA, 732 bp, Salmonella enterica
atgggaaacccaacttcgccaggaggccgcccagtgaaagagcgcggaatgatttttaacgcggagatggtgcgggcaattcttgacggcaggaagacgcagacgcggcgtcctatcaaatggaaacagacgcggttcactgaaattgccgaacgtgatgatggttcgctgtggccgtgggcggaggattgcgaacgcggcggtgatatctggtttgcgtgtccatttggtgaggtcggcgatcgcatctgggtacgcgagacgtgggcaaccctgggcaatgaagatggttgttgcgtggactgggacgacgaactttgcaaaggcgatgaaaaaagcgccgcgagaatttaccgcgccagttgtgagcagcgtcccggagattatgggttgtggtctataccagacgatgccgactggaagccacacactgaaaatcaaaaatttgaaggcgcgtggcgcccatcaatccacatgccgcgctgggcaagccgcataacgctggaaatcaccgacgttcgtgtggagcgcctgaacaatatcagtgagtgcgacgcaaaagcggagggcattaaacaggactggacctgcatcgatcctggtctgggtttatacgcccacaaaaacgacgttcaggatgattacgagacattgtggaaatccatctacggcgaagagtcctgggtggctaacccctgggtgtgggcgatcaccttcaggagggtcgaatga

SEQ ID NO: 398227 - DNA, 570 bp, Salmonella enterica
atgataaagcaatgtccatcattcccgggttattcagcaactgatgattgccgaatcatttcccatcgtaggcgcgggaaaggcaagcagcgcggttcagtatccttgattgagcccgacttcagctttgaattaaaacaatcgagttcgccgaagggatattttaacgtcagcatttcgtttgcatccgggaaggctagaacggttggagtgcatagacttgtagctgatgcttttcatggcccatgcccagtagggcttcaggtacgccatctaaacggtaattctaaagacaatcgtcctgaaaacctcaagtacggcacagctaaagaaaacgccgaagaccgcatgcgacacggtacatatctcggtggcagtaatcacccaggatcaaagcttaagggtggtcaagcagcacagattcgtcgtcgtagacgttgcggcgaaaaggttaaagacttagccgccgatttccaagtcagcacttcgactattgaatcaattatttacggcaggtcatataaacctgctgcagtcgagtttaaacgcgttgaaggcggtgcagcatga

SEQ ID NO: 398228 - DNA, 456 bp, Salmonella enterica
atgaacatcgacaaacaggcgctgcgtaaagtggcggagaaggctcaagctgcaagagccagacttgaatcttttccggatgaagatggcgttttattcgaagatgatgatatcaaaagcgatgtttccgcatgcaacaaattcttcgtcttagctacccccgccaccatgctggcgctactggatgagaatattcaactccagcgggaaaaagacgcgatcgaagccgtggcgctggcgctggcgctgcgtgatgatatgcgggatgcgcgcgaaaagttggaagccgcagaacaccgcatagcagaacaccgcaaggtgctaaatagccttgcagctgtagcccgtcgctacctgcctgattatgacgaacatcctgaaattcaggccgctgacgaattacttgagagcgctgctggcatcggcgtgaaggggggagtgagagatgaaaactaa

SEQ ID NO: 398229 - DNA, 729 bp, Salmonella enterica
atgactattaccaaagaacgcctgctcaaaattcagcattggcgcgaaatatatggagctggtagcaacgttatgctgccgacagaagaggcggcagagctggcgcgtatcgcgctggcatcactggaagtggcgccagttggtgaagtttcagagaagcggcgcggtcttgttatggatggaactgtagatcttggtggaaaatcaacttaccgcatcattaagggagaaaaagcgatgaagcggttgccgctgggaacgaagttttatatcgcaccgccagcgccggtagttgatgccgatcctgttgtgttcaccgacgaacgaaatcttcgtcatattgccagggaccgagaaacctctttgatttggggtaaacaaaaccaggaggtgggagatatcccgctctatcgtcacgccaagcccgcaccggtagtgccggaggaaataccaaaaggtctggctggtcaaattgtcagtctgctggctcataacattggcgataagtttttggctcagaaaatctggaacgcctgtcgcgctgccatgctccaggctggcaactctccggtaattccggattgttcattcgcagaattgtttaactcagctcgcgcattgcttgacgtgctctatgagtttggtggggatgaggtggccatctctgaatacgtcgcaaatcttgaagatgctttgcgagttgcggcagcacctcagcaggaggaatga

SEQ ID NO: 398230 - DNA, 270 bp, Salmonella enterica
atgtatcagcaaatgatttttgaagaaggaaaagagccaaggttgtattcaagccaacaagacatcaaggttatcccaataagtgataacaatggaaaagttcaagaggttcctgttatggagttcagggataccagaggagatgttttttatgcttacaactatgcttattctggtaaaaaaccatcaaatgacgaaatctataaggctattgatgagctaaagccaatcggtgaaaaattcgaaatatctaagactataagcgattag

SEQ ID NO: 398231 - DNA, 924 bp, Salmonella enterica
gtggtagccattctgattctgcaaaagctacacgtacttgtccaacgactatcagatgttgaggctgcgataggagctgatacccataaggaagttccagccgcatttgatagagagctacaacgtgtaacctctgaagtgtctaacgcaaccgagcgtttaaggtccatccagttaagtaagcgagccttaacgagcagatcgaaggaggcgcgtgagcaacagttttccaccaggcgtgctgagcgtttcatcggcaatatcgaatctgcgctagagttacatagaaaactaggaagcgatagtgaacttgtagaagaagtaaataatctcaaagaaatagtacagaacttggaaaaagagttacgtgaaaaagatatcgaattgcgtaaaaaccaagcattaagagttattaacactaaagcagggaatatccttcaaggtttagatgttgaagacccaaacgcacctatttctttagaaattaatgacctaacaatcaaagtattaggggatgagcgtgatgattatctttcggagataggaagtggctcaaattggctctcctatcatttggcagtattactctccctccatcaattttatttaagtcaaaaaaataatcctgtacctagttttcttattcttgatcaaccaagtcaggtctattttcctaaatctactcagcttcaaaacgttgctaatgaagatgaaccaaagcttcgtgatgaagatgttgaagctgttagacgggcatttgaaacaatgggtaacgtagtgattaaggaaaatgggaaacttcaactaatagttttagatcatgcaccacgcgaagtttggggagaaattgatggtgtcgttggattgccagaatggcgcgacggtattaaattggtcccgatggaatggttaactgatgcttaa

SEQ ID NO: 398232 - DNA, 135 bp, Salmonella enterica
atggccagaagaatggggaccttgtttaaaggtgatgataagaatagatgtatcctgacggatggggatgcctggctatataaattcatcggaatgcgttttgtttttattttgtttaatcggaatcgggtatag

SEQ ID NO: 398233 - DNA, 498 bp, Salmonella enterica
atgttggctactgtaagacatgagacttatgattacatcgatgtcgagtatttcagtgaaggctccgaaattgggagtgtaagttattttaacaagtatgatccagagcttgctagtactcaagaaaaaagaaatcgtgcaatagctaatggtaatactaatcagggtgatggttataagtatcgtgggcgtggttgtgtccacttgacatggaaaaataattataaaaaagctaaagagaaatttggtgtggattttgtaaataatccagatcttgctggtgacttcatttatgcggtgcctatcatggtttgggggatggaggaaggtatttttaccggcttgaagatatcatcctatattagggagggcaatattgattatgagaaagctagaaaggttattaacggaagtgatcagaaagagttaatcgcatcatacgctagaaagcttcaatctattatggaagaaacatcaactgcttctaaagagttttaa

SEQ ID NO: 398234 - DNA, 210 bp, Salmonella enterica
gtgaaaggcggggtttggtgggatactgataatctcatgttcagagtgaagttggcaggaaagcttgcattgggtgttggaattgactgggaagaagatatagaaataggcccctttactgaaaccccttggccagtattactgggtttggcaatttcaacatcaggtgttatattgaccggtaaaacaaatgtcatcattggtggataa

SEQ ID NO: 398235 - DNA, 330 bp, Salmonella enterica
atggacaaaccattcgcgctgaatctgaccgctctcctctcccggatactcctcgcatcccataaatccgaccggcgttccggcgctgactttccattcgtctgtttcttccaccgtttgtaccgagttaaaaacgcccttttccttcgctttctgcatccatgcaggcatcagcgcctggatttcaccgtccggctccatcagtgccggatccagcgtcacccagtactgcttattacctgcagtttccccttccagctgacgcaccagcccgaacgtggtcagggtagcctcgccgttttttatcacgtaaaaacgcccggtacgtga

SEQ ID NO: 398236 - DNA, 273 bp, Salmonella enterica
atgatggtgaggatgatgacgcggaagacggagaggataacggcgacggaggtgatgacggggccgggggcgggagaggcgatgattcaggtggttccggaggtgatgatgccggtgatgatgaagacgaacaggaaaaatatacccttcagtttcattttacggatgatgacggaataccgtattcagagacgcgctatatcgcctattttgaggatggcacggagacgcgtggagaaactgataaagaaggatatacagaaagatttatga

SEQ ID NO: 398237 - DNA, 360 bp, Salmonella enterica
atgaatgtcaaaaccaaaacaacatctgcgaccacatccaagaatactgataatacaaaaatgcagaaaattaccagaaaaaaagtcaggttgtttttctatgagggtgctagaaaagacacgcataataatacgtttttagatgcagctacgaacgtaaggagtgattataaaaaagataatcgtaaagatatagaaataaaaccactttatgagcataaaagtgcagaggatataattgagagaatagagatgaaggctaataactcaatcgagtcgattgatttttttctcatggaacccctgcggctctacgcttccaacgttctacctttggttttggtcaaggcttattcatga

SEQ ID NO: 398238 - DNA, 777 bp, Salmonella enterica
atgagtaaggtgccgccgtttgataagggtgaggcggtgtggcattttcatccggtggtgtttttggatgttataaaaggtaaatcaaaaataacacgacagatgctcagaagaatttgggctaatccaggaaatgtttctgattctgtccttgatgtagtagccgaagagttttcaaataaatttgaggaatgcagtattaataccaagaataggttgtatcatttttttgctcaaatatatcaagaagtggggccagcttttaatttaaatgaagggtttaattatagaccacaagtcttgatagataaattttcatactaccgtaaccattctcaaaatgcacaagtagatggatatattcccggaagacaagcagcaaataaacaaaatattgcaaatagggcatatggtggacgagagggaaacaatgatatagatagtggggatggatggcgttatcgtggaagaggaatgaaacaattgacatttaggaataactacagatcttttacagtttatcatgagaaggtttggggagaacatattgattttgaattaaatcctgactttttactggaaacaatatacgcagcaaggtctgctttatatttttgggatcataatagtttatatagtagagctgataatggtattagtcgagatgtatcggattcgataacacagattgttaatctttatgataatcattatgctgatagatataataatttagtgaggtttattcaggatggtgtttttgatgaaatactataa

SEQ ID NO: 398239 - DNA, 873 bp, Salmonella enterica
atggtgtttttgatgaaatactataaactaataatgttaacattattggtttttggtgattattcatattcaatggattttaaagtaactccttcagatagtcttgatggtgtcatctatttcacattgcatatagaagatgatcataaggtcagggatgttgacatagctctggaaggcaacgctaataatgttgctgtaaggcaatattataatttttcctgtggttggggcaacgcttttggtgttagattaggtatggactcagccacgaaagatggagtgttaatatttgataatatatatgcgttagatagtcaactaaatatattgtttgctaaatcatatagtcgcatagagaataaatggattgaccctattaatctgaatgcctcagtatgtaatcgtatgggtggggggataaaaaaagactctttaactaataaagattatattgtggattttgagtctattgaacaggggccattttatctaaaaggcgctggtaatattacaattaaatatattagaggcgattttttaaagcttgtacgtactgatgttaatggtgagagtatcattgatttaattagaaataataatgataaggcccctattgttcggacggttttttttatgaaaataaaatccgaaatgaatatcattagtttaatatcttggggggatataatgggagatggtggctattataaaacatatgcttatatatatgataagaatggcattgtacatgctaataaaatattgaatgaagatcctagtttatcaggttataactcagaaaaaaaaccatttgaatacacaaatgctagagctataaaagcttacattctcaaaaagtatggtttttaa

SEQ ID NO: 398240 - DNA, 720 bp, Salmonella enterica
atgagtgaggcgtcaccctttaataatgatgagccggtgtggcattctcatccggtggtctttttagatgttattgctgataaatccacagatgttattgaatttgaaacaactcttggaatatatagaatatctagaaaatcagcaaatttcatattgcaggaagaggggtataaggaatatccctatgttcctgagaatagtagcgctagtggggttactctgggatatgggtatgatttaggccaacaaacggtaggaagcatgagagctacaatttcagatttttatacagagcagcaactctcgcggttagagtcagttgttggtttatctggtcaggcagcacggaactccctgtctggaattattgatatcacgataaacaaagacgatgcaactattttagcaatgaaaatgaaatccacatatgtccaaactgttgtaaatacataccccgaagtattaaatacacatccccattgccagggggcgctgctttcattagtgattaatagaggtacatcatttactataccatctccagaagcaagaatagagatgaaaaacatacagatagatttttcccaaggtgaacttaatgacattcctacgcaaattagagcaatgaagagactttgggaaggaagaggtctgaatggtcttattaaacgaagcgaaggagaggcaaaactttttgaagaagggttagcacaatga

SEQ ID NO: 398241 - DNA, 450 bp, Salmonella enterica
atgaaagttataaatagattgctaattttaactgtattattttgtgtccccactatcctgcaggcagcagataactattttttatgtaatacatcgaaaggtactttgtcattaatagatattaataaccaattgatttatgaaatgaataatcagcatggcaataagtttcaatatgtctcaaaagcaccaagatattctggttttttatataatcattattctagattccagactaactattttaacattagttttatccagggtggatataagtacacgctttttagtaattacgagaatggtagtagtatgcgtggggtcagtgttattgatatgaaaacgaaaaaagagtatgtgtataattgtaatgattatagaatggataaactttctgatttggcaaagaagcttcaatgcgatactgataatgcattaggttgtcagtaa

SEQ ID NO: 398242 - DNA, 915 bp, Salmonella enterica
ttgcttaaaattctcctcgctggagaaatatccgaggagagtgagtttagtgcgaaaaataaagattttttcagtcaggaactcagtgcttataaacttttaaatgaatatttttctttaagaaatgaagagaagaatttaaaacttagagaggagaagatgatcgaagaaaaagacgatcttcacgatagggtacttcttttgaaaaggaaaggaaatctacttaaatcggctcgtgcgcctgaaatagagataataaataataaaacagaaataagtcaaattatatcccaaataaccacgggggagatcagtttactctcattacagaatgacattaaactggcaaacaataggtttcgtagtagcgttcttgaacaacttaataataatgccgaacaactggaacagttacgtagagagcgtcttgaaaatcgggggcaattggaactactaagaaacaaaattaaagctaatagcgttttatcaccgacgaatggtgtaatattaagcatcgagcgtagctttgagaaaggttcttatgttgaaaatgcgcaacctgtaatgacaatcaagaaaaataatgaaagtaaggtcattgatgctcgaattttagcaaaatacagaccttttatctttatgggcacaaccgcaaaaataacggtgaactcaccgggttataaaaaaacactctccggtgaaattacgagaataagcgctgattcgttcactgatgatgaaaaaaatggcgcagaacgttactataaagtagagataaaaccagatgataaagttatagttcctcctgaactagagggagtccaggttaatgtatatgcgcttagtaaaaaagttacgctgttaaattatattacagcgttagtcggcgataatattgtatttaatgtttggtaa

SEQ ID NO: 398243 - DNA, 567 bp, Salmonella enterica
atgacgaaagaaaatgatttttcttttccaagtatacaaaaagaaagcgttagagagcgtattaagcttcttatgagggggaggagtaagagcgctgtagctaagttgtggggactacctttctcaaccttaaataattattttgaaaaggatgcgattccatcactacaagtagctagccagatcgcagcggttgaaggtgtaactatagactggctagttttaggaacggagagccagcaaactcaaacccaacctctacaacagcagtcgcaacaatatgacgctgcaagagataaagatgtacaaataattctagctatttggcaaggcttagaacctaacgaacgaaagagtatcagtaagttattgtcgcgccgtggcggtgactttcttgctatcttgcttgataagcacatccaagagcttcatgagcttgatggtgttcgccgcctgcttgctttggagttaaaaaacataccagaagaaaaggttagagagatttacgaagaatacgaaactacaggtgatcacttcaatttaaccgacaagcaggctagcgcgtaa

SEQ ID NO: 398244 - DNA, 543 bp, Salmonella enterica
atgacagtagataacaaaatactgaaaggtgtaaacgcccttattagcgcctacgggaaactgacctgtggtgtgctggctgacaagctacaggtgctgccctcttcaatgatttatttcctgcgtgatgcagtggatgccggtgtgttgacggagtgtaacggcttttatgatatcccccgaccacgccagaacgctcgccctgaacgtgctgataagccatgccaggagcctgagccggtaaactggtgtgattttcgtaagtcgctaccctggattgagggtaacagcattccgtcactggtgaaggatttcgcaatgggcattctgacctgcgaaacgacgtatgttgtgattgaggttagcgaggagctgtgcaaagaaggtgtatcgcaatttacctttggttatatcgatgcccggctgggaagatttattgatggtatgagcggatgggagattacccgtcatgttctgcgttacctgattattgatcgttcccctgcgcctgagtacatccctgtatccgtggaggtggcgtaa

SEQ ID NO: 398245 - DNA, 522 bp, Salmonella enterica
atgttctttaaaacctcaaatcccgctacgctggccgcgtgggatcagtatcaattcgactgccagaaggtgcggacagaagccaaagaacttgaagctgcgctgggctgtggtggtcgcgcactgtttagagttgatgtggccggctgtcgctttcacggcatgtgtttccccgacaatctgcgcccgtttgcccgtgaactgtggacggtacagcgggctaccaccggctggagctgtgagccgagacggtcacgtattcccgcccatcttcgggaacaggcaaaggcgctggcggaactgtggcataacctgcggccagtaacgtatgctcgtaccgatgccctgttaccggcgctggggctggattttggtgtaacgctgttcgggccgctgcaatggtttcgtgtcggtgatgtgatttacgtcagtgcgggtataaaaccttctcacgatcgcatggttgagattctgtctgacgagttttatgcggctaaaaagcaggcggaggtgtccgtatga

SEQ ID NO: 398246 - DNA, 321 bp, Salmonella enterica
atgaagaaaattatcttattggtcttagccttatcgggtgttactacaacagcttttgctgaggggataacattaaatggaaaatatccggtttgcacttctgagtcagcctttaagcgcctgcaggccataatgactcataatgatgagaaatcctttgctaaaataatggcgaatgaatgttttatgcctaaagcgggtatagcagttgatgaagttgtgtctatgggatggactaatggcatagcgcaagtaaaagtttacaaagatggcgatctgtatgacctttggacaaatacggaaaatctgatggataagtaa

SEQ ID NO: 398247 - DNA, 426 bp, Salmonella enterica
atggccgaatgtcagccaggtttatttgctgatgatccggggttaaatgccctgattgaccagcttgatactgtcccggagtcggaggttaaacgacagtggccgcgtgcgctggccgggctggttgatatattcgaaagagagtttcgccgtcagggtatggatgagtcggaggcccgccgtctggcgcgtaacgccgttgttgcccaggcgggttatatgggtggtcgttcctggtatctgccgaccggcgaaaccctgtttgccgccctgcgtcatcacgagatcttcacacgctggcataatggcgaaaatattgaagcgttacgctgcgaataccggctgtcgcagacacagatttatgccatcatccgtgaacagcgccagttgcatgtgcgtcgtattcagccgccactcttcctttga

SEQ ID NO: 398248 - DNA, 735 bp, Salmonella enterica
atggcttttaaaatgagtaacgaagcgcagacaattaaagtatttaatcttcgttcagatacaaacgaatttatcggcgcaggcgatgcgtatattccgccgcacacaggactaccggcaaactgtactgatatcgcccctcctgatattcccaccagtcatattgtggtatttgacccggaaaatgaaacgtggagcctgcatgaagaccatcgcggcgaaacagtgtacgacacgcaaaccggcaacccgatttatatttcagaacccggcccactaccggaaaacaccaccacacaggctcccgcctcatctgtcgataaattcgaaaacggtaagtgggtggctgaccttgcgaccgcactcggccagaaatacgctgaggttaatgcgtggcgtaatgcgcaggaaaacggtaactatccgttcacactgaatgatcaccactgggactgcggtaaagcgtcgcaggaccgactgtcgccagtaacggcggtggcaaaacagggagcgctgccgccaggattcttttggacggatgcagataacatcgatgtgccaatgagcgcagacgaactgattaaactcgaagccgctatgcaactaaacatggtagcagtaggctttaaaatccacgaacgccagcgacagatgaaagaggacatttcaggattgaccaacgtcaacgatattttaaattatcccgtaggctggcctgataataacggcaattaa

SEQ ID NO: 398249 - DNA, 1011 bp, Salmonella enterica
atgcagtattccggcattcccgtaaacctcggtttaaaagaaaccctgaacccaaccaaacgcgtgagtattggtcgtccgggtgatggcgcttttgacggcagcacaccctgtataaatatcggtgacagtgacagtggattcatcggtagcgcggatggcgtactggatatttactgcaataacgccaaagtgggctatatcgataatgtcgggctgcacatgctcgcgggcatagcaactaatggcgacgttgtactgcaaggcgacgcacgcagacacatccttatccagaatgtggacggttcggtacgcgcttatatctataaggacaaagatgatactggtattcacatcaacaatggcgttgatggtgccggggattttgttttcggtaaagacagcatcctttacgtaccattcgcagtccgtgcaggcggcagtaagaagcttgctattcagtccgataacaattcagtattagacgccatgttcaatttatggggtagcgctgacaggcctaccgtgattgaactggatgacggtcagggatggcacctgtacagccagcgaaatactgacggttcaatcctgtttacggttaatggcgatattatggctaaccgtaaactgaatgttggcgcagctactgtatccaatgacggcaacattaacggttcgctatggggtggctggctgaatgactggcttaataacaatctcagccgaaaaaataccgccagtctcgcaaccaacggctggtttcgtgatgcgtcaaccggctggatatatcagtggggtattgttccgtttgccggaaccaccacgattaccgttaatcttccgatgccgtttccgcagcaagggtttgtagctctgggtgggcctgcggcagcgctctggtatggggaggacggtgcatccggtagcgctgcactgctgaataatagtcagttaagcgtgacaactgatacaagcctccccacagcctggatagcaataggaaattaa

SEQ ID NO: 398250 - DNA, 477 bp, Salmonella enterica
atgtcctcagcaggactgcggtttacgctgaaggtggacggtatccaggagatgtcgacggcggtggtgagcttcagtcttcaccagaaatattccattccgttcacgctggaggtagatattgccagcgggctgtttgacctgacggcggaggattttctggagaagaacgcggtgctgactatctggcagggggacaccccgcagcgttacgtcagcggtattgtgacgtcagtacagcccggggaaaacaatggctggcagatgcgttactggctgtcgataaatccgccgctgtggcgggcaggactgcggcagaacttccgtatcttccagcagcaggacatcaggacgatatcggcgacgctgctgaacgaggccggcatcgcggactggatgccgctgttctatgaggcgcacccggcgcgggagttctgcgtgcagtacggggagacagacctgggatcgggaaaatag

SEQ ID NO: 398251 - DNA, 360 bp, Salmonella enterica
atgtataatccgaaattatttgtatttaagactcgttgtgttcatataaatttatttacatacctggttatgtgtgcgctgatagtccccattatagcatcggcaaatacggaaacttatttttgtgatggcagtactaactccgagttaagatataataatacagttattttaaagaaatatgaagatggaaatcttgcatcaatacaagaagttaagagtaaaaaaataatgggctatatgaatcttggtggagaaatggtaatcgccgtgctcaggggtggtttaaaaatgggcgtgaggatggtgatttttttacatggtataaaaatggaagaagatatttttcagggagcatga

SEQ ID NO: 398252 - DNA, 1497 bp, Salmonella enterica
atggaagaaaacacaaggcagcgtacggaaaattatatttcagcaaaaaaccagcatcctgcctggatacttcttgccacccgccgttccccgctggtactgagttgtctgaaaacgctgtttgaaaaatcacatgatggtattccccttgaggaagcgattcagtctcttaccggcattcttgtcgagcatgtgagtcaggaacagtatgatattaatcaggataatccctctcttcaggccagtcgtgagctacgggaatggattaaacgccgtttaattgtcgaacgggatggacgcatcttcgccaccgatgcgcttgaggtcgcaattacgtttgttgagtcgctggataatcgtttcatgacctctacggcttctcgtttatccaccgtacagcgagaaattgaaaatctggaaacccggcttaatcctaatccggcaaaccgggtttcaaccttacgtcgtcgtattgccgaactggaacgtgaattacaggaggcggaagctggacatattgaggtgctggaagcgaatcaggcggttgaacatattcgtgaagtcttcaatctggcttccagcctgcgggctgactttcgtcgtgttgaagactcctggcgtgaggctgaccgcgcgcttcgccaatccattatcggcgaacaatatcatcgcggggatatagtagaacgcctgttgaacgatcaggacgcgctgcttaatacgcctgagggaagagtcttcgatagttttcagcaacagctccgccagtctgctgagttgacggcaatgagcgagcgactgcgcgtaatccttagccacccttcggcttccgatgcgcttaaccgtctacagcggcacgatctgcgctggttggttaaacgtcttgtggatgaatcgcaaaccgtacttcaggctcgcgcccgtagcgagagagatgtacgaggttttatgaaaaccggtcttgccgcagagcatcaccgtgttggtcatctgcttaacgaatttctgaatctggcgttaaagctcgactggcagcgccagacgatccgcaaacaagaggttccgctccccgccgttggcgtagcggtaacgggcattcctgtaattgaacgcttacgttttaaagaagtggatgatgaagcggaacagacgttggatctcagtaaccacgccgctgatttaacgcagattggcgatgatttctgggatgctttcaacggcctcgatcgtgaggcgttgattcagcagacgttgctgcttttggcaaaagaaaatcgccccattggcctggctgaactggcggtgctgttgccccctgttcacgatctggagacgttcgccgtctggattggcatggcgagagaagcgggcattgaggttattgattcacagcgcgaatttgctgaacttagtgatggggaaggtcgccgctggcgatttaatctgcccactaccggtctggaaagtcaggcattaatggatatcgattgggagtaa

SEQ ID NO: 398253 - DNA, 750 bp, Salmonella enterica
atggcgggtttttttgacagactgattaaccggagcgttgctgcaaatgcaggcagtgaaccagaaccatcggacgaagacgttaccgatgaggcggttgaagacagtgcggccagcagcgaaatgcgaacgctgaaaaaaatacgcgaagcgactcaggaattgctcaaatacggcctgctggaagaggccagtaaacctaatctgtaccgcgtcgtacttacccatcctgaagagcttactcgcattctggaacctctcgatctggatatcggcattgatgagatccgtggtctgctgtatgtcaaagtcaggcttgatgaaacgccagagcaggatgaatggtcccaccctctggtgagacggcaacggcttaacctggaacaatcattattagttgccatactgcgccagcattttgttgcctgggagcaggaaagcggaaccggcgccagccaggcgcagatcgctatcgacgatctccttcctcaattacagatctaccttggcgatccggggagcgaatcaaaagagcgcacccggttgcttaccttactggatcaattaaaggggcatgggctggtcacgtcgccggatgcgcatgagcgaatcgtgattcgtccgattattgctcaccttgccgacccgatgaatcttcaggcatcactggcatggctgcgggaacaaattgctcaacaaacctccccagatgattcgtcaaaaaaggagagtagtgaggaggacgtatga

SEQ ID NO: 398254 - DNA, 3288 bp, Salmonella enterica
atgaatcaaatagcgcgtctggatggaaaggaatcttttattctcacccgtatcgagttgttcaactggggtggttttcatggattgcatcaggcagcaatccatcaggaaggtactgccgttattggccctaccgggagcggaaaaacgacgctggtcgatgccttaatgacactgctttgcgccaacccccgctacaatctggcctcaaccggcggccatgaaagcgacagggaccttatctcttacgtgcgcggcgtttctggtcccggcgatggaggggaggggcaatcgcatatcgccagaccggggaaaaccgtgaccggcattgctgcaacgctggagcgtgaagggcagctggtacgtctgggggcgctgctgtggtttgactccaccagctccagcgtgacggatatgaaaaggctttggcttttcagcgataaccccgggcagacgctggagcactggttgaacgtttaccatgacggcggtacacgtttgctgcggcaaatggaaaaggaagtgaccggcatctggacatacccgaataaaaagcagtatctggcgcgcctgcgggatttcttcgaggtgggggaaaacgcgtttacgttgttaaatcgggcggcagggttaaaacagctaaacagcattgatgagattttccgcgagctggtgctggacgatcgctccgccttcgatcgcgcgacggaagtggccaatagttttgatggtctgactgaaattcatcaggaactggaaacggcgcgcaaacagcagcagtccttgcaacctgttgccctgagttgggataagtaccagaagcaagagcgacagcttgctgacacgaaggcgttggaatcgctgttacccatctggtttgcacaacaggcaagtcagctctggcgggaaaaggtcaatcaccttgacgtcgaacttggcgaggcagaggccagcgaagaacggttacagtcacagcttgagctgcaaaaaaaggtggttgctgattgcatgcagcgttattaccaggctggcggcgcaaatattgatgatttgaatgagcgcatcaatgactggcaaaaaacgcttggtagacgagaaactcaggcgcgccagtatcaacaactgatccgcaatcttggattgccgcctgacctgagccaaccacagctggaggtaaatcagcatgaagccgaggcccgatgtgagcagcttgccgatgatataaagctgaaacaggaagaggcgtatcaaaaaggcgcgctcagccatcgcattactgaagaacttcgggaacgggaaactgaacgcgccgagatcgcgcgtcgtccggattctaaccttcccgcacattatcaggcttttcgcagcgagctggcaaaagcgctaaacgttgatgagtctgaactgcctttcgtcgctgaactgattcaggttaaacaggaagaggcgcaatggcgcggtgcgattgagcgcgcagtcgggagtaacaggctgcgtattcttgttgcgcctgaatctgcacaggaagcgctgcgctgggtaaaccagcgtaacaaccgtctgcatgtgcggctactggaggtcaaattaccgcactctcccgcccggtttttcgacgatggctttactcgcaaactgttgtggaaagatcatccgtggcgggaagccgtcaaagcgttactggcagaaagcgacaggcattgtgttgatagccctgaacggctacgtgacacgcctcatgccatgacgatgcagggattaatgtctggtaaacagcgtttttatgacaagcaggatcagagacgtcttgatgaagactggctgacgggattcgataaccgcgatcgtctgaacttccttgctaaagaaattgctgcgcttcaggagcaggttaaaactgcaaacgaggcatttgagtttgcgaaaggcgaggtggggcttttgcaaaatcaggccatttcattccagaaaatacaacaaattgactacgatagcatcgatgttcccggcgcaaagagccaactggaagcgctcaaggaacggctggataatctgatccgcccggattctgacgccagcgtagcgaaagcaaaacttgatgaggctcaaacggttgaatctgaacttgataagcagctcagagttgccaataaagttactaacgggctggatacagaactcacctcagcccgggccgcagaacgtaaggcccagcaaaccgcgcaacaaggcatgcaggatgaagagcgagagttgtgcgcgtcacattttcctgcggtgactctggagcaactgcctgacattcgcgatctggaacgtcaacatgagcggggaattcagcaagaaattgaggggatcaaaggaaagctgaattcccttaacggagagcttatccgccgtatgtctgacgcgaaacgcgtggatactggcgcgctttctgaagcggggactgatttggacgatatccctgtctatttacagcgtttgcaggagctgaccgaagaagccctgccggaaaagctcaaccgtttcctggactatctgaaccgttcatccgacgacggcgtaacgcagttgctcagccatatcgatcatgaggtgctggtgattgaggcgcgcctcagcgaactcaatgaaactatgttcagggtggactttcagccgggccgctacctgcgtctggacaccaaaaaagtgatccatgaaagcctgcgcacgcttgagaaagcgcagcgtcagctaaatgccgcccggtttgttgatgataacggcgagagccattataaggccttacaggtgctggtggcgcaactgcgggatgcctgtgaacgaaatcgcacattgggggcgaaggcgctgctggatccccgttttcgtctggagttcgccgtatcggtgatggatcgccagagtggtaatgtgattgagtcgcgtactggctcgcagggcggtagcggtggagaaaaagagattatcgcgtcttacgtgctgaccgcatcacttagctacgcgctatgccctgcggggagtcgttatccgcttttcggcaccattgtccttgatgaagccttctcccgcagctctcatgccgtggcgggcaggattatcgccgcgcttagagagtttggcttacatgcggtatttatcaccccgaataaagagatgcgtctgctgcgtgaccatacccgttcggcaattgtcgtccaccggcgcggtcaggattcaaatatggcctccctgagctgggaagagcttgagcagcactaccagcggcgggagaaagcgtaa

SEQ ID NO: 398255 - DNA, 1149 bp, Salmonella enterica
atgcattctcctgacgaactgcgcaaaaagcttgcccgacaatgggataacgccaaatttcgggctgagcgtctgctcgcgcccggtagctggccgctctgtctgcccattggcaaaccttccgcgaaaatattcgcagagcagcctcagcgcgttttgcagcacgtgcagttatggcggcaagtcgcggttgggcgtgtggactgggaagaggtcagttatcgggcgagcgacggatcggtctcaatgccgctgcgctggatcctgaatggcccttctgactggatcagcgccgcagcggatcaagcggtgagccgggaattccgattgctggagggaattattgagcaggttgaccctatttttcatccgctgttggtcagtcatcgttcactctggcggcacaaaagcccgcaggacatcatcagcgccgccaggctggcctgccgattagagcccggttgcgcaaaagggctgccgttaaggctgctttccgggcaaggggtggataccaaatttatcgagaataatatttcattattaacccgactgctggacgtgcgtttttccggcgaagccagcgagcaggggttaaccacctttcttgatgcttttgatgagtccagccactgggttttggttgtgccattatcgcccggcttgcttccttttaaaaaatgccgggtaacgacggcagaactggcggaaatgacattgcccgcgtcgcgtgtgctggtgattgaaaatgaacagtgtctgcatcaacttccagcgttatctgacactaccgcgatcttagggtgcggccttgacgtgcaatggttatccagctctgttctggatgaaaaacgcgttgcctattggggggacatggatagctgggggctactgatgctggcgagagccaggtgctgtcgtcctacacttgatgttctgctcatgaatcgtgagttgtttgagcaatatgccagccatagcgccgttcctgaaccggtaaaggcacaggaagcaatacccgatggcttgcttaatgaagaggccgatttttatcgctatttgacccgcttaccgcgtggtcgtctggagcaggagtttttgcctgcggagatagttgaagaggcgctggttaggtggggaaaagagagttaa

SEQ ID NO: 398256 - DNA, 258 bp, Salmonella enterica
atgttgcctattcgtcttaaaactgctcgtttgcgggcaaatctcactcaagaaaagttgggcgtactggctggtattgaagaagccaccgctcgctcccgtatatcacagtatgaaagcggtatacatcgtccaacgtttgaaatgatgtgtgcatttgctaaggtacttaatgtgccagaatgttatttttatactatcgatgatagatttgccgaacatatactagatatctatgtaaaatggaaaaatatataa

SEQ ID NO: 398257 - DNA, 1215 bp, Salmonella enterica
atgctgcttacagaccttgccattcggcgctctaagccaaaagaaaagccctatacactcaacgatggcaatgggctttcgttactcattgagcctaacggttcgaaagggtggcgattgcgttacaggttctcagggaaagctaaattgatgtcgttgggtacgtacccgaacgtagcgcttgcagatgccagaacagccagggatgaggcaaaaaaacttattgctggtggcattgatccggcagaagtgaggaaagccaaaaaacgagagattgaaagtcggttcggaaatacctttgagggtatagcccgcgaatggtacgaaaagcgctttgacagatggtcgccgtcttacgctgaggaaatgatagagacctttgagaaggatgttttcccgtacattggtagcagaccagtagcagaaattaaaccgatggagttactggcagttttatcagttctcaacgacaggggggcaactgaaaaactacgtaaggttcgccagcgctgcggggaagtattccggtatgcggttataacaggacgcgcagaatataaccccgcacctgatttagtcagtgcttttgcaccgcataaaaaagaacattacgcctttctgaaaactgacgagttaccggaatttttccgcacgctgaacacttacaccggaagcatgatagttaaactggctataaggctgttaatactgacaggcgtaaggccgggggaattacggcaggcagaatggaaggagatcgattttgataatcgtctgtgggaagtgcctaaagaacgaatgaaaatgcgtcgcccgcattgtgtaccgttatcagatcagacaataaacatactggaacagttaaagccaatgacaggccactatcagtatattttcccaggtcgtattcaccacagtaagccaatgagtgaaatggcaatgaatgtgctcattcgtcgtattggctatgccgggcgcgttactggtcatggattccggcacaccatgagtacaattttacatgagcagggctataacaccgcgtggattgaaacgcagctcgcgcacgtcgataaaaactcaatccgtggaacgtataaccacgcgcaatacctggacggacgccgcgagatgcttcaatggtacgccgactacatggacgccttagaacacggtgaaaacgtagtacatggtaagtttggaaaacgcgcgtga

SEQ ID NO: 398258 - DNA, 378 bp, Salmonella enterica
atgatagatattactgaaatcataaaggagagagacaacgagtttattagtctgcgtgagttttttacacggattaagttacagaatccaaattatacggatgttgatattgccaaatttcttctttttttaaaaaaagaaggttcaataaggtttattgatagtaatggagaaaatgctttatatggttattcgattccttctcttgtaaaacaggatttttgcgggtttactaatactcattggagtagtgataatccaacccttacggatttattggaagatattttgcttaaaggaaaaatgccaaccaagccaatggttaaaaatccaatggttgaaacacctatggattttgaagatgatattccgttctga

SEQ ID NO: 398259 - DNA, 435 bp, Salmonella enterica
atgcattatagtgattatgatggatatggttttaaacgcgatgaattacaagaattagcagatgcaatgggagttgatctatatacacccattgaacttttgacagaaaaaaacaaggcagtatcaccagtaatcacagaagaaactaaaaataattataatagtgaagcgttaatactggagattgaaaaattaaaacaccgtattcaggaactggagaacgagcgccccatcttgttgaaggaataccgcgatgatgacccgctataccttgctatacagattaggaacagggaatgggcgaactatgatccaaaaaaagacccggcaaccaggggaaatcaggccgctatcaaacaagagttaaaggagcgaaatattagcgaaattgaagctactgctatagagaaggtggcatgtcctataaaacgttaa

SEQ ID NO: 398260 - DNA, 201 bp, Salmonella enterica
atgcaacaatcactcattcgcttaacagaagtccagcgccgaacaggttatagcaaggcgtggatttatcgccttatgagtaacagagaatttcccgcatctgtaaaactcggttcccgctcaattgcttttgttgaaagcgaggttgacgagtggatcgcagaacgtatcgcagcacgcgacaaaaaggcggcgcaataa

SEQ ID NO: 398261 - DNA, 801 bp, Salmonella enterica
atgaaacagaaaaataaccccattcaggggcgcggcctcctgcaccctgaacaaagtcaaaacgtaaatttcgcggaaattatcccggttatttccggcgttattggtggtagtgaaacaaatattgttagcgccagagcgttacataaggcactgggtgtgaaacgtgatttcaccaactggattaaagggcgcattgaggagtacggatttaaaaagggagtggattttgagcttgtcgaatatttgacctcacccaatccggcgagcgcaaaatctcgccagcagcttgctcatgattacttactcaccgtgaacatggcgaaagagctggcgatggttgaacgcaccgaacaaggccgcgccgttcgcctttacttcatcaggtgcgaggaggaactacacaaagcagcaccagaaaaggccgcagcattacgccgggaactgaaagcccgcattaccgtagccagttactttaagccgatgtgcgcgtcgctggacttgctacgggcagaacagggaaaaaccacacaaccttaccactacaccactgaagccaatatgttggcgcgtatcgtgctgggcggcatgactgccagacagtgggcgcaggcgaacggcatcacaggcgaaccacgcgaccacatgagcacgttgcagcttgaacacctttcttaccttgagcagagcaatatcacgctgattgagacaggccaggactaccgccagcggaaagcggaattaattcgcctttcgcagcgttggttagcccgtcgcatggaggaaaacagccatgtgtaa

SEQ ID NO: 398262 - DNA, 360 bp, Salmonella enterica
atgcgagtaatgacagtaaaagtgatgcctgtggacgctgcttttcgtctggccgcatcagatgcagcacgtgcaatgaatggtgatttcatcggggcaagcctgatattccccacggtagagcaactggctaaaacgatgctcacccctaatcgctggcagataatcaaggcaatggaagggaaaccggcaatgtcaattcgtgagctggcacgcactgtcaggcgtgattttcgcggtgtgtataacgatatacaggctttgctttccggcggcgtactgagccgggaagaaaataaaatcattctgccgtatgaccgtatacacattgaatttaattctgacgatgcagccgcataa

SEQ ID NO: 398263 - DNA, 282 bp, Salmonella enterica
atgcccgctgttgagttgatgaacacacggattcagattgctgataatgcctttgcgacaatccgtattttgcaggttacaccgcccgtaaaaggcagtatgcatgaatacaaatacagtctcgcttatgtcgtcgatgaagtgtgcgttatgcgttacgacaacgaacggggaaagggagaccataagcatattggtgaccgggaataccctgtaaccttcactaccatagaaaatttgataaccagcttcagggcggatattgaccagttgaggaggtaa

SEQ ID NO: 398264 - DNA, 306 bp, Salmonella enterica
atggcgactaccaacaaaaacgctaaatcacaattgaccaccgttcgagtcccccacgatgtcatggaaggcatggaatccgtaaaactggacggcgaaagcaacgccggattcatagtaaccgccatgcgcggggagatcgcccgccgccaggcagaaggaagcggagaaaaccccctggtatcgtcgctcgatgcgctggcgcaggtggaaaaaatcggagtcaaagccgccgaggagatcgggcaacttgtcaccgtcgctcgtgaagaactccagcgccgtaaggccaaagagcaggagtaa

SEQ ID NO: 398265 - DNA, 777 bp, Salmonella enterica
atgagaaataataacacgtggcgagaaaaggaaacgggcagtaactgccacttacaactggcagataaaaaccgtttgcagcaatcagtctgccgtatatacgttgaatatcgcgatccggtgatgaccgacgccggaagcatttatgatgtatgtcattcaatggcgtggtgtgtgctttttcgttatggttttggtcgcactttacaaagcgaaagagtaccccacgccgccagtaatggcacggtgtgtccctcttttggcttagcaggttctctgtcacttttcctgttacgtcgcacaccgtgccgccagtcaatggtgtcactggtcggggagtatttatactcgccggttaagccgttttccggtgttccagacccggccagtatcgccaccagccagacagtaaaaaaatccttgcgcacctgtaacggagtgggttacgttaattacgcacctcataaaacgggtgccgggcgtggaaacccgtgcaagctaaaggcgacaccagacgccgcaagcgtcttttttgttgtctgctatacgcgccattctatggcgtggtgtgcgtaccttatgacgaatagccctcaggcattcgatcacgcaaccgcacaccgcgtcgcccccataatggtgacgttggcggggctaccgaaaggtaggccggttccctttagcgccggtatttccacccccgttaacgtcaccgccctttttgagcgtggaaactcaggcggtgactccttaaccaagctaaaggaggccgcataa

SEQ ID NO: 398266 - DNA, 267 bp, Salmonella enterica
atggctactgcccctaccaaaaatccgctttttgtctggcgctttatttccggccagaactcaacgtatctcaccactaccgccatcagcgagcgtgaagcccgttcacagcttcccgccgttcgtctggtatttgccgcaaaaatccgtactgaaagcccgatgatgcatggctggaatgattatgacagtgaaacgatatggacgattatcggtagtaaagcatgtccacttccggccagtttttgtcaggaggtacgtccatga

SEQ ID NO: 398267 - DNA, 258 bp, Salmonella enterica
atggtagcagcgaacattaaccgcaaatcagcacatcagcagggggacgtatggcagcatacgctacaggactacaaagcacatatgaccggaaaaaaacagcagcaggccacgccggagcgcgataaaaccacgtcggcgcacaaggtgaagccctgtaacggtaaaacgccgcagaagcccaccagagaaccacagcaggcgaaaccaatgccagcgcaggaacgcgtaaggccggaagggatgagccgcaggtag

SEQ ID NO: 398268 - DNA, 321 bp, Salmonella enterica
atgcgccgcatactggcgttctggcctgaactgtttgacatggataatccgaagccgctgaaggttgggctactggatgacatacagcgggacattgccgcccgaagtctgactattggcgctggcgtactgaaagccgctattgccagctatacgcgccgtatccggtataaaaaagcgctggcggctggtggcgctcgctatgacctgaacgggcatccgtgcggagaggtgacgccggaacagcagcagaccgcagccggtgaactgaaaaaaacaaagcggacagtcaggaaagaggaaaacgggcatggtgagtga

SEQ ID NO: 398269 - DNA, 132 bp, Salmonella enterica
atgtttgttcaggctgattaccccgataaccgcctcacttttcactgtgaaaccctggcatatcctggcatggtgtcggtttcgtttccgtggaaattgcgcagtttttctgtatgcctgaagttttcttaa

SEQ ID NO: 398270 - DNA, 417 bp, Salmonella enterica
atggaaaaatcgaaccaacaatcaagatccgggtggggtggaaagcgtgccggagccggggcaccttacggtaacaccaatgctgtaaaacatggtgaacggagtcgacgggcatttttcccgatagagggggaagaacgtcgcccgccactggttaatctcagaatgcgtaaccttatgctggctgaatgtcaggggaaaataagccgtgaaggtctgtggcataacggtaaccagcgtgactggcgcgaaagtatgctcattgagggcgtgatgtggcagcacatcagaaaaatgatgcggcttgaactgatggcagcgcgggaggaaattgcaaaagcgaaatcaagtctggcagtggaatgcgcggcgctggcaaaagcgacggcggaacgtgatgcaatgctggcgttgtga

SEQ ID NO: 398271 - DNA, 585 bp, Salmonella enterica
atgcgtaataaaataatacttgccatggcggctgccggtatgatgtatggcgcttctgtatatgcagtcgatccgccaacaacaggcccgttcggctcaggtaaaattatcttcaccggcaccatcaccaattccccctgtgatatcgcgccgggtgacgatgctattgctgtgcaacttgggcaaatttcttatcgccacctgaaagctgctgatgatgtttcagactcaaaaccgttcactattcatctccagaactgtgcatttgatacggatgatgcaactagcaatccaaacccggttggcaaaatgtccaaagtcaccgtgtccttctccggtactgcggactcagcaaataaaggatacgtcaataccggcaaagcacagaacgtcgcagtccagttgctgaaaagcgacaaccatacaattatcgcgcccaacaccgtgatgggtgatgccgacgctcagcaactacaaaatggtaataacgaactttctttcttcgcccgcgttgtagcgctagctgcaggtgtaactccgggaactattgagagttctgtcacctacaccctgaaatacctgtga

SEQ ID NO: 398272 - DNA, 387 bp, Salmonella enterica
atggataacaaaaatggaaaattactggttcaggcaggtaaaagcgccctaaatattatcttaaaacagcccgcaaaaccactttacttacaaggggcttactgcctggcctgcgcgcgcctgttccaccggctgcctgccccagaagaactgttgataaaaaaagagggccagcatctgtttccagacggccctgagtggattgtgacacaacatggcaccttgctggcgctctcttattattcatgctggtgccatcgttatggcacaatcagagcatttttatttcgtcgcatcgttataaacttcggcaacggcttcaaaattcggaccatgctcacgcgcagcgataatatggtaatattttccgcctttcgcatctgctaa

SEQ ID NO: 398273 - DNA, 291 bp, Salmonella enterica
atgtttaattttaaagaaaatgttgcagattataccgaaaaagaatttatcgaacttcttgaggagatagtaaatgcaaccagcaaagataaatctctaaaagggaaaaaattagaaaaatatctcgataccttagtggatcatttcattaaaattacgggacatcctaaaaagggcgatctcatcttctatcctaatcccccagaagatggtgaacctgaaaaaatcataaaaatcgtcaaagaatggcggcgctcccagggactgccgttgttcaaagattcaaagtaa

SEQ ID NO: 398274 - DNA, 1119 bp, Salmonella enterica
gtgaaaaaaataaaacccttattactcttgccattagcatcatcagctttgttactgacctcactctgtaaccccgcatgggctgcaggctgccagtttgtgattagttcgtcagagagcaatttcgactacctaaccgatgtcacattaacgccttccgccgaggcgcaatcgtttcttcctgaccagaccaacctgataccaaaaaatcagaatcaaacggtgacctattggggaaaaaaccaaaacaatgtctcaaaaacaatcatttttaaaccagaatccactgccttcacagcggatgccagcaactcgaaagggtggctggtagacagctccgtacctgggctctattttacgctatccgttaatatgcccgcaccgaacggggtgacgtggggacagttcactccgccgatgcctatctatctatccaacgacagcagtattaatcaatcaaaacctaacaatggttcctggggatgcgccagtgaccgaaacgagaccaagcatcaagacggcaacatgactttttccctgagcttttacaccacctctatatttgaccccgcccaggccgcgggaaaacagcttctgaccactaaaaagcgggcagggacgctggaaaactcactggacaacggcggggaatttgatatttatctacaaggcccgctgaccatcgcggccgccgggtgtggcgcatttagcgctgagaaaaccgtggatttaggcgagatcccgctgaacacactcaaatctaaaccgaatgatgaacacaataaaacaccgttcgagataacgttaaaaaactgctatgccaaacccacgctgatcgttaacctcgccacgaacccgtcgactaataacttgctgagcaataatcagggcagtgccaaaggcgtaggcgtggggctgggatatatcacatcagcctcggccagccagcgtctggatttaagcaatcccaacaccgttgctgccagcgatctggagtacgccagtaattccagtgacggcattctgcatatgtacgccatccttggcgtaacggataaatcagccttatcggcaggctcggtatctattccgacggtgataaccctgacccacccttaa

SEQ ID NO: 398275 - DNA, 585 bp, Salmonella enterica
atgatgcgtttgcatagactcaccctctctgcattgatttcagggttggtgacaaccctgtttatcacgccgttgtatgccgatactgaagttgattttacggcgaatgtgctgaaagacacctgtcagcttgaaattgacggtaatggcgtggtcaatttagcaaccgtcgggccgagttactttgccgatggcgtcacagcggaaacagactacaagggcggcaaggaatttctgataaagctgataagctgcccggttagcgacggagaaatcactaacgtcacgttcaacttcttaccgcaaagcgggcagttcgccaccggtaatcagcaggtgtttgccaatgatttgacagtaagcgcagacggcgccgccaacgtaggagtggttatttttaccaccgggtcgccccgtacgaacgtcctgaatgccgatggcacctcgcgagcaacctttgccgcagcgacgtacagcgatgcctcatggacgttttatgcccgaatgcagagagtcctcagcaccgaagcggtggcccccggcaaactcagcagccgcgtgctggtgaatgtcagctaccagtga

SEQ ID NO: 398276 - DNA, 609 bp, Salmonella enterica
atgaaaaagcaattttttcgtgggttaatggttggcgcactggccaccgtcagtgcaggtatttcaacctttgcccaggcagacggcacacccagcctggatttgaccgttaacgccaacattacggcgggtacgtgttctgcatccgtcgtcggcaaagagggcgaaaccaatacgattggcttcggcaacgtctatatttccgaagttgctgcaaaaactaaaattgagacgtttacacttcgctttagcgattgcgcaggcttaagtgagaaaaaagcaacggtcgtacttgccccggcaggtgtgggatgcgcaggccctaatgctaaaaacgcagagtttgctaacaccactactcaaacgccgaaagcggagaaaacggcagtagaggtctggacgacagatgtcccggaaggcaccaatagcgtacagctccattgctctaataaaaatgcgcagactgtcgatcttgctggtgtcagcacaacaacgccggtggagttcccgttaagcgcacgtttagtaccagtcagcggctctggcatagccgcgatcaccgccggtgatttctattcacccacgactttcaccatcacttatcagtaa

SEQ ID NO: 398277 - DNA, 567 bp, Salmonella enterica
atgaaaaggaataaatgccttttggctgcctccgcgctcgcgatactactcccgctagccggacaggccgaagatctcaacgttgattttaccgccacggtactggcgacaacgtgcagtatgtccattgccgcactcgatggctccactatcaccggtgacgcaaccagcggttatacgctggatatgggtgatatcggtatggataaagtcatcaacaaatcggctgaatcgcagaaaaactttaagtttgtcgccagcgaatgcagtggttcgttaagcaaaatcaccactactctcgcaacctcctcttctgccagcggaaactacatcaaaaacgagtctgtcgacagcactgcggcgaccaatgtaggaatcggattcaaacagaaaagtactacaggtgaaagctggttaaagccaggttcaggaaaatttgactggaacgaggcgcaacgtaccgctaacgaggcagagatgaccgttgcgctacgtgagctgacagagggcgcgggcacgataggcccattcagcgcgaaagcgacctttaacttcacctatcaataa

SEQ ID NO: 398278 - DNA, 600 bp, Salmonella enterica
atgaaaaaagtactcctggcgacagccgtagtgatggctatgggttcaacgaccgcaatggcagaaactgaaggcggccgtattaattttgaaggcctggtcagcgcagaaacctgccagaaagtcgtcacctcttctgtcggcagcagcgaaactgacggtacggtgacgcttaacaccgcacatgtcagcgacatcactgcggaagttgccgataccaccgcaggcgcaaaagcagaagatttctccatcgctatcgattgcaccgacgccggtactagcccggctaaagcatctttgacactgtcctcttcctttagcaacacgaaaggcacgctggataacgacgaaacgctgagccgtaacggtgaagcggcggcgaaagcggttgatatcgccgtacaccgcgtagtcgacgataccaatgccctctcgctggtgaaaatcaacgatccggcgaatacgatggatgaaaacttcgtcaataaagtcgcgacctacaactttaaagcctcttacgtgaaatcgtcagatgcaggcgccgtagtgactacgggtccggtcaccaccaacgcgatttatacctttagctacgagtaa

SEQ ID NO: 398279 - DNA, 585 bp, Salmonella enterica
atgaataaaaagcttctgtcgatcatggtatttggggcaatgatttctgcagggaatatgtctgcaatggctgcaagtacaggtacagtgaatttctctgggcgtattgtcgcggatacctgcgaaattaatgttgatgattccggctcgaacacagtaatggtgactttcgcggacacctatccggcggattattcgggtgatggctcagtgggcaccagcaaggatttcaaaatcgaactgactaagtgtgaccctgcgatagccgggttaaacctgatgtttagtggcgatacatctgatgctaacaacctccgtctgcaaaatagcattgagggcaacactggggctgccagcaatgtcggtattactgtaaccagtaagaatggtactggcggtgccgttgtgtttgatggctcggtaccggataaaaacaccgatgtagctaatggtaataccggtgatgaaggtacggcaacgccgaccgtcttcaattatacggcaaacgtgattcagactggcgacatcgaaccgactgcgggtcagtacgccgcttctgctgacttcactgtgttctatcgttaa

SEQ ID NO: 398280 - DNA, 1002 bp, Salmonella enterica
atgaaaacgatgaagggatgcgcgggaaaatatctgctacctgcaggtttatcactatggttcatggtttctccctgtcaggcggattgtgtgtttaacaccggcagtgaatcaacgacaacgtttaatattcccgcactaaccgtgaatgaagatgcagagcctggtacggtcctgtatgagcaaacggtagttggcggaaagattgatgtacgttgtcatgatatttcaccgatttatcaggggtatacgcaactgaccagcagcgacaagcgggccgataacccgctgcctgaagtttatcagacgaatgtgcccggcattggtattcaggctgcatgggccaatactgcctctgcaacgctaaaaaagggcaacttgatcaccccctggcatacaggtacatcaaaaacggacaataccacctacgatcttgcgattaaagccggtctgcgcattgtcgttaccgggccggtgagttcgggcgtcgttgagacgtcgcgccttcaggcagactggagatatgacaatttagtgattggacaattacgtttctcccccatcaccgttaacgtgaaagccaatacctgtaatctgctggagcataatattacggtgccgctgcgcaatattatgatcagtgagatccacgatgggtattctgatgtggtgtccgatagccgctttaagatccaactggaacagtgcgatgcggggttgaaagttgattataagttcaccagcgcaggctcaaccggcgtcagtggcaacagcgatattctggccattgctgataacaacggggcggctcagggcgtgggattacaaatcctcgatagcgacaataacgtgatacagtttgaccgagaatacagcgtggcgacaaaaaccagtgacggtcagtctttcaccattcccttacaggcgcgctatatccagaccggtacggttaaagccggaaaagtggattccgtcgccacctttgaagtgttctatcgttag

SEQ ID NO: 398281 - DNA, 537 bp, Salmonella enterica
atgatttatccaaccagtaccggaaaaccgggcgaatattttcgactgaatacactggaaagcgtgtggattcagggaaaactccgtatgtggggacgatggtcatacatcggcagcggtaaacccggcaatatgtttaaccagttactggcctccagaaaactgacaaaaacagccatcaatgaggctttacgccgtctgaaaaaatcaggaacaagcaagccagagctggaggcctttcttcgtgaaatgatgaacgggaaacaaaaaagctggctggcgcattgtactgattccgaggccatgttgattgaccgcgtgattggtactgtattagctgagtatccggcgctgaaaaagttgattcaccagcgttacgaagggcggggaatgagtaagcgcaaaatggcagagcgattgcaggacgttaatccggaatggtgttttagcacatgtgagaagcgtatcgctcattggctgaagattgcggaatatatgctatatcgcccaatacatgatgcattttgttatacgtaa

SEQ ID NO: 398282 - DNA, 855 bp, Salmonella enterica
atggcttctaactggataaaggtcgaagttatcacacctgataaaccggaaatctaccatctggctgagcgtctttcgctcgatccggatgctgttctgggcaagttaatacggctttgggtgtgggctgaccagcagactatcgatggtaacgcaaactgtaacgctgtgagcgttacaaaaaacgcaatagaccgtatcacatttgcgactggttttgctgatgcgctgattagtgtcggctggcttacggaatgtgatggaaaactgtcgatccctaattttgaacgccataacggagaatcatcgaaaaaacgggcacttacaaataagcgcgttacaaaagtacgtgaaacatccagaaaatgtaacgctgtgagcgttacaaaaagcgatcaaaaagcgttaccagaggaagaggaagaggaagaaaaagaattaaaagatctaaccccacccaaaccctcccctgtcgggagggctgagatcgggggaggtgaacctgtgaaaaaaaatcgggatgaaaaattcaacccgctgaacgtcgaacttcccgactggcttccggccccgttgtgggctgaatgggtcaaatttcgccgtgcgctgggcaaacccgtgaaaacaccgcagggagcgacaggggctgtccggaagctggacgactaccgccagcaggggattttgccggaggtcgtgatccgccacagcatcgccaacgagtaccggggattgtttgcgccagattcaggatctggcaaaccgccgggaggccaccgtggccgcgacagaccttcgaggattcaggacttaccgccaccggacaacgtaattccaccaggtttcagggggtga

SEQ ID NO: 398283 - DNA, 456 bp, Salmonella enterica
atgagcgagaaaataacgctgaccgtttttaaagacagcccgcatatctgggctggcgggctggaagatcaagaactggccttatggctgattgctaaaggaaatatgctcctgggacttcaggaacgggaacgcgagcggaatgaagccagaacgcggtttatttcttatcaagccagactcccttttattcagggatacgcaaaccttggactatctcgcaaagagtgtgatcccattcgtcctctgtgcagggaattagtccggtacgatatgggacgttcttatgaatggcgtagtcccgctcagtttttacatggtcaggcaatcctggcagatccatatcttctcccagcgatgtcaggtcttcgtgaagaatcagcaaaatatgatcaaaggaaagctcacttatctgagctggtggccagtttgtgcgaacaaaaagcagatggttaa

SEQ ID NO: 398284 - DNA, 336 bp, Salmonella enterica
atgaaaagcaaaaaaccttctgaatctgtattacaggaactcgatgaattaaccaggcgtatgtttaatatttgcatgaaaaataacatggctatggttgctggttattcatacgagttaagcagaaacgaagatggctgggagtttgaaaaatacataagcgcatatatagatgaaaaagccggggcatataactcttccatagccgcagcagccatgttgctcaaagtgaaagacgtccccatggaggttattggtgcattgaagagcctgtctgttgccagtgattttgcgcgggcgatgtctgaggcctcaaaggaaaaaagcctgcattaa

SEQ ID NO: 398285 - DNA, 1398 bp, Salmonella enterica
atgatcgagttgcatcttagtcgcagtgctactgcgttaccgctatatgtgcagatagagcagcagataagctggcaagtcattcaggggcaacttaagaatggggaaggtctccctcccaccagagatctggcccgtcagttaggagtgtcgagggggagcgttgttcgcgcttatgagttgttgtgttcaaaagggtactgtcacagccagacaggaagagggaccatagtgtccttccgggctaaaccagcgcagtcatcccaggagcataatcaggtatccctgtcgccagccagtgatgaagtggaagcatttctacccggtagtctctcattgcttcccagccatgccagcaccgcgcatctgccggtaagtgagttccggcaggctttcaaccgcgtgctacgttatccggaccggctgaatcagttcggcgaaagcgccggtaatcaggaattgcgtcagcttatctgcgaaaagatacttccctcacgaggcatttccgcgtcgccatcagaagtgttgatagtccctggatcacagtatggaagcttgcttctcgctatggtgaagtgtcaggaacgatcctgctttcattttggtgccccaggatatatggagtttgcccggaactttgcccgctttggctatcagctacagtctcaccgaatggatagcgaaggtattgatgtgtctgactttagcggctcatcccgtgacatcctctatcttatgcctgaacaccattttccacagtgcatcacgctctctgataccagacgaagcgatattatccagctggcgtgccgaaagaacgtattgcttctggaagatgattatgacagcgaattctattttgaccgtgcccctcgtccggccttacgttgttctgctgccgaacaccatatcgtctatatgggcacgttttcaaaagttttatttaatactgtcaggttgggatacctggtggctgaagaatcgttggttaaacaaatggcagctctccactggaatttatcacgtggaacgagcgggttgttacagcagtgggtagcggagttgataaaaagcgggacttatgagcgacatattcgccgtatgcgaacggtttatcgtcataaacgggactgtgtcgcaagattagtggaacactatctgccagatgcctgtttatctgtgccacccggcggtttacagcttaatattcgtttttcagattcatcaaaggcgaaacgaataatagactggctgcgcgtaaataatattcaaatcgcagatccgcaaaactaccttttcagctctgacacaccgcccgattttctgatcctcggatttgctaattgtgacatttatgagcttgaagctgtacttgaaaggattagcagcactttataa

SEQ ID NO: 398286 - DNA, 978 bp, Salmonella enterica
gtgtctgaaaaatttcattctgtcagcttcgatttatattcagccgtcatgggtatcaccggtctgggactagtatggcgtgctgccgcgatgtcctggtctgtccccacatggccgggagaaacgttccttgcattgggtatgtctgtctttctcgtgctcacagtcattcaactgttgcgccttgttttctgccgacaggctattcttgcggagtggcattcccgcgccagtaaaaatttcttttgtgcggccaccatttcggggttcctgctggcaatggggttacttccttacagttttatgctggcgagagtgctttgggtgatagcggtatgcgcacagattctgtttctgctctgtacttttcgtcgctgggttattgatgaacttgaagcgcatgagatcagtccggtatggcttatcccgatggtgggaaatgcttcgcccgcatttgctggcattagcctgggatttccgggtttaagtaaaatgctattattctcagccattctttgctgggcattatttatgccgcttattctctggcgtattgtatttgttcgccccacgacaacacaaaaggcgatgccgggccttgcaatcatggtttctgctccagcggtaatggccgtcgccctgtactgcgtttatggtggcacaaacgatgctgtagagtttatggcatgggctgcattattttttgccattgtcctcgtcagtctctggagaagaatggtcccgaatacgtttagtcgggcatggtgggggttcacgttcccgtctaccgcgctggcctcagcgttaatcagggttgatggggcagtagcaacgcctctgaaccatacacttgcattggtagcggtggtgttggcctcatgtgtggtatgttccattatttgtcttacattaagacaaacgattatagcaaccatgagggaaaagcatgaaaaacgaatcggacagcgttttctatag

SEQ ID NO: 398287 - DNA, 747 bp, Salmonella enterica
atgaaaaacgaatcggacagcgttttctatagtccgctgtatgtcagggtttctgaatatctttttcatactggtaaacgtactgtctttaccagtattgctaaagcgataatagataaaatagaagatttcccacatgtgaatattgaagaacttgcgtcgtattgtaatacgacgccttcaagcataacaaagtttattcgggaaataggttacgggtcttttcaggagctaaaaaatgatacggctccatacagactgactcaccagggtataaaggggatgtctgaaaaggatatcttagaggaaatatataattacattccgcatgaaggatgtctggaaatggctaaaataatcaacggtagtcgttcgattattattttatccaattcctttctctttaatattgctaatgtgatgagggaaagtattagtagccgaaccaggaaagtttaccttgttgaacgctctaacgttgaacttatcaggcatcttctgaagcaggttgattgcgtttttattcttacgctcaccgggcagtggataaattcctgtccatatattagcagcatttctgatagaacaaatatctgcctcatatctggaggggtaccagccattttagatggtagaataaaagaaaccatcgacctcaacaaatatccacagatgctttatgcgaactatttttcgcataaatatcttgaaagcattgtgttcaatattgtgcaacatgtgatctag

SEQ ID NO: 398288 - DNA, 375 bp, Salmonella enterica
atgtctcaacaacaacagatagcgtcaataatttttgatttgggtggaagagaaaatattaaagattattttcattgtgctacccgtctacgttttaatctttacgattatgataaaataaacagagaagccctcaacgataaccctctgattctttctgtcgttcaggccagtgggcaatgtcagcttatcattggcaataaagtcggcgcagtctacagtgctctgcatgatatgctcgaaactggtggacgggatactacacaagaagcgcctgagacgactccgactaaagaatcagtaaccagtagaatttttgctttcatttctggaagtttcctgccattgattggcattctcgctgccgcaggttga

SEQ ID NO: 398289 - DNA, 864 bp, Salmonella enterica
atgccggtgtttcttggcgttacgattgcccggaaactaaaatcaaacgagctaattggttctattataggtgcttcattactttatcctgaatttaatcaactggctgggcaaaccttaaatgttgtgggtttgccacttatcgttatggattatggatacagtatttttccggtcttttttgccgtacctgtcgccgctattctggaacgattctttaaaaccaggctttatgattcaattcagctatttatggttccattgctatgcgttgtaattgttattccaattacaatgtttttacttgggccatttggcaaatatcttggggattaccttgcaacagctattgtttatattatcagcgtcaatagtcttgtggctggaatgattattggtgcagcatattcgttcattgttttattcgggctccattggactatcatccccgtagtcttttctaatattgcacatggtggcgaccctatctatgcaattggtgggatgtcagcgattgctcaaatgggggtggctttaggcattctgattagagcccgtgattcaaagacgcgtcaacttgcgagtagcgcctttttcccttcattgatcagtggcgtaaccgaacctattttatatggactcataattcccaaccgtcggactatttattacatcatcgtagcgggtgcggttggtggtggaattattggtggcagcaatatcactattaacaatcttgttttcgcaagcctgctttcaattccaacggcaagtaacatggtggtttatagcacggctttattcgccacactgattatcggcgcattattaccagttatttttggttataaatcaagaaattaa

SEQ ID NO: 398290 - DNA, 1443 bp, Salmonella enterica
atgagcacagaatcattgcaatttccgcaagatttcttatggggtggtgctattgctgccaaccaggcagaaggagcctggaacgtggatggcaaaggtattagtgttgctgacatcaatgaatatgttttcaatgaagacatgcgtaagatgtataacattgaactcacacgtgactacgctatccgcgcacaggacgattcagaaggaatatatcctaaacggaagggcattgatttctatcatacattccgtgaagatctggccctcgttaaagctgcgggtctaaaaacttttcgcacatctatcagctgggcccgtatcttccctaatggtgacgataccacgccaaatgaagcaggtttaaagttttacgatgagctgattagtgagataataaagaatgatatggtgcctctgattacattggcacattacgaaatgcctttgaatcttgcgattaaatacaatggatggaagaaccgtcagctagttgatttctatttcaaatttgccagagtatgccttgatcgttaccacgatcgggttaaatactggatacccttcaaccagataaacctcattcgctacgaatcctttaatcatctgggtatttttgaggatgaaggcatttatcttgaacaggacaaataccagggcgttcatcacgaactggttgcgtcagcgatggttaagcagtatgcctcattgcttggtgatgacattaagattggcatgatgttatatactgattttgcttaccctgaaacgacaagcccggaagataattttgcgacctggcagaaaaaccagtatgaactctactttgcagatgttctgttgcggggagaatatcctggctatatcaagcgcttcttcaaagaaaaaaatatcgctctggatattacagaagaagacaacgctattctgaaatatactgctgactttatgacattttcgtattacacaacttatgtcagtaatgcagagattgctcataacttcagaggtaataataagcgcaacccactgttatcccagaccccatggggatgggtgattgacccgataggtcttcggtatgtgctgaatttcttctgggaccgctggcaaaagcctatcatgattacagaaaatggcatcggctgttttgacgagttgattaacgataccgttgaagatgactatcgcattgcgtttttccgcgatcatattcgttccgttggcgaggctattgctgatggtgttgaagtccttgggtattatatgtggtccccgatagacatagtaagctgttcctctaatcagaggtcaaaacgctacggtctggtttatgtcaatctagatgatttaggccgtggtgataacagacgcatctgtaagaaaagctattactggtatcagaaattaattgccacaaacggacaatcgctcggagactaa

SEQ ID NO: 398291 - DNA, 504 bp, Salmonella enterica
gtgtggccacgtgactacgctatgcttgccagaagagtgcaatatttacgtttcaatgattaccctgttaagctggtaagctgtaatggtcagttttttatagggtatatcgcgaagtttaatcaaaaagagaatcttattctggcgtcaaatgaaccaaaggggcgtaagcgaatcgaaattcattttgagtcacttgcttctcttgaagaattatccactacgctgccttgtgttacccactttgtacctgcggaagtatttaatacacgaacaggtgaacctaccaggaaagattatttctcgatttgtaacaaatgctttaaacaaggcgtaggtattaaggtacatatgcttgatggccgtattcttacaggaaccacaacgggcgtaaatgcctgtcaggtcggtttgaaaaaatcaaatggtaatcatatacaaattatgtttgattgggtgcgtagaattacatcaatagattatatacagcaggtcaaccggtaa

SEQ ID NO: 398292 - DNA, 558 bp, Salmonella enterica
gtgttaattggctatgtgagagtatcaacaaatgaacaaaacaccgatttgcaacgcaaagccttgcaaagcgcaaattgtgagctcattttcgaagataaaatgagcggaatgaaagccagcagacccgggttaaaaaaagccttacagcacctggaagcgggagatacgcttatcgtctggaagctcgacaggctagggcgttcaatgcgaaatctggtgcttctgacagacgaactgcgcaaccgcggagtgcatttccggagtcttactgacgctattgatacctccacgccaatgggacgtttcttctttcatgtcatgggcgcgctggcagaaatggaacgtgaactgatcgttgagcgtacccgcgccggactcgccgccgctcgcgccagaggaagaatcggtggccgcccgccgaagttaaccactgagcaactggcacagataggccgtttgcttgctaaaggccattcccgaacggagctggcgcatatctacgatgtatcaagaaaaacgatttaccgccatttcccggcaaaggaacaaagttga

SEQ ID NO: 398293 - DNA, 1080 bp, Salmonella enterica
atgaagaaaattgctcatgttatagttttaccaaaaatggcaggctcacaaaagttttgccatgcgttactgtcaaaaattaatggctataaaaaatatatactagtttctggctgtgaaaatgttgatattgatcagaggcaagaatttataaatgcgtttgaatctatcaacgttgaaatcatttggtgctattatcttaaaaggaatatagggaaatcagatattagaggttttatagagctatatacaatttttaagaaataccaatttgatatagtccatactaattcaactaaaccaggtattttagccagaattgctgctcgtatgtctggcgtaaagaaaattgttcatacagttcatgggatttctttctacaagggacaaaatgttataaaaaggcttaataattattacctgaaatattataaaaaattcttttggaaaaaaaatataagtgtttttaatggttatgatttttccgagttactattgtatgcgaatagtaataatgttaaatgtaataataaaaaagataatgttttctcttttttatttgtgggaagactggatatacaaaaggatcctataacgctcataaaagctttctcaatattggcttcaaaatatccaaatataattttagatattgtgggtgatggagaactaatggaagcaagtaaagaactagcttgtgagctcggagtaaaagatttagtaagatttcatggttggatcaaaaaaccttattcgtatttttataattgtaatgcatttgtttgtccgtcattatatgaggcgtttggtttcatctttgtagaagcagcatattttagaaaacctataatagctactaatgttgaaggcatacctgaagtcgtactcaataataaaatgggttttttagtaagtccatctaattatcttgcattagctgaaaaaatggagatccttgtaaactctcgaagcttgtgtaaggttatgggagatttcggtagccgatatgttatcgagaatttcgatatccagaaatgcgtaaaagcgtatcaaagtatttatgataatgatttaaggtaa

SEQ ID NO: 398294 - DNA, 1986 bp, Salmonella enterica
atgggcaaccttatttatttaacgcttgagggtaatattcagggacagatttccgctggctgtagttcgcaggcatctgtaggcaaccgccatcagttgggacatgaaaatgcgatcttcgtattcagcctgacgcaggcggcaagcggctcacagagtggcatccaccaccacggcctgcatttttgcaaacttctggataaaagctctccgttacttagtaatgccattaatcataatgaacgcctgaaaatgatatttgatatttatcgtattaatcgatacgggcgcatggagaaatattacttaatcgaacttcgcggtgcgacggtacaggctatttctctacaatccaaaatgaatgatatggactatgaatatataacgatagattacgattatattctgtgtcgtcatttgatagccggaaccgaatttgattatctgctaacaccggataattacgcccatcttttcccggcggtacagaaaaccatactccctcgtgatccgccggagcgcaaggtaacgctggtgctggggatattcttcgacggcaccggcaacaacgcggtgaacacccggaacatgcttgaagccctcaccgcacagcactttgatatcaacgaccctgacgcagaaagcattctcacaagaaatgcctcggagaaaatgggggtcagcgggattggggccggcagctatctggggtattacacaaatattcactggttaaatgagttgtatgaacaaacgttttcgccagacggcggctatatacagggcgctgtctatgttgaaggtattggcacccgcgcaggcgagcccgacaacccgataggtctggggctgggcaccgcagagaccgggattattgccaaaaccgacgaggcggtagcgcaactggctaaagcgattgatgccacgcttgctttactgcaagggaagtttgttgtagataaactgttgttcgatatcttcggctttagccgcggtgcggcagcggcccgccactttgccaaccgtattcagtctgaagaccgcgcgattatcaacgccatttcagcaggcatgggcaaaattagctaccgtggcgcgcccgcaggtaaaacccgctttctcggtatcatggataccgtagcggccgtcggcacgctggcgaatggtctcgatccgcacagcgccgatactggcaatgtcaacatccacctgcgtcccggcgtagcacagaaagtttttcatctcaccgccctgcacgagtgccgctataacttcgcccttaacagcgtcgcccccgcctggccggaactggcactccctggcgtgcattccgatatcggcggcggatatctaccgcagctacgcgaagatctctttctcacccgcccgcaggtagacactctgccgcagaatcagtctggagcgcaatctcacatttacccgcagacaatggcgcagctacaggtgttggaacattcgcccacgatcatgcccattattcgtaccaatgcgatcaccccggaagtgtgggaagacgatttcgccccacctgatcgttacagtcagccgcaaaaacgtgcctttgccgccctgacgctgcgccatcgtatcgtcagtttcgactggtcaaaggtggcgctacgggtgatggtcgatgcggcgatagaagcaggtgcggtgtttaccgacatagaaaaaaccaaaaggcacgacttacctgatgaacttaagccgttctgtgaacacgcccgactgatgggcaaagcggctcgacaacatgtcgccgccaccggttttgcgcctgaagacataaatatcattgccgggaaatatattcattgctcagctcactggaacgcggtggaacttaagcaaagcggggagttacagggcggcgcttcagcgtcgaaaaccgtcagctttgtgaacaggccggacaaaaactggatacgaacaatttataacatggacggaaagaaacgatga

SEQ ID NO: 398295 - DNA, 690 bp, Salmonella enterica
atgtattcagctttgctagtgaataaaatatcatgttcagagaaaaatatgtctaaatataaaattggcaacaaagttcaagaagaaaactataatgtagtttttgaatcttgttttgaagtaccacgaaccgccataacatcaatttataacaaagttattcatggcattatcatggcaaactttccgggactatttacaggagagcagatcgtaaaacactttacttcccatcaaaatttaaccgctaatgatagtaccttagaaaattatggcaatatagatagtttaattaatgacgcaactattctgggaagaataatatctaaggaaatatttgatgcaagaaattcttgtgaaaatctggaccctggaacacattttataacctcatattatgaagatactggatattttacaggagaacgtgatttttatctttccactgggatattccagtacaggggaaaaggaaatattattgtgactgatagtcatcatacaagaaattatagcatgaacttagaatttattatttacgatagatataaacttgatacagactggttagatcatatccataaggatttttttaatgttcttaaccatataccaccttttgaaaattttagcctttacggaaaatacaagctggcaccgataaaatggagccaatctaagagaatataa

SEQ ID NO: 398296 - DNA, 285 bp, Salmonella enterica
atgccctcggctgccaagctcagcgataaaggtactcagcatgacggttattacgaaactgtcatcatcgcaggttcatcaactatatttattgacggatcaccagcagctcgtcaggaggatccactaacaccacacgctaaacccaaacacccacctcacccccgaaaaattgcaggagggtcagaaagtgtctttattgatggtttgcctgccgccagaacgggggatgcgattgactgtggtggtgtaatcatcggtaatagttcagtcaatattggctga

SEQ ID NO: 398297 - DNA, 753 bp, Salmonella enterica
atgaagcgtttcatttatttaaacaaacttaacttcaaaaaaatatcattaataatattagttataccaaactggttatcagcaaatgaattatccattatcaaatatggatatggaatgagagggtggaatggatatgaatatgaaaaagctcaactacatcccaagcaatggtacttaccaaattattctatagtgcgttttaaatcatttgaagtcgctaacactaatgagcaagcgttaaacggtttatatctctcattatcggtaaaaaaaaataataataatatacttgcaacactttcctttaagaatgaaaaatcttacccatattttattcggacaacatctctaccttatataccaacaaaaaataaaggaagcgcatctgatataaaactatgtaggatgcttttctttatatccacggctaatatctcattagattatttaggaagcatttgcgattatcgtagctcttttgaaaaagatgactggtataaactttctcctcacagtgaagtacattttcaaataatgcttaatgaatattattattttatgccgaatattaaaaactacatcattagaactactgatttcaccttcgtaaaacaagaatggtttattgaacaaaatataaatgaaaaaatttcatctttgattggggatggaaataaccaacatcaatatcatattccaccacatttaccaccgataaaaaaaattatatcccggaaagtaatcagttaa

SEQ ID NO: 398298 - DNA, 738 bp, Salmonella enterica
atgagtgataaaacgcacggtaaaccgtcaaaagaaatgatagtttttaaacaatgtaaaataaacgattttgatgcaatgataacagaaacattagaggctatggataaggtattaaatcaaagagagaaagatcttaaaacttggggaaacaaagaaaagaacgaattccatacaatatttggtatatggggtgatgaatttgttcatataaacatgcctgtaagaggagagcaacatcttgttaaaataagcgcaaagggtgtgatggaagattgtattaggcgaattaggtatgtgaaaagtacaatgaccattaaaagtttcattaacaaaattaatgaaccacgtgaagttagtgctaaagtaccaggggagccacagaaggactataaggttgaaattggtataaattttgtggggcggagaaaaaaagatagtaatgaaaagaaacgcatatgctcaaaacttaccggccatgactctcgggtgtctacactttgccacgaattaagccatatacccaaattttttacagaccctaatggtggaggaatggggacatcagattatgactctgaagggaataagcaatcgccctatcaagaagataatgatgactacaatgggcatgtgaaaggagctaataaattaattactgaaaataaatttgatcttgtttttgacaatgcttacaatattgaaagatactttgaaatagaaattaaaagcgagtga

SEQ ID NO: 398299 - DNA, 2307 bp, Salmonella enterica
atgtcactgaaaggacttcgtttcacgctggaagttgacgggcagagttccaccatcttcgtggtggtcagtttccgtctggtccagaaatattcactgcccttcatgctggaggtggatgtcgccagcgactccttccgccagcatgctgaagaactgcttgaaaaaaatgccaccctgaccctctggcagggcgcacaggcactgcgccgtatcagcggcgtgatttccacctttggcatgaaagagcacgacggctggcagatgcagtaccgcttcagaattcagccccctctctggcgctgtgccctgcggcagaactttcgcattttccagctgcaggatattcaggctatctctgacaccctgctgcgtgaaagcggcatcaccacctggacgccctgtttttacgaggaccaccctgcacgggaattctgcgtccagtacggagagtctgaccttgcattcctgacacgactgtggtccgaggaagggattttcttttttgaccggttctccccggagggagccgaccagaaaatgacgctctgcgataacgtcgccggactgtcccggcttccggcctccatagttttcaatccgaacacaaccacggaagtcaccacggagtgtatcagccagttccgttacgaagccaccgtcagcccctcttccgtaacgagccaggactacacgttcaaagtccccgactggcccggatattatgagcaggaagcagatagcctgaacggtcagtggacgcagtatgagatttttgattatccgggacgtttcaaggacgaacagcacggggaggatttcacccgctacaaaatagaaggctggcgcagcggggccgaaactgcactctgtgtcagtaattctcccaggttatggcccggcatccgctttaccctgtcagaccacccgatacctgcgcttaaccgcaactggcaggtggtgagcagcacgctggtaggcgtgcagcctcaggcccgccacggcagcgccggacaggggactctgctcaccaaccagttttccgttatcccggcagaacagacatggcgtccccgccccctgccaaagcccagagtggacggcccgcaaagcgcggtggtcaccggcccggcaggggaagagatcttctgtgatgagtatggccgggtgcggctgaagttcctgtgggaccgctatcatggcggcacagaggacagctcctgctggatacgggtgtcacaggcatgggccgggggcggatttggtcacctcgccattccccgcgtggggcaggaagtgattgttgattttctcaacggcgacccggatcagcctatcgtgacgggacgggcctaccacgaagataatccctcgccgggtgacctgccagccacccggacaaaaatgaccatccgctccaaaacctatcagggcgacgggtttaacgaactgaccttcgaagacgccacagatcaggagcaggtctatatccatgcgcagaagaacatggataccgaggtgctgaataaccgcaccaccgatgtgaaggtggatcacagcgaaaccatcggcaacaaccagagcattaccgtggggctgggccagacggtgacggtgggtaaggagaacgcaggcggtcacgatcagaaaatcactgtggcgcatgatcggcatgttacggtcgggaacgatcagcgcatcacggtgcagcacgatcatacgcaggaagtcacaaacgatcgcaccgtgtgcattggtcatgatacgtcgctgagcgtcgtgcgcaacagatgcgtgagcgttgaagggaagcaggagcaccgcaccacgaaagatcatatcagccaggtcggaggtaagcacagcctggaggtaaaaggtgatatggcacaaaaggtagccggtgcgctggggatccgcgttgagggcgatattgtccttcagagtgacagtaagatcagcctgaaggtgggcggctcatttgtggtgatacacgcgggaggtgtggatatcggggggccgaaaattaatcttaacagtggggggagtccaggtaatgccattcggccattacaactgacaaatcaggattctgataaatatcatcttcaatttcatttttttgataaagaacaagcaccatattcaaatatacgttatatcgcatattttgtagatggaactcaaatatatggagagacagatcagaatgggtataccgaaatatttacccaagataacgatgaagaaattgcaataaaacttatcaatcctgattttgatacatgttggggagaagaagaatga

SEQ ID NO: 398300 - DNA, 1833 bp, Salmonella enterica
atggcttttgaagagcgttattacctggaagagctggactatcttcgtcagatggggaaattaatggcaaaggaaaagccctggctggcccgtttcctggcggagaaggaaggtgatccggatgttgagcgcctgatggaggcttttgcacttctttccggtggactgcggcaaaaactggaggacggttttcctgaattcactcacgggatcatcaggatgctgtggcctaattatctgcgtccggttcccgcaatgacggtcattgaaaaccgtctcaaaagcaggctgaaaaagccggtacaggtttgccgcgatgcgttgatcagatcccgtacaacaacggggccattatccctgaaccggggaccgctgtctgactgccagtcaacgcgccctccggcctgccattttacgctggccagggatctctggttacagcctctgcatatccgggatatacgcaacaacagtacccttaaaaagggctgtattgagattgatttttttgcggacagcggtgtgtccccaaatgccctggatctgaataaactcagcttctggctgggtaatgacgacaactatacccggtatcagttatatctgtggtttagtgagtgtctgatggatgcggaattgatttccggggagtgtcgggtaccgctgccggatgtatggctggatccggccgggtttgagcgtgaggatgcactgctgccctggcctgaaagggtccacaatggctaccgggttctccatgaatatttttgctttccggaaagttttttcttcttccaccttcgtggggccgtgtcattgccggatgattttccgctcagtcattttacgctgcggctgcatttttgcgatcctctgcccgatgaggtcaaactggacaaccgttcgctgcgactttactgcacgcctgctgttaacctgtttatgcactctgctgagccgatccgacccgatggccgtgcgttgcagtatccgttgcttgccagccgccgacgcccggacgcgtatgatattttccgggtggcgtcggtgagcagccacactcaggcaccggaggaggtgtccgggaaaggtaaaaacagacagacatggcctgagtttgaaagttttgaccatcagaccgaattcagcggccagaggaaagtggtgtactggcagcaccggacaaaaacctcgctactccatcgcggcactgagcacaccgtcgctttcatacatgccgatggcaacccgccggatccttccctgacggaaaatgaagtcgttacgactgagctggtctgtaccaaccggatgttacctgaacaactgcatcccggcgatgtctgcgtcgccgtgggcaaaaatccggcagtggcctctttcagtaatgttacacatccgacatgttcactcaatccggtgaccgacgatgacaggctctggtcgctgatttcctgtatgaacctgaattatctttccctgctggagcgggaggcgctgattgagatcctgcgcacttttgacctgcccggtattcatcatccccaactggcccggctttcacgtgagaagctggatgcgatagagcgaatggaaacgaaaccggtggaccggctctttaagggcgtcccaataagagggctggtgaccacgctgtggatcaacccggccccgtttgtctgtgagggcgaggtatatctgctggggaccgtgctgtcagagttttttgcgctgtatgccagtaccggctcatatcaccacctgaaaattatcaatacggaaagccagaaatcatggatgtggcggaatagcggtcaacaccccctgatgtaa

SEQ ID NO: 398301 - DNA, 858 bp, Salmonella enterica
atggggattctggcgcaggagatgatgaagttggcgagacaggcaggcggcagccacaaaaccgttcacgatcgtatcgcactggcgcaacgtttttgtgagcgtctggtgatggcgcagaatgtgcagatccgccgggtggagcacctgaaagctcggcatattaaaagctatgtccgtgaacggctggcgcagggcattacaaagcgttcattacaaaatgagatggccgcgatccgcagcctgctgaaacaggccgggcgtgacaaactggcagacagtgagcggataagcaattgctcgctggggctgtccggtgcatcccgtaatggtacgaagctggctattacgccggatcattatcactatgtgctggagatggcccgcgcaaaagatccgggtctggcggcagcgctggaactctcccgtctgatggggctgcgttcgcaggaagcggtacagagtgcgcagtcgctgaagacatggcggcaggctctggagcgcgaagaaccccggttaacggtggtgtttggcaccaaaggcggacgtccgcgagaaaccgttgttcttgatgcagtggcggtcagaaaggcactcgataatgcgttatctgtttcagaagaccatcatgacaggttgctcgataaaccggatctcagaagtgcgatgaaatactggcacagccaggcgtcacgtattggtttgaggggcgtgttttccccccattcgttacgctatgcgtgggcgcaggatgcgatccgtcattatctggcgcagggattcagtgaaaaagaagcgctggcgatgacggtgatggatctgggacacgtcgacgggcgcggacggtatgtggcgtag

SEQ ID NO: 398302 - DNA, 858 bp, Salmonella enterica; identical to SEQ ID NO: 398301

SEQ ID NO: 398303 - DNA, 1833 bp, Salmonella enterica; identical to SEQ ID NO: 398300

SEQ ID NO: 398304 - DNA, 2307 bp, Salmonella enterica; identical to SEQ ID NO: 398299

SEQ ID NO: 398305 - DNA, 738 bp, Salmonella enterica; identical to SEQ ID NO: 398298

SEQ ID NO: 398306 - DNA, 753 bp, Salmonella enterica; identical to SEQ ID NO: 398297

SEQ ID NO: 398307 - DNA, 285 bp, Salmonella enterica; identical to SEQ ID NO: 398296

SEQ ID NO: 398308 - DNA, 690 bp, Salmonella enterica; identical to SEQ ID NO: 398295

SEQ ID NO: 398309 - DNA, 507 bp, Salmonella enterica
atgatctccgcccctgagcctctccatgccggacatatcctccccccgttttgctgcggcgtggattcgatggataactggctgaaacagcgggcgatgaaaaatcaggtcactggcgcatcacgtacctttgtatgttgcggcagcgattctaacgtactggcgtattactcgctggcgtccagcgcggtaacgacaaacactgcgcccggccgctttcgtcgtaatatgcccgatccgatccctgtagtggtgctgggacgtttggcggtagataaatcagtacacgggcagggcgtcggacgggcgctggtgagggatgccggactgcgggtgattcaggtggcggaaatcatcggcattcgtgggatgttggttcatgcactgtcagatgaagcgcgggcgttttacctacggatgggatttgaaccatcgccgatggatccgatgatgctgatggtaacgctgggggatttagtgggagtgtttaatttaaattttccctga

SEQ ID NO: 398310 - DNA, 294 bp, Salmonella enterica
atgccagccgcaaacagtatggcgatgaaacgcgaaaccctgaacctgcgcatcaagcccgccgagcgcgatcttatcgatcgggcggcgaaagccagggggaaaaaccgcactgattttgtgctggaggctgcccgcgctgctgccgaggaagcgctgattgagcaacgcatcattatggccgatccagaggcttatcaggcgtttctgacccgtctggatcaggctcccgccccaaacgccgcgttgcgtaaaaccatgcagacccccgcgccgtgggagcaggaaaaatga

SEQ ID NO: 398311 - DNA, 747 bp, Salmonella enterica
atgtttcaacataccactatcttactgcgtcccggcgcgctcatccggatggaaggagataacatgtcagccttatcaaatactggccataatgacgggatcactctccattgcttacagagcattgcgcaactcattcctctgtcgtcggcagttttttatcgtgttaatgattatttaaagccggaaggctatgttttacataatatttccaatggcacacaccaacaatatctggagcattttcaaccgttagacccgctatcgccttcccgattcggccaacaggttattacagtagcgacgatgacgcccggtatctgtgcccgtcatcgccattattatcacgaatttatgctacctaaccatgtgtgcgacatgattgagatctttattcgtcggggccatcgtattatcgcgggcatttcattaatgcgcgatatacctttttccagcgaagagcgtttgcgagcacaggcagtacaacccttactgggactggcgattcatgattctcttcagagagacaacgatctggcgtcaatattgaccgcaaaagagcgtgaaattgtgggaatggtctgcgaaggcgccagcaacaaattgattgcccgtcagttgaatatctctctctcaacagtgaaaacgcatttacgcaatatttttgctaaaacagaagtgataaatcgcacggaactggtttcccgaaccagaatgccctcggtacaacactcactgaatatgtga

SEQ ID NO: 398312 - DNA, 558 bp, Salmonella enterica
atgtcctccgtcccctggtttaagagcgcattaatgaacatggtgttacgtgatttgagcggctggcgttgtgaaaaattgaccgagcatagcgccgtgctgcatctgaatgcatttacccaggttatctgccatgttcagcaaaaacggttatttatggccagtattcacagttgtgaattcagggtgaaaggcgcaatcaattatcctttgcagggcaagattcgcgttcatcagcccggatggctgaaacgttatccagtcatttttactggcagtaaaagtaccgccgggctgattaactatcttaatcgtttccccaatttacaacaggctctgagtgaactggattatcgtcggtttactctggttttacatcacaaggaatggtattgcagcattgaactatgggctgctagcgaagtggtttgtaaaatgccgccgctgcgccgttatttgcggcttgagcggcaccagcgtgttcttctgctgagtgtgataaatatgatcaatcaggtcatgaatcaatggctgcaacaggataccgacgccagataa

SEQ ID NO: 398313 - DNA, 1500 bp, Salmonella enterica
atgtttaaaaacagacttgccagccatcttgaacgtggcgttattggtttccccacgacgcttgccagctccgttgggctgattatggcaagcccggtgatcctgaccgtgaccagtggttttggctcagggggggatacctttgcccttgcggtattattggcatttattatgatgcaagcgcaaattaccacctttgccgaagcggcaacgctcattcccacgactggctccgtctacgactatatttcctgcgggatggggcgttttttcgctatcaccggtgcgctttgcgcttatctgatcgtacacatttttgccggaacggcagaaacgattctcgctggcgtcatggcgctggtgaactttgagtctgttagcgaacacgtggccatgcagcacaatacctggatggttggcgtcggcatggtagtggttttcgggatactgaatgccattggtgttgaagtatttggcaaggtggaagtatttcttactttcggtatgtggactaccctgaccatcttcggtttatgcgggatcatgttatccccggtaactcatcattctgggtggtttggcgcaccgcttgatgtcagtaatctctctggtctgtttggttatattggcatggcgatgtttatgttcgtcggttgtgaactggtaacgccaatggcgccagaaattaaaaaagcgcatcgtacgattcccagagcgatggcgctaggtcttttagcggtggcaggttgtatgttcctctatggcgctgcgattaatcgtcaggtaaataatgtggtcgtcgatgcggcaaaccatatctttttactggatacgccgatggctattcccgccttcgccaatcgtgtcatgggacatgtcgggcaatactggctgggcgtaggtttgttgttagcgggatgtgcgacgattaatactctgatggcggcagttccacgtattatatacggcatggcgctggacggcgctttgccgcggtttctgacctggttgcacccccgctttaaaacaccggtcatcgccatcgctttcggtgttgcgattccctgtttacacgcctggtatctgaacggtgatatcgaccacattgttccgctgatcctcgctgcggtctgcgcctggggggtagcttatctgctggtaacgttatcggtcgttatcttacgtattcggcgtcccgatctaccacgcgcttaccgggctccctggtttcccttacctcagattatttcgagcgtggggattattatcgccattattaatattgcgcctccaggaatgaacagtcgggatgtacttatcccattcggtattatgcttggattgactgccgcttatgccttattctggacattatgtgtacaacgggttaatcctttcctcccgcttccggtagaagcggtcgtggaacgggcgatgggcaattatgaaaagcgaaacaatgaagagatgacgccagatgtcctccgtcccctggtttaa

SEQ ID NO: 398314 - DNA, 375 bp, Salmonella enterica
atgcacgcttttaaactcaatcaacctgttcctgaattacagccagtcgggagtgtcagcctgctgggggcgttaccaacagaaggcgatcctcaggtcgccgtcgcgatgatttacggtaaacctgaggatgtatttacctgtgggctgttttcatcgacccgcggcggtttcactatggtttatccctttactgaacatgcaaccgtgctggaaggggaagtggaactcactgtcgcgggtcaggagccgatacgtttttcaccgggcgacagttggtttgttgcgcaggggactgaagtggcatggaaagttttgacgccccgttttgtaaaacattatctggcaaaagttgaaaaccacaaacaggactga

SEQ ID NO: 398315 - DNA, 1302 bp, Salmonella enterica
atgaatacaaaaatcgatgcgttgaattactatggcgcgacgaaaaaatacccgttgtattttcctgctctgcaagaggatattgatgccgatgtggtgatcattggcggtggcttttcaggcatcaataccgcgctggaactggcggagcaggggatcaccaatgttgtcgttctggaagcccgacatcttgggtatggcggtaccggacgaaacggcggtcaggtgatggccggtataggtcacgacattgaagccgttaaaaaatatgtaggcgcagcgggaatggagacgctgtttaaaatctcgaacctcggcgcaggcattattcgggagcgaattcgtaagtaccatattgatgctgattttgtccccggatatggttatctggcctacaaccagcggcagttaaaaacgctgcaacaatgggaaaaagaattcaaagccgctacgccggaagacgatattgaactttataccggtaaagacgtgcagcaggttattggttccgacgtctactgcggtgttctcaagcatatggggggagggcatgtccactcgctgaatttattgctgggctccgctcaggcagcgaattcgctgggggtgaagatattcgaatattcacctgtggttgaggtcagttacggtaagacagtgcaggtacgtactgcgatgggcagcgtaaaagcggcaaaattgctgtgggcctgtgatagttttctcaataatctggaaccagaaatttataagaaaacgctggttacttattcttatcaggtctctacagaaccgctctccagtgagcttgttgagcggatcagtcccttgcgcggggcgttcagtgatatccgcccggttataaattactaccgtctcacaaaagaaaaccgcctgctgtttggcagcgccacaaggtttcttgaatataccccgcacgattttgctgcctggaaccgcgctctgttgacagaggtctttccttatttgaaagacgttaaaatcgattttgcgtggggcggaccgatggcctgtagcgcgaatctgtttccgcagattggcacgcttcgtgagcacaataatgttttttatgttcagggatattccggatttggcgtcacgccctcccatatcgtatgcaaaattctggccgaaggaataaatggcggttccgagcggtatcgtctgatgagtagcattccccacgcgacaatttatggtcgcgacagtctacgtctattactggtcagtgctggaaaactgatacatcaaacagccggtttctggaaaggccggaattaa

SEQ ID NO: 398316 - DNA, 1485 bp, Salmonella enterica
atgagcgacgtgacattacttgccgaagtaaccacttttttatgccagcgacatggacaatttattgcaggtgaacgtcaggccggaaacggcacgaacttttcggtcactaaccctgccaccggcaaaatcatcgccgacgttgtgtcggcaacccctgcgcaggcagaccaggccatgcagagcgccagacgggcgtttgatgtctggcgtgaaacgccaacgttacaacgcggcgcattactgctgaaactggctgatactcttgccgctcatcgtgaagagttagctcaactggaaagcgtgtgttcaggtaaaacgattatgctgtcgcgcggtcttgagctcgatcagtcagtggccttcctgcgttactttgccggttgggcaggaaaaataaccggtgaaacgctggatgtctcactgccatcaatgggagaagagagatacacagcgtttacccaacgccaacccattggcgtggtcgtcggtatcgtgccgtggaatttctcaattatgattgctatctggaagctggccgcagcgctggtatgtggctgcaccattgtcatcaaacctagtgaatataccccgctgacactgctgcgagtcgctgaactggctaaagaggcgggtttccctgatggcgtgattaacgtggtaaacggtgttggcggtgagatagcgcaacagctgatcgcgcatccagattgcgccaaagtcagtttcacagggtcagtggcgacaggtgagaaagtccggcgttcggcagtatcgtcaggaaaacgcgttaccctcgaactgggagggaaaaatgcggcgttgtttctcaatgatctcacggcccaagccatggtcaacggtattcttgaagccggttatctgaatcaaggacagatttgtgcggctgcagaacgtttttatctgccccaggagaaactggatacggtcatgacgctcctcagacaacggttatcggagatcgcgcccggctcgcctttagatgaaaaaacggtgatgggtcctctggcgaatcaggttcagtttgaaaaagtgctgcgtctgattcaactcgcacgggaagaaggggataccattgtttacggcggtgagactttacccggcgacgggtactttttacagccgacggcggtaaaagtgcgtagtaaaaacagtacgctgatgcacgaggaaacctttggccctgtctgtagttttatcggttatcagaatgaaaaagaggcgctttcgcatatcaacgcttcgccatttggccttgctgcaagtgtgtggtcggaaaatatttctaaggcattacgctacgctgaagatattgatgctggcatggtgtgggtcaatatgcataccttcctcgatccagcggtaccctttggagggatgaaaggatcgggtattggtcgtgaatttggcagcgcgtttattgatgactataccgaacttaaatctgtcatggtccgttattaa

SEQ ID NO: 398317 - DNA, 381 bp, Salmonella enterica
atgatgacgccaaccattccggtcgcgctattcgacaggctcttggttgagaggataagcccacatgaattggtacgccgcaagttgatgtgtttattcaactcttgcgctgtggcaggtggcgagacgttaccgccgctgctcactcggggtatgccggaatggcacgaggtaaatgtgggtgataaacgggttctcaactggttttgccgtgagcttcgcgctgctattttacgttatgaaccgagaatcaacatgctgagagtcagtgtgaaagatgcccatcatcagacgttggcgttgtctctggaagcgatgttacaggatgagcctgaaccgttaagaatggagatagcctactctaacggtagatggcgctag

SEQ ID NO: 398318 - DNA, 486 bp, Salmonella enterica
atggatgcgatttttttaaagctcgacaatatcaaaggcgaaagccaggttgaaggctttgaagatcagatagagatcatgtcttttagtcacaatgtggcaatgcaggtaagtaacgatgttagcctcgccgaacggacttccgggcgcgcgcatgttggtgaaatgtcgttcaccaaatttgtcgacctcgccacgcctgtgctcaatgagtgctgctgtagtggcaggctaattaaaaaagcggtgctgacgttgtgccgcaatgacgacggcaaaatgcggtcgcttatcgtctataacctgtcaaacgtggtgatatcacaccttagtgttagcggcgccgtcggcggtaagccggtggaaacgatgtcgctgaacttcacgaaaatcgaatggcaaattattacctgtcaatcagaaggcgctcagcaggaatccagattgtcagtatgggatctggcgatgaaccagatagggaaatga

SEQ ID NO: 398319 - DNA, 213 bp, Salmonella enterica; identical to SEQ ID NO: 393032

SEQ ID NO: 398320 - DNA, 879 bp, Salmonella enterica
atgacacgtaattttactgtttcagcctgtcagtatattgttactgaaataaacacttttgaagatttcataacaaaggtaagaatacttcttaataaaagtaagggtgctgatgtcgttatcttcccggagctatttaccattgagttatttacactattgaaaaaatggcaagaaagaccaatttcacaccttactttaattgatcagttcacggatgcctataagcagctttttcaacaggaagcgaaagaaagaggacagttcatcgttgctgggtctcatctggagcagaccggggcagatcgctatgagaatgttgcgcatatatggggacccgatggtgaacattacgcccacagtaagacgcatatcttcccggctgaacggggttggtatactcaggaaggcgataaaatggctgtttttcaactgccatttgcaaaggtgggttttaatatttgttatgaagcagaaataccggagtgtgccgcgacgttggcggaacagggtgtggagttaattttaacgccttccgccacgtttactgaacaggggttttggcgagtcaggcattgttgccactcacgttgtattgaaaatcaaatttatcttgttcactgttgcctgggcggaaacccgggcggaccactgcctggctgctgggcccgaagttcaattttaagcccctgtgatgtcgtgtggaaaaatccacaaggtattatcgcagaggcgcacgtcaataaagaggatgtcattgcaggagaaattaacctcgatcttctatatgaaaatagacttgagggtgcagcaacaacgttcaaggacagacgcagaaaagcaggcatatataatatctggccatcacacattaaataa

SEQ ID NO: 398321 - DNA, 1305 bp, Salmonella enterica
atgaagatgacaaaattaagatggtggattatcggcctggtctgcgtagggaccatcgtaaactacctgtcccgtagctcgcttagcgttgcggcgccagcgatgatgaaagaactccattttgatgagcaacaatattcctgggtggtgagcgccttccagctttgttacaccattgcgcagccgatcaccggctatttgatggatgtcatcggactgaaaatcggcttctttatctttgcgttgttgtggtcgctgattaacatggcgcacgcgctggccggcggctggataagcctggcatttctgcgtggtctgatggggctgaccgaagcgtcggcgattcctgccgggattaaagccagcgccgaatggttcccgacgaaagaacgtggtattgcggggggcttgtttaatatcggtacctcgattggcgcgatgctggcgccgccgctggtggtctgggcgatgctgacctttgctgatagcggcatcggtactgaaatggcgtttgtgattaccggtggtatcggcgtgttgttcgccatcacctggttcctgatttataactcgccaaacaaacacccgtggatcacccacaaagagctgcgttatatcgaagacggccaggaaagctatctccaggatgacaacaaaaaaccggccgttaaagagatcgttaaaaagcgtaatttctgggcgttggcgatcacccgttttctggctgacccggcatggggaacgctgagtttctggatgccgctgtatctgattaacgtgatgcatctgccgttaaaagagatcgccatgtttgcctggctgccgttcctggcggcggactttggctgcgttgcaggcggtttcctggcgaagttcttcatggaaaagatgcacatgactacgatcaatgcgcgtcgttgtagctttaccatcggcgctattttgatgatttcgatcggttttgtcagcattacgactaacccatacgtcgccattgcattgatgagtattggcggttttgcgcaccagacgctttctactgtcgtcattaccatgagcgctgacctgttcaagaaaaatgaggtcgcgacggttgccggtctggcaggatctgcggcatggctgggacagttaagctttaacctgtttatgggggcgttggtcgctattatcggttacggcccgttcttcattgcactcagtctgttcgatattatcggcgccatcattctgtgggtactgattaaagatccagaaaagcgccacccgccaatgacggagcagccgctggcgtctcaccgctaa

SEQ ID NO: 398322 - DNA, 1185 bp, Salmonella enterica
atgaaacaaacctggcgctggtacggacctaacgacccggtaacgctgtcagatgtacgccaggctggcgcaaccggcgtggtaacggcgttacaccatatcccgaatggagaaatttggtcggtagacgagatccagaaacgtaaagctatcgttgaagaggcgggactggagtggtctgtggtagagagcgtacctatccacgaagacatcaaaacccacaccggtcagtacgatttatggatcaaaaactaccagcaaacgctgcgtaacctggcgcaatgcggtatctacacggtttgctataactttatgccagtgctggactggacacgtacggatctggaatacgtattgccagatggttcaaaagcgttgcgttttgatcagattgaattcgccgcgttcgaactgcacatcctgaagcgtccgggagcagaagccgactatacggcagaagagatggctcaggcagatcagcgtttcgccaccatgagcgaggaagacaaagcgcgtctgacccgcaacattattgccggtttacctggcgcggaagaaggttatacgctggatcagttccgtcaacacctggcgacgtataaagatatcaataaagccaaactgcgtgaacatttcgcctatttcctgaaagccattattccggttgccgacgaggttggcgtgcgtatggccgttcaccctgacgatccgccgcgccctattctcggcctgccgcgcattgtctctaccattgaagacatgcaatggatggtggaaaccgttaatagcatggcgaacggtttcaccatgtgtaccggatcttacggcgtgcgcgccgacaacgatctggttgatatgatcaaacaatttggtccacgcatctactttacgcatctgcgctctacgctgcgcgaagagaatccgaagaccttccacgaggccgcccatttacacggcgatgtggatatgtatgaagtcgttaaagcgatcgtggaagaagagcaccgtcgtaaagccgaaggtagcgacgatctgatcccgatgcgcccggatcacggtcaccagatgctggacgatctgaagaagaaaacgaatccgggttattccgccattggccgtctgaaagggcttgcggaagttcgcggtgtcgaactggctatccagcgcgctttctttagcaaataa

SEQ ID NO: 398323 - DNA, 1473 bp, Salmonella enterica
atggaacagaatatcgccaccgcccaggtttccgtcgcccgcccaaactgggataaatcacgtctggtatcccgtattgtgcatctgggctgcggggcgtttcaccgcgcgcaccaggcgctctttacccatcatctactggaaaagagcgatagcgactggggcatttgtgaagtgaacctgatgccgggtaacgacgcgcggctgatcgcgaacctgaaagcgcaaaatctgctgtacaccgttgcagaacgcggcgcagaaagcaccgaactgaaaattatcggttcaatgaaagaagcgctgcaccctgaattcgacggtcatgcagggattctggcggcaatggcgcgcccggaaaccgcgatcgtctccttaaccgtgaccgaaaaaggctattgcaccgaccccgccagcggcgagcttgatgtcaataacccgctgatccaaaacgatcttgctcatccacagcagcctaaatccgccattggttatattgtcgaagcgctaaacatgcgccgggagcaaggactaaaagcttttaccgtgctgtcgtgcgataacgtgcgcgagaatggtcacgtcgcgaaggctgccgtcctcggtctggcgaaagctcgcgatgccgccctcgccgcatggattgccgacaatgtgaccttcccctgcaccatggttgaccgcattgttccggcagcgacagaagagacgctacaactggttgccgaccagttgggcgtttatgatccctgcgctatcgcctgcgaacccttccgccagtgggtcatcgaagataactttgtgaatggtcgcccggattgggacaccgtcggcgcgcagttcgttgcagacgtcgtaccgtttgaaatgatgaagctgcgtatgcttaacggcagtcactctttcctcgcctatctggggtatctcggtgggtatgacactatcgccgataccatgactaacccggcttaccgtcgcgcggcgctcgcgctgatgcttgatgaacaagcgccgacgttgtcaatgccggaaggcaccgatctggaaggatatgcgaatttattgattgcgcgtttcactaacccctcgttgaaacaccgcacctggcagatcgcgatggatggtagtcagaaactgccgcagcgtctgttggacccggtacgtctgcacttgcaacagggagatgactatcgccgcctgacgctgggcgtcgccggatggatgcgttacgtcggcggtgtggatgaacaaggtaaaaccatcgatgtcgtcgatccgctgctcgcgcagtatcaggcgattcatcagcaatatcagacaccagaagaacgcgttcgcggattactagccatcgagtctatctttggcaacgatctgccgaagaaccgcgaatttgtgcaagccgttaccgacgcttaccaacagctattgcagaacggcgcgaaggccacggtagaagcgctggctaagtaa

SEQ ID NO: 398324 - DNA, 1413 bp, Salmonella enterica
atggctacgtttatgactgaagattttctacttaaaaacgacattgcccgcacgctgtaccataaatacgccgcgcccatgccgatttatgacttccactgccatttaagcccgcaggaaatcgccgacgatcgccgtttcgataacctcggtcagatctggctggaaggcgaccactataaatggcgcgcactacgaagcgcaggcgtggatgagtcgctgatcaccggcaaagagaccagcgattatgaaaaatatatggcctgggccaataccgtaccgaaaacgctgggtaatccgctgtatcactggacgcaccttgagctacgccgtccatttggcattacaggtacgctgttcggaccggataccgcggaaagtatctggacgcagtgtaatgagaaactggcgacgccggccttttccgcgcgcggtattatgcagcagatgaatgtacggatggtcggaacaaccgacgacccgatagattctctggcatatcaccgccagatagccgccgacgacagcattgatattgaagtcgcgccaagctggcgccccgacaaagctttcaaaatcgaactggacggctttgtcgattatctggggaaactggaagcggcggcagatgtcagcattacccgtttcgacgatttacgtcaggcgctcactcgccgtctcgaccatttcgccgcctgcggctgccgcgcgtccgatcatggcattgaaacgctgcgatttgcaccagtgcccgacgacgctcagcttgacgccattctgggcaaacgtctggctggcgaaacgctgagcgaacttgagatcgcccagtttaccacggcggtgctggtctggctgggccgtcagtacgccgcgcgcggctgggtgatgcagctacatattggcgcgatccgtaacaataatacccgtatgttccgactgctgggaccggataccggctttgactccattggcgataataatattagctgggcgctctcccgtttgctcgacagtatggatgtgaccaatgaactgcccaagactatcctctattgcctgaacccacgtgataacgaggtcctggcgaccatgatcggtaacttccaggggccgggaattgccggaaaagtgcagtttggttccggctggtggtttaacgatcagaaagacgggatgctgcgccaactggagcaactgtcgcagatgggactgttaagtcagtttgtcgggatgctgaccgactcccgcagtttcctttcttatacgcgacatgaatatttccgtcgtattctctgtaacctgctgggacagtgggcgcaggacggagagattcctgatgatgaagcgatgctaagccgtatggttcaggatatctgcttcaataatgcccagcgttatttcgcgataaaataa

SEQ ID NO: 398325 - DNA, 1065 bp, Salmonella enterica
atgtttaaaaaagtattaagcttgcgccactggaataataatgttgtaaaaataccgccgccagcagaatccggcgctaatgcgtctgacgtggtggtggatcctcctgagccttatgagcggatactgtgccaaaaaattctgatggggatctcgacgatcgatatcattcgtaatgccatcatcaagtcctgtgagcagctaaacattgaaaaagaacgcattaatgaacttaacgaacagaatgataaagccagaagttcattaaaatcgctcgtggaattcatcactgaaattggcacgacttcatcggatattggctgtcgtatgggcgacttaaatacctccttaacgcaaattaatgcgtgtattaaagagatacagaagatcgctaaccagaccaacctgatagcgattaactccgcgatcgaggccgcgcgtgtaggggatgccgggcgtggttttagcgttatttcgaaagaggtgaaaaacctgtccgaagatgttaagcacagttcgaaaagcgtcagtacgttaacctctgtaatcaaagagaatacggccagagtgagtgaggtgctggataaccagcagccagttattgataacattacgactaacataaatcaaattgtggagtctattggcatcgtcatcgataaatcgctgagcatgaaatcggtcatgcagtacatttctacggtgcagtttttgaatattgtcaaagttgatcatgttatctggaaaatggaagtctacaaattactcttaaataaagacataaacagtaaaataacaatgcacgatcagtgtcggctggggaaatggtactacggttttgaaggtcagcagtttagcaattactacagtttccgtagtctggaagcgccgcataaagaggtacataccgctggtcactctgcgctgaactattttgccgcaggcgatatgaatgcgatgtcgcaagaactcgacagaatggagcgttccagtaatgaggttgttaaccagctggaaatgctggctgtcgatttattaaaagaaaccgcaccggcaagccattag

SEQ ID NO: 398326 - DNA, 1857 bp, Salmonella enterica
atgagcaaaggaaccaccagtcaggatgcccccttcgggacattattaggttacgcccccggcggcgtagcgatctactcttcagattacagttccctcgatccgcgggacgacgacgacgcagcttttcgtagctacatcgacgatgaatacatggggcataaatggcagtgcgtggaatttgcccgccgttttctctttctgaattatggcgttgtttttactgacgtcggcatggcctgggaaatcttctcgctgcgttttctgcgcgaggtcgtgaatgacaatattttgccattgcaggccttcccgaatggttcgccgcgcgcgccggaggccggggcgctgctcatctggcaaaagggcggcgagtttaacgaaaccggtcacgtcgcgattatcacccaactcctggataacaaaattcgtattgctgagcaaaacgttatccacacgccattgccgccagggcagcagtggactcgcgaactggaaatggtagtcgaaaacgggtgttacaccctgcgcgacacctttgacgacacgacgattttaggctggatgatccagaccgatgacacgcaatacagtttgtcacagcctgacatcgctaatcagtcgctggcgattcgcggcgcaaggctgccagagaaaggtcagtttgacggtccgtggctggatgagcgcgatccgttacaaaaagcctatgtacaggcgaacggacacgttatcaatcaggacccgtaccagtattttacgatcacagagagcgccgaacaggaacttatcaaagcgaccaatgagttgcatttgatgtacctgcacgccacagacaaagttttaaaagacgataatctgctggcgctattcgatatccccaaaattctttggccgcgcctgcgtctctcctggcagcgccgtcgtcaccatatgatcaccggtcgtatggatttctgcatggatgaacgtgggctgaaagtctatgaatacaatgccgattccgcatcatgccataccgaagcgggattaattctcgaaaaatgggctgagcggggctataccggtaaagggcataacccggcggagggcttaattaacgagctggcaggcgcctggaaacacagtaaagcgcgtcctttcgtccatatcatgcaggatgatgatatcgaggaggactatcacgcgcagtttatgcagcaggcgctgcatcaggccggtttcgcgagcaaaattcttcgcgggctgggcgaattgcgctgggatgacgccgggcagttgatcgatggcgacggacggctggttaattgtgtctggaaaacctgggcgtgggaaacggcgatggagcagatacgcgaagtcagcgagacggagtacgccgcagtgcctattcgtaccggacacccggaaaatgaagtccggctgattgatgtattactgcgcccggaagtgctggtgtttgaaccgctgtggacggtgatcccgggtaacaaagcgattctgcccatcctgtggtcgctcttcccgcatcatcgctatctgctcgacacggattttaccgttaacgatgagctggtgcagaccggctatgcggtaaaaccgattgccggacgttgcggtagtaatattgatctggtgagccatcaggaagagctactggataaaaccagcggtaagttcgccacgcagaaaaatatctatcagcagttgtggtgcctgccgaaggtcgccgggaagtatattcaggtctgtacgtttaccgtgggcggtaactacggcggtacgtgcctgcgcggcgatgattcattagtcattaaaaaagagagcgatattgaaccgttaatcgtcatcaaagcgtaa

SEQ ID NO: 398327 - DNA, 867 bp, Salmonella enterica
atggcagataatacttatcaacccgcaaaagtctggacgtgggataaatccggcggcggcgcgttcgctaacattaatcgcccgatttccggcccgacgcacgacaaaacgctgcccgtcggcaaacatccgttacagctctattcgctgggaacgcctaacggccaaaaagtgaccattatgctggaagagctcctggcgctgggcgtgaccggagccgaatatgacgcctggttgattcgcatcggcgagggcgatcagttctccagcggctttgttgacatcaatccgaactcaaaaatcccggcgctgcgcgataactcacacaacccgccgattcgggtttttgagtcgggcgcgattcttgtttatctggcggataagtttggccatttcctgccgcaggatctggctaagcgtacagaaactcttaactggttgttctggctacagggcgcggcgccgttcctcggcggcggtttcggccatttctatcattatgcgccggtaaaaattgagtacgccattaatcgcttcaccatggaagccaagcgtctgctggacgtgctggataagcagttagctcacaacccgtatgtcgcgggagaggagtacaccattgccgatatggccatctggccgtggtttggcaacgtggcgctgggaaatgtctatgatgcagcggagttcctggatgccggaagttatcaaaacgtgcagcgctgggcgaaacaggtagccgaacgtccggcggtaaagcgggggcgcatcgtcaaccggaccagcggaccgttgaacgaacagcttcacgaacgccatgacggtagtgattttgataccaataccgaagacaaacgtcagcgttaa

SEQ ID NO: 398328 - DNA, 681 bp, Salmonella enterica
atgcgaatactggctgcggggagcttgcgcgccgtctggccgcagctaatggcggcatttcagatggatgctatatgtgatttcggtccggcggggctgttacgtgaacgcatcgaagcgggcgaagcgtgcgacttttttgcttcggcgaacctggcgcatccgcaggcgctgctggagagcgggcgggcgctgcgggtcgcgccttttacaacgaaccgtttgtgtctgagcgtgcgagcgcaggcgatgcgtgaaggcgaggactggctgtcgctattaacccggcgggatctgcggatcggcacatcaacagcaggttgcgatccttccggggattatacgcagcagcttttttcgcggatgggcaacgagggcgaagcggtccgaaaacgcgcagtagcgctggttggcggcagacagacgttgccgttaccgacggggcggatggcggcggaatggctcatcaatcatgattacaccgatatctttatcggctatgccagctatgctcccaggctgcggcgggttaattcgctgcgagtggttgatatcccggaaccttataatcccgtggctgaatatggctttgcctgcctgagcgagcagggaaaaacgcttgccgactttttgctgtcaccgcgagcaagattaattctcatgcaacatgggtttagttaa

SEQ ID NO: 398329 - DNA, 1053 bp, Salmonella enterica
atgaataaatttttgcgccagctctctctgctggcgttgcttttttgctggccgttaatgtcacaggcggcgcgtacttttaccgatcaaattggccgccaggtcacggttccggataccgtcgacagagtggtggtgctccagcatcaaacgctcaatctccttgtacagatgaatgccactgacaaaatcgttggggtcatggcgaactggaagcagcaattaggcgatggctatgcgtgtctggcgccggaactggcgcaaaaagcctcgctgggcgatctaacgcacgttgatcctgaaaaactggtggcattgcacccgcaggtggtgtttgtcacgaattacgctccgcaggagatgatcgataagatcagcagtcttggcattccggtggtggcgatttcactgcgccatgatgttgctggcgagcaggctaaaatgaacccgaccatagcggatgaggagcaggcttacgatcgcggactgcgtgaaggaatcgcgctgattggcgatatcgtcaataaaccgcaggaggcgaaagcgctgattgaggcgatggagaaaggtcgcaagatggtcagtgaccgtttgcagtcggttcctgaaaatgagcgggttcgcgcctatatggcgaatccggaactgaccacctacggttccggtaaatataccggtctgatgatggcccatgcgggggcgctcaatgtggcggcatccaccgtgaaggggtttaagcaggtaacactggagcaggtgatcgcctgggatccacaggtgatctttgtccagaatcgctatccaaaggttgtcaatgagatcctacaaaatccccagtggcaggtcattgacgcagtgaagcatcaccgggtttacctgatgccggattatgccaaagcctggggatatccaatgccggaggcggtgggaatcggcgaactgtggatggcgaaaaagctctatccggaaaaattccacgatattgacatgcaaaaggctgctaacgactggtatcaacgtttttaccggactgactatcagggcatccagtga

SEQ ID NO: 398330 - DNA, 249 bp, Salmonella enterica
atgtgtattggcgtccccggtcaggtgctggccgtcggtgatgatattcaccagcttgcgcaggtggaagtgtgtggcatcaaacgtgatgtcaatattgctctgatttgtgaaggtaagcctgccgagctgatagggcaatgggtattggtacacgttggttttgcgatgagcatcattgacgaagacgaagcgaaagccacgttagatgcgctgcgccgcatggagtatgacatcaccagcgcgtga

SEQ ID NO: 398331 - DNA, 342 bp, Salmonella enterica
atgcatgagctgtctctttgccaaagcgccgttgaaattattcagcagcaggcagaacagcacggcgtggcgcgcgtcaccggcgtatggctggaaatcggcgcgctttcgtgcgttgaagagcgcgcggttcgtttcagctttgacatcgcctgccaggggactttagcgcaagggtgcgaattgcacatcgactacagaccggcccaggcctggtgctgggattgcagtcaggtggtggaaattctcaggcatgacgcgcaatgtccgcattgccacggcgatcgcctgcgggtggataccggcgattcgttgaaagtaaaaagtattgaggtcgaataa

SEQ ID NO: 398332 - DNA, 489 bp, Salmonella enterica
atgtctgaagggttttcgggattcgacacggcgcccgtcgcccgggttcaggcggcgtttgaagagatagcccatcgttcgatgcacgatctttcgtttctgcatccgaatatgccggtgcatgtctctgattttacgttgtttgaagggcaatggacgggcacggtaattacgccgtggatgttaagcgcattaatcttccctggcccggaccagatctggccggtgcgaaccatcggtgaaaaactcggtctgcaactgccttatggcacgatgacctttaccgttggcgagctggaaggcgtttcgcaatatctcgcctgctcgttgatgtcaccgctttcccgtagcctgtcgtcggaagagggcgtccggctggcggatgactgcgcgcggatgctgttatccctgccggtaagcaatcctgatgcgccgcagacaagccggcgtgcgttgctgtttggccgtcggagctgtgagaatgcatga

SEQ ID NO: 398333 - DNA, 495 bp, Salmonella enterica
atgcggatattagtcttaggggtcggcaatattttgctgaccgatgaagccatcggggtacgtattgttgaagcgttagagcaacgatacaccctgccggatttcgttgagattctggatggcggtacggcgggaatggaacttcttggcgatatggcgagtcgggatcatttgatcattgccgatgccatcgtgtcgaaaaagaacgcgccgggaaccattatggtactgcgtgacgatgaagttccggcgctgttcaccaacaaaatctccccccatcagcttggactggccgacgtattgtcggccctccgctttaccggtgagtttccgaagaaactgaccctggtcggcgttattccacagtcgctggaaccgcacatcggcttaacgccaaccgtagaagcaatgattgaacctgcgcttgagcaggttcttgccgcgctgcgtgaatccggcgtggaagcaattcctaaggagacggcgcatgtctga

SEQ ID NO: 398334 - DNA, 1704 bp, Salmonella enterica
atgagccagagaattactattgatccggtaacccgtattgagggtcatttacgcattgactgcgaaattgagaacggcgtcgtatccaaagcatgggcgtccggcaccatgtggcgcggtatggaagagattgtgaagaaccgcgatccgcgcgatgcgtggatgattgtgcagcgtatttgcggcgtttgtacgacaacccacgcaatctcctccgttcgtgcggcggaaagcgcgctgaatatcgatgttcccgtcaacgcgcagtatatccgtaatattattctggcggcgcataccacccatgaccacattgtccatttctaccagctctctgcgctggactgggtggacattacctctgcgctgaaagccgatccggcaaaagcctccgcgatgctggacggcgtgtcgagctggcacctgaacagcgcgcaagagttcacgaaagttcagaacaagatcaaggatcttgtcgccagcggtcagttgggtattttcgctaatggctactggggacacccggcaatgcagttaccgccggaggtcaacctgattgcggtcgcccactatctgcaggcgctggaatgtcagcgtgacgctaaccgcgtggtggcattgctgggcggtaaatcgccgcatatccagaacctggcggtcggtggggtggcgaacccgatcaatcttgacagcatcggtacgttgaaccttgaacgcctgatgtacatcaaatcgtttatcgataagctgagcgactttgtcgagcaggtgtataaagtggataccgcggtgattgcggcctactatccggaatggctggagcgcggcaaaggcgcggtgaactacctgagcgcgccggaattcccgaccgacggcaaaaacggcagcttcctgttccctggcggctacatcaccaatgccgatctatcgacctggcgtccgatcacctctcattccgatgaattcctgattaaaggcattcaggagagcgcgaagcacgcctggtataaagatgaagcgccgcaggcgccgtgggaaggcaccacgattccggcttacgacggttggtcggatgacggtaaatactcatgggtcaagtcgccgacattctacggcaaaaccgtagaagtcgggccgctggcgaacatgctgtgtaaactggccgccggtcgtgaatccacgcagactaagctcaatgaaatcattgcgctttatcagaagctgaccggcaaaacgctggaaatggcgcaacttcactctacgctgggtcgtatcatcgggcgtaccgttcactgttgtgaattgcaaaacgtcttgcaggatcaatacaacgcgctgattgtgaatatcggcaaaggcgactacaccacttttgtgaagccgaacattccggcgacgggcgagttcaaaggcgtgggcttcctggaggcgccgcgcggtatgctgtctcactggatggtgattaaagacggcattatcagtaactatcaggcggtggtgccatcaacctggaactcaggtccgcgtaacttcaacgatgacgtggggccgtacgaacagtcgctggtcggcacgccgatcgccgatccggctaagccgctggaagtggtgcgtacgattcactccttcgacccttgcatggcgtgcgcggtgcacgtggtggacgcagatggcaatgaagtcgtctcggtgaaggttttgtaa

SEQ ID NO: 398335 - DNA, 1179 bp, Salmonella enterica
atgagtcatgatccaaaaccgctgggcggaaaaatcatcagtaaaccggtcattatttttggaccgttaatcgtcctgtgtatgctccttatcgtgaagcgtttggtcttcgggttgggttccgtttccgacctgaacggcggtttcccgtggggcgtctggattgcctttgacctgctgatcggcaccggctttgcctgcggcggttgggcgttggcatgggcggtgtatgtctttaaccgtgggcaataccatccgttggtgcgcccggcgttgctggcaagcttgtttggttactcgctgggcggcctgtcgatcaccatcgatgtggggcgttactggaacctgccgtacttctacattcccggtcacttcaacgtgaactcggtactgtttgagacggcggtctgtatgaccatctacatcggcgtgatggcgctggagtttgcgcctgctctgtttgaacgtctgggctggaaagtgtcgctcaagcgtctgaataaggtgatgttctttattatcgcgctgggcgcgctgctgccgacgatgcaccagtcctcaatggggtcattgatgatctcggcgggctataaagtgcatccgctatggcaaagctatgaaatgctgccgctgttctcggttctgaccgcgtttatcatgggcttctccattgtcatctttgagggttcgctggttcaggcaggcctgaaaggaaacggtccggatgagaaaaatttgtttgttaagctgacgaataccatcagcgtgctgctggcgattttcgtcgtcctgcgctttggcgaactgatttatcgcgacaagctgtcttatgcgtttgccggcgatttttactccgccatgttctggattgaagtcgtcctgatggtcttcccgttagtggtgctgcgtgtggcgaaactgcgtaatgactctcgtatgctgtacctgtcggcgctgagcgcgctgttgggctgcgcgacgtggcgtctgacctattcgctggtggcattcaacccgggcggcggctaccactacttcccaacctgggaagaactgttgatttctattggttttgtggctattgagatttgtgcatacatcgtactcattcgtctactgccgatacttcctcctttaaaacaaaacgatcataatcgtcatgaggcgagcaaagcatga

SEQ ID NO: 398336 - DNA, 987 bp, Salmonella enterica
gtgaacagacgtgactttattaaagcagcctccggtggagcattgctgttgggcgccgcgccgtccgtcagccatgcggctgcagaaaaccgtccgccgattccaggttcgctgggaatgctgtatgactctactctgtgcgtgggctgtcaggcttgcgtcacaaagtgtcaggatatcaacttcccggcgcgtaacccggaaggggagcagacctggtcgaacaacgacaagctgtcgccgtataccaataacattatccaggtatggcgcagcggcacgggcgtgaacaaagatcaggaagagaacggctatgcctacattaagaaacagtgtatgcactgcgtcgatcctaactgcgtttccgtttgtccggtgtcggcgctgaaaaaagatccgaaaaccggcatcgtccactatgacaaagatgtctgtaccggctgccgttactgtatggtcgcctgtccgtacaacgtacctaagtacgactacaacaacccgtttggcgcgcttcacaagtgtgagttgtgtaaccagaaaggcgttgagcgtctggataaaggcggtttgccagggtgtgtggaagtttgtccggcaggggccgtcattttcggtactcgtgaagagctgatggcggaagcgaaaaaacgtctggccctcaaaccaggcagtgaatatcactatccgcgccagacgttgaaaacggacgatacctatctgcatacagtgcctaaatactacccgcatctctacggtgaaaaagagggcggcggtacacaggtgctggtgctgacaggcgttccttatgaagatctggatctgccgaagctggatgacctttcaaccggagcgcgctccgagcatgttcaacacacgctttataaaggcatgatactacccctggctgcgctggcgggcttaaccgtgctggttcgtcgtaatagcaaaaacgaccatcacgatggaggagacgatcatgagtcatga

SEQ ID NO: 398337 - DNA, 1119 bp, Salmonella enterica
atgactggagataatactctcatcacttctcacggcattaaccgtcgtgatttcatgaagctttgtgcagcactggccgctactatggggctcagtagcaaagccgccgcagaaatggcagagtcggtatccaatccacagcgtccgcccgttatctggattggcgctcaggagtgtaccggttgtaccgaatcactgcttcgtgctacacacccaaccgttgaaaacctcgttctggagaccatctctctggaataccacgaggtactttccgctgcgttcggccatcaggtcgaagaaaacaaacataacgctctggaaaagtataaagggcaatatgttctggtggtggatggttctatcccattaaaagataacggtatctactgcatggttgctggcgagccgatcgtggatcacatccgcaaagccgctgacggcgcagccgcgattatcgctatcggttcctgctcggcatggggcggcgttgctgcggctggcgtaaacccaaccggcgctgtcagcctgcaggaagtcttaccgggcaaaacggttatcaatattccaggttgtccgccaaacccgcataacttcctggcgaccgtcgcgcatctcatcacttacggcacgccgccgaagctggatgcgaaaaatcgtccaacctttgcctatggccgtctgatccatgagcattgcgaacgtcgtccacacttcgacgccggccgttttgccaaagaatttggcgacgaaggccaccgtcagggctggtgtctctaccatcttggctgtaaagggccggaaacctggggcaactgttctacgttacagttctgcgatgtcggcggcgtctggccagtggcgatcggtcatccttgctatggctgtaacgaagaaggtatcgggttccataagggcattcaccagcttgctcatgtcgaaaaccaaactccgcgttcagagaaacctgacgtcaatatgaaagaaggcggcaatatctctgcgggcgctgtcggtctgcttggcggcgtagtcggtctggttgccggcgtcagcgtgatggcggtacgtgaactggggcgtcagcaaaagaaagataacgctgactcacggggagaataa

SEQ ID NO: 398338 - DNA, 288 bp, Salmonella enterica
atgaataatcattttgggaaagggttaatggccgggttgaacgcgccatatgcatatagcgcgcatcatgcggtgaatttctgttctgagtataaacgtggctttgtattaggttttacgcaccgtatgttcgaaaagaccggcgatcgtcaacttagcgcgtgggaggccggaattctgacgcgtcgctatggtctggataaagaaatggtgatggatttctttaaagagaatcattccgggatggcggttcgcttctttatggctggttatcgactcgaaggttga

SEQ ID NO: 398339 - DNA, 1644 bp, Salmonella enterica
atgcgtttgctgcaaaactttactattcgtatggtcatgctgacgatactggggcttttttgtctactctggtcgggggtgggtttatacagcgtccatgctttatccgaagtttcggaagggaatgatattgaccgacatcttgtgcggcaaatgacggtgctaagccagggtaacgatcaatatttccgctttgtcacccgtcttagccgcgcgatggatgtaaaaatcggcggcggcacgcccgattttgcgcccgcccagcagtcgcttgagaatatgcgtcagaagctggaggagatgaaaacgctgtcgccagggccgatgaaccctgatatctcaagggcagtgttgtccaactggcaggccttgctggagaaaggcgttattcctcaaatgcaactggcgcagcaaggatcgctaaccgcctggagcgaacatgccagtacggtcacgcccgcactcagccgcgcgttcggcgccagcgcggaacggtttaatcatgaagctggcgccatgctggataacactcgcgtgatggtcgatggtaaaacctataccatccgcatcctgcttatcacggcggtgattctgggcattgccatcctgatttttaccgatcgctatctggttgcaatgatggtgaaaccgctggagcgtatccgtcagcaatttcagcgcatcgcgcaaggcgatcttagccagccgattgaaacattggggcgtaactgcgtaggccggttagtgccgttactgcgcgcgatgcaggacagtttacgcgaagccgtgagtacgattcgcgccggaagcgacaatatctggcgcggcgcgacggaaatttctaccggcaataatgatctctcctcccgaacggaagaacaggccgccgcgctggaagagactgccgccagcatggaacagcttaccgcaacggtgaaactgaacgccgaccacgcccgccaggccagtcagcttgcggatgccgcctcgctaacggcaggaaaaggcggtgaactggtttccgaggtggtagaaacgatggacggtatttccgccagttcgcagcagatcgccgaaattactacggtgattaatagcattgctttccagaccaatattctggccttgaacgcagcggtagaagcggccagagcaggcgagcagggacgcggcttcgcggtggtcgccggtgaggtccgtaacctggccagccgcagcgcgggggcggcgaaagaaattgaagccttaattggcgaatcggtacgtcgcgtagcgcagggcgcgcagctggttcaagagaccggagcgacgatggacgccatcctgcgcggcgtcacggaagtgacgacgattatgaaacagatcgcgtccgcctccgaagagcagagtaaaggtatctctcaggttggcgtggcgatcacccaaatggatagcgttacgcaacaaaacgccgcgctggttgagcaggtttccgcggcggcggcggcgctggagcggcagacggaggatttgcaacgctccgtacagcagttccggctttccgctagtgagccgcaacagcgcgtaacggcgaaagcggcgcctggcgttcagagaacggcgtcggctcccgcacagtctgctgatgaatgggttgctttctga

SEQ ID NO: 398340 - DNA, 1455 bp, Salmonella enterica
gtggcggaaaaaaaatctcagggcgtcaaatggctcccattcgttcttattctggttatcgccgccggactgtggcagctaacgcccccctctggtttaagcgcaccggcctggcattccgcgattatttttgtcgcgacgattgcctcaatcgtggcgaaagtgctccccattggcgcggtcggcattatcagtatcactgtctttgcgctcgcctatgccgccggcgacaaaacggccagcggtgcgattgccaccgcgttgagcgagctgaacagttcgctgatctggcttatcgtcgtcgcctttatgattgcccggggatttatcaaaaccgggctgggtcggcgtatcgccctacaaatgatccgtctgttaggtaagcgaacgctgggcctggcctatggcctggcgtttgccgacctgatcctctcccccgcgatgcccagtaacaccgcgcgctgcggcggcgtgatttacccgatcgccgactcgctggcgcgcagctttgattcacatccggaagatgagtctcgcagtaaaatcggcacctttctgatcacctgtattggcaatgttaacgacgtcaccgccgctctgtttatgaccggttatacgggtaatctgctggcggtaaaactggcggcgaacgccggcgttacgttgagctggggaagctggtttatcgcagcgctcctgccttgcctggtctctcttcttatcgttccgctgctggtctactggctgacgcgtccggagattaaacatacgccggatgcgccggatctggcgcgcaaagagctggcgcaaatgggcagtatggcgcgcggcgagtggctcatgctggcgacagtcggcgtgttgctggtgctgtggatttttggcgacacgctcggcgtggatgccactacggcctcttttgtcggtctctcgattttattactgagcggcgtgctcacctgggaagacgttaaaagcgaaaaaggtgcctgggatacattgatttggtttgccgctctgctgatgatggctaaccagttgaagaaactagggttcaccagttggtttggcaacctaattggcgacagcatcggcagtacgatgcatggaaccagttggataatcatcctgctgctgcttaacgctgcctatttttatacccactattttttcgccagcggcaacgcgcaaatcgccgcgctgtatgcggtgtttttgggcgtcggtctgcatctgaatataccagcggcaccgatggcgcttatgctggcgtttaccagcagcctgtactgctcccttacgcagtatacccacgcacgcggccctattctttttggcgcgggctatgtgccgacgggcgtctggtggcgaacgggatttattatcagcctctttaatcaggcggtctttttgacagtcggcctcgcatggtggaaagtgttagggttgtattaa

SEQ ID NO: 398341 - DNA, 462 bp, Salmonella enterica
atgacctgcattttctgtcaaatagttgaaggtaaagcgccttgtcataaagtttgggaagatgagcatcacctggcttttttatccatttttccgaataccgatgggtttaccgtagtgatcccgaaaaaacattaccccagctacgcgttcgatctaccaccgcaggcgctggcggacctgatgctggcgacgcaaaaagtggcaaagctgctggataaggcgtttgtggacgtgggccgtaccgggatgttttttgagggatttggcgtcgatcatgtgcacagtaagctaagtccgatgcacggcacagctaatctgagcgaatggaagcctatcgaatcgcgacagaataaatttttcgagcgctacgaggggtatctctcatcgcacgatcatcaacgggcggatgatgaaaaactggccgcgctggcggccagaattcggcaaaaccaggcgtaa

SEQ ID NO: 398342 - DNA, 831 bp, Salmonella enterica
gtgcgcatgtcgaaacataatcttattatctatagcctgcttatggcggctgtgccgataagcgtctcggcggattcgtcgacaacgtccgcggcaaccgtcgggatgctttcttctcctacggtgccgagcgttgggcacagacccagcacgccgttgagtgattatgaattaatattgaatgggtatggggggtttggtgaagcaagtatacccataccaggtatgcgtttatactcaatagcctctgggcataaacgcgatcctgataccgataaatatcaagctaatgaaacggccaccacggtatgtacatattatcgcatcgagaaaaatgattcacggcatgaacttttacatgaaaaaccgtgtaagtatggaattgatatcggtgaagatgacataggttcaaagataagaattgaacattataatgagacggatgtggcctcggcgtcgggatatatgcctgtaccgatggtttctgaactccattctattgaaacaaaacgtatagttaaattgagttcagatttatctgtcattagtgcagataaatctttactgatgccaggagagagtgctgttgtgaaaattattgttaaagatataaataataatcccataactaatctcaatctccagtgtgggcatagtccaacaggaaattggaatagtcggtgcgatatcaaagcagggggtaatcccggagagtatattcagacggtaacttataatggaggttcaaatggagagttgagattaacatatagatattttggggaattgattaaagataaatttactatcaccgggatacaaaaaaagtag

SEQ ID NO: 398343 - DNA, 267 bp, Salmonella enterica
atgaaacaagtatatttgatgtttgtgctcctgttatcactttcaggtattcattccgccatgaccaaaagctggcaggagattaaagaaagtggagagttacgcgtggggggacctggtgactatgctccactcgcatttcatgaccgacaaaataaattgaccggttttgatattaatatggcgtattcgctgggcaaggcactacatctaaagacccggtttgtgccttcagtatgccctgcagtgatgaaaacgccagactga

SEQ ID NO: 398344 - DNA, 279 bp, Salmonella enterica
  misc_feature (192)..(201): n is a, c, g, or t
ttgtctgggggcggcattttgccgttattcgtccagtgcagtattcggtaccgaatgggagtcaccgcagatactaagggttatgccagtggcctgctggaagaagcacaccgacagcatccggcactgtttgccgctaaagattttacgccggaagaaaggatgggcgatatccgtggacggctgcggggnnnnnnnnnnggggtggggatgggggggcattttacctgtacggctgtgctgtcagatatactggtagatcacgcagagaaaacctga

SEQ ID NO: 398345 - DNA, 588 bp, Salmonella enterica
gtggagccaacacgctcccccaagatcgaagtcgctcgcgatcgtctgagactggatgtatataacaaaattagggaggcagcagaacaacttcctgcatggttcccgctggctatggatctagcccttgtcaccggacagcgacgggatgatctatcatgtatgaagttcagtcacattattgatgagcgactgtacgttaagcaaatcaagaccgggatgaaaatcgctctgccactttcgctcaaccgtccttccctgggtttacgcctcagtacggtgattgagcgttgccgcctggtaagccgtagcgaataccttatcagcgctggcatacgcaaaaacagcccgaacgggagtattcatcctgatagcctgactaaaaaatttgttgcggctcgaaaattgaccggaataaatttcagtgaaaacccaccgccgtttcacgagatccgcagcttatccggacgactgtataaagatgcttacggggaagggtttgctcagaaactcctggggcatacttccgagaacacaacaaaaatgtaccttgatgagcgagacgaaaaggcatacatgatgctctaa

SEQ ID NO: 398346 - DNA, 540 bp, Salmonella enterica
atgaaaggaaaatttgccgctaccgtattattcaccgccatggggcttgcttcatctgcaatggctcaggacggccaggttaatttcaccggtaaaattatcgaagccggttgcaagattgacggcggcgtcacctctactcaggaagtcaaactgggcgaagtatccaaatccgcgtttactggcgcaggcacccacgcagcaaccactaaatattcactggtgttaaccgaatgcccgactgacctgcagggcaaaccggttgccgttaagtacgacggcacgccggacacgctgaacaatgattacctgcagatcaccggctacggtactgaaggcatcgcaaaaggcgtggcgattcagctgctgaacgaagatggttctgagctgccgctgggcaccgcatcaaaatctgtcaccgtcgcagccgatggttctgagaccaacctcgatttcttcgcgcgttatattgcgactgaagataccgtcgccggtggtgatgctaacggcgttgttaactttaccctgacctataactaa

SEQ ID NO: 398347 - DNA, 678 bp, Salmonella enterica
atgaataaatacgtttcactcatcgcaaccacgttgctattcgcctccgctaccgcacaggctggcgttattatcgggggaacccgtgttatttacaacggtgataaaaaagagacctcgattagcgttaaaaacccggacaaatcctcttatttaattcagtcatggagcgatgccggggaaaaaagcaccgacaaatcaccgtttatggtcaccccaccgctctttcgcctgggcgcaggccaggagaacagtgtgcgaattatccgcgccgggggtagcctgccagaagatcgcgaatccctctactggatgaatattaaatcgatcccggcaagttccgaaaagcaggataacgtgaataccctgcagattgcggtaaagacccgcatcaaattaatttaccgcccacaggccctgacagagcagccagaaagcgtcacggcaaaactcacctggcagcgtaacggtagccagctgaccgtgactaaccctaccgcttactacatgaacttcagcacggtgaaagtcggctccggtacggtgaaagaggcaacctacgtcgccccaatgagctccgccagcttcactattccagcaggcgccagcggtgacgtcacctggacccttattaacgactttggttccatcgggagcgaacaccgctcgcgcttgtaa

SEQ ID NO: 398348 - DNA, 2556 bp, Salmonella enterica
atgaatgcagatgcatacaaaaaaataatgacactcagccggatcgcctgctttatcgccctgcagtgcgctttacctgtctgtaacaccgcctccgctcgcgagtactttaacccggcgctgttgggaatcgatgggccgggcaaagatctgactgacctttccgcctttgaagaaggcgtcggccagatgcccgggacctaccgcgttgacgtcatcatcaataaaaccgctgtgggtgcgcacgacattaattttgtgatgcaaaaagatgcggccggcaacgccacgctgcaaccctgtgttagcgtagaggagctgcgcagcttcggcatccgcaccgacgcgtttcccgccctggccggtcacggcgattgcgcaaatctggcggcgatcccccaggcccgtgcaaagttcgtctttgagcgccagcaactgcaattctccattccgcagactgccgtggacaaccacgcccgtggctacgtcgcgccagaacggcttgatgaaggcattaacgccctgctgctcaactataactttaccggggccaacaccgaggcacgccacggtgatatggccgacgccgacagctattacctgagtctgcgtccaggcctgaatatcggctcctggcgcatccgcaactacagtacctggagtcgcaacgtcagcggcgacagcgccgatgaaaactgggattcactctacacctacgcgcagcgcaatattatcgccctcaaaagccaactgacgctgggtgacagtaccgccccatcggacatgttcgacagcgtaccgtttcgcggcgcgcagttagcttccgacgatgacatgctgcctgatagtctgcgcggctacgccccggtggtacgcggcatcgcccgcactaacgcccaggtgattatcagacaaaacggttacaccatttaccagagctacgtctcgccgggcgcgtttgaaattaccgatatgtatccaaccggcagcagtggcgaccttgatgtcaccatcaaagaagctgacggcagcgaacagcaccagacggtggcgtttgcctcactgcccgtcttacagcgtgaaggacggctgaaatacagcctcaccagcgggcagtatcgtccctatgaagacgatatcgataaagagatgtttacccaggcgaccgcgatgtacggtttgccggccggctggacgctgtatggcggggggcaattctctcagcactaccagtccttgctcaccggcgtcggtaaaaacttcggcacgctgggcgcggtctccgttgacggtacccaggcgtggtcagaacagaaagaccaggataaagagggcggccagtcctggcgcgtgcgctacagtaaaaacattctggaaaccgggaccaacatctcgatctcaggctatcgctattccacctccggctactacaccctgtcggaagtgctggacacctggcgcgacaacgactggcagaccaataacgatcgccgccgcaatcgcgccgaaatcatgctgaaccagaatatcggagacagtctgggttccctgtcgctaaacgccatcagcgaggattactggaacagcgaccgcaaaatgcgctctatcggcgtgggctacagcaacaactgggcaggcgtgacctggaacctcaactacagctataaccgtaatactgttgaccaggacgataacgacaaggtttacgatgaagaccaggtcttctcactgaatatcaacgtgccgctcgatcgctggttaagcaacagctatgcctcttacagcctgaataccagcaagcgcggggataccagtcatacggtgggtttaaacggctcggcgctggaagaccgcaacctgaactggaatatccagcagagcgaaaccaaccacggtgagggtaacggcggctatgccagcctcgattaccagggcacctacgcccgcatgaacaccgcctacagctacgatcacgaccagcgtcgtgtcaactatggcattgaaggcggcgcggtggctcacgctcacggcctgacgctcagccagtcgctgggggaaacgtcggcgctggtggaagcgccgggagcggctggcgtcaccgtcagcaaccagaccggagtaaaaaccgacttccgtggctataccatagtgccttacgtcacgccgtaccgcgaaagcaccgtctcactgaacaccgaaacgctgccggatggcgctgacgttgagctaaccagccaggccatcacgccgacccgtggcgcgattgtgcgggcgcattttaatacccgcgttggtaagcgcgtcttgatgacgctgaaccggcctaacggtaagccggttccatttggcgcattagtcacggacggagcagaaaccgcccccttatccgcaatcgttggtgatggtagtcaggtttatttgtccgggatagccacgcaaggaagcgcaaccgtagcatggggacgtggtgagaacgaacggtgccggataacccggtcactgcccgacacggtcccagcgagtggcgtcatagaaacagatgcactatgtcaatga

SEQ ID NO: 398349 - DNA, 996 bp, Salmonella enterica
atgcccggtaaaaaatcgttaactatttcggtgatacttagtgcagtgtttgtaacccctgcctttgctgattatatcggcagcattgatcctgttacgcgccaacataaattttcgaattttaaaattcccgagaatgcaggcgaaagtacaggatggtgggatgaaaatggttcagcaaagataactttcgaacccagcgatactaacggaagttatgttgaactgtcagtcgatggcacattagttggcgataacatatacgccacagacaaccccggaattggcataaaatatcaaataagcataacagcaaacagaggtattgatcctgccagcgggtcagaaactgcgccaaactatcggctaaatatcaccaacccaacaacaaatggaaatcaattagttacctatctacatgtgaagtatgaattagtgagattgaccgctaaagtgccagcaggaaatatcacctcggcaccaacggttacaatcaacgcttataattctggtggcgaggggtccccacttatatcgggtatccgttataacgcacaggtagggggtcaacctaagatcaccgcctgtacctttaatgtgccatcagaaataattctcactccactttatggcagtaatattattaacggtgcacagaacgtccagaacgttgaaaaaatgcagttgactaattgcccaggggcaataaatggtatcagctataattttaaagcgacatatggcacacaagatagcgccaatggcgtattaaaaaccgaaactggcgatggatatgctaagaatgtttatatccaattacagaatatggacggcacgggatataacaaactaaatacaaatatcgcgctcgattatgatggttccggtgattatgatctccccgattttaaaattggttattttattaacgatgccaactcagtaacggcaggaagagtaaaatcagcacttgaactggatgtcacatacaactaa

SEQ ID NO: 398350 - DNA, 519 bp, Salmonella enterica
atgagaaccaagatttctattttagcactatcctgtgcgagcatgttcgtttttaatgcttcggctaatgccgtcaatatcgatatcaccggcacggttgtcgcttcgccttgcgttgtcaacggcagtaacgaatcgctggccgtgaatttaggcgataacattcaggcaagctctctggaggcgagcggtagcaactcggactgggtagcaacgacattaaaactaaccaattgcccggcctccaccacctcgtttagcgtaacatttgccggcactcccgatgctgacgactctgcttactatcgtaacacgggtaccgccaccaacctgaaactggagctaacggatgactctgccgataccaagtataaaaatggcgcatcgctgacaaacgtcgccatccccagcacaactcatgcctacgaccttaaacttcgcgcccgcgcgaagtcgaaaggcatcgtcatgcctggcaccataaaaggccaggtgcaggccacctttacctaccagtaa

SEQ ID NO: 398351 - DNA, 525 bp, Salmonella enterica
atggcgcaacagataaacagactgcttcccgctctggtctgcctgtggggcatttgcggggctcacaccgtacaagcaaccgatattaatcttagcggtacggtcgtcgcctcggcttgtatcgtggataccggcacaatagaccagacggtaaccttcgaacaggcccgcgccgttgattacactcgtgttggcgacaccagcgaatggcaggattttgagcttacgctttccggctgcccggcatcaaccgctcaggtgacgaccctctttagcggtgatgccgacaatgatgatcacaccaaatttgccaatgctcagggcagcgctagcgggatggcattgcagataatgacccgggatcatctcaccgaaatctcaccggcgggtgaactgtcggtcggcgttaacagcagcagtcatcaggcggtgtttccactctcagcacggatgtacaccccgacaggtcgggtcacggcgggtgaattcaaaacgaccgtccagctgacgtttacctatcagtaa

SEQ ID NO: 398352 - DNA, 201 bp, Salmonella enterica
atgaggatgtgctttggtcacatatcgccgctggctttaaagggcttattccgtccgtcatgctgtgatgatgcaatggtgatacgtggatgtatggtccgcctgaacaaaaataaccgcaacctgcatgatttgctgatggactattatgtgatgggaacgatgttgatgatacttgatatcaggctggaaatggaataa

SEQ ID NO: 398353 - DNA, 243 bp, Salmonella enterica
atggaagtttcatatctgtgcgtcgcccgccagggggacgttctggagatggtctggggtgatgtgatggacgcggttttgtttattgagcagaacaaaaccgtgacgaaacaaattaaggagcggtctcctcgccttcgttccgcttttcaactcgcgagaaatactatggatgaaaaggtaacatgcagggcgattaacaaagggtgggacaaagccaaaaatccgctgaacgaaaagtga

SEQ ID NO: 398354 - DNA, 7272 bp, Salmonella enterica
atggacgggaaactgcataacaagataaaccgttttttactggcattgctgctggttgcgggcgtttgcgttacgccggcatccgcgaaccttaagcggggagcctggcaggagctcagcacgtccactgacgccattaatggcacggtaccccaggccgacggcgcaacggcgccggtttatcagggcagcgtgttattaacgccggacaaaacacattctgtggcgttcagcgccatgccgaaagattttagcgttagcgccgacagcagcaagatgcaggccgttaacccactggataccgaaggcgatctttttttgacgccgcctctgcgctgggaaaaccaacaaacgccgacggtggggctggtatgggccgatgccgccacgccggatgagccgcttaatccgcagcctgtacagaaccaatccttctgcgcccagaatctggccgggcgtcatctggtggtctggccggaagttgaaagcgatgatacgtcgcctattcctacgctctatctttggaccataaccggcatacccaacagcaacaccgtgccgttactgcaacaaaaaatcgccgttgatatcgccgccgcgacgggcgaaccggtgacagtgagcgccaaccactatgacgaatcgctggccgccgccaaagtgaaagtaggtgaaagcatcacgctgaccatcacgacgaaagattgtgcgggtaaccctatcggcaatgcgccatttgtgattcgtcgcgatgacgcgctgaaccgtaaaggcgcagtgaataatgtcgggccggtacatgtcggcgatacgcaactgacaactaccgccacgatgtatcacgggacaacggatgccaacggtacggccaccgttgtggtcacgcagcccgatggccctggtgtgaaaacgcctcttagcatcagttcagaaagctaccctgacctgaaagcgcacaccgatgtaatttttaccgtcctgaccagcccggatagcgagctggcgacaatgtacggtcatatgctggagagcgctactgctgacctgaacggcattacctatacctttacccgtccgaaactggcggaggaaaccagcaataccagtgccacggtcgttgataagaacgaaacctggtcgcaatttaactgggcaggggcggacaatcattgcgccattttgccggatgcggaacagctagtggccttgagaaacgctcatgatacccaggcgaccaacactggctggccggtatcgaatgacgcggaatactggtcgtctacgcaggatcaaatggacagctaccactatgccgtccatgtcaactccgctcgcgtgattcgcgaaagcaacagctccgcttttttggtcagttgcgtagataaagccctgccggctgcgcatccgcagatcaccctctctccgggtgcgccctataaaacgcaagtgggtgagtctatcgaattagtgatgaccgtcgtggacagggatacccaaaaaccgctgccttatcgctatatggagttgttcgttgacccgtccaccaaccgtaaaggcgtacataaagatgagtgggacaatctaccggtcacgattttttctgaagatatgcgcgcgtcttcaccgcagcattacactggcgtgactgacgccaatggacaagcccatttaacattaaaacatgataatggtgttggcgtggagacgccgattcgcatcgtgatggcggatgacgacggtattgatgtgacactgccgtttagcgtgattttcaccgtgatcaccagcccggacgttgagggtgcgaacatgtacggccatatgcgcggcgtcgtggatgcgggcaatctgtataaacgtccgctgctggcgttcgaggccagcgacaaaagcggtcagcagagtgaaaacaacgaggagtgggccacatttaactccgtggagtccgccacccgtcagtgcggaacgggacaagtgccggacagcggttcgcttgagcatttgtacggcgagcaccctgacaatcaaatgttcaccgaacacggctggccaacgaacagtcacccctatattgcggcacaaaccagcgattcgcagacggagtacgtcaatctggcaaacggcagcaaaggctatagcagtcagccaaactacctgacctgttcagcaaacgagatggtgtcggcgctcaacgtttactttaacggcgatcccgtcctgcgtaacgttgacgctaaagtaggcgagcaggtaacaatgaacgtccattcgattaatgccctgaacggtgaggcgatcccgtacacggacttttcgatcaccttatcgcccggtaaacggcgcgatggactcgccaccggttttaccgaccccagcaacggagagctgatcattgacggcaatgcttacagcgccgggcaaacgtcgatttatcagggcgtgaccgacgctcagggcaatgctgaagtgctcattgagcagccgagaggcgtggggcttttgactcagttgaatgttgcgccggtggactcattgttgaatctcaccatcacccgcagcgtgaagtttaccgtcgctaccagtcccgatactccgaatgcgaatatgtggggacatatgtccgacactgttaccgtgggcgatatgaccttcgagcggccaaagctggcaaatgaggtgtcggcgacccgcgtgcagaatgaagctaatgagagttgggcgcgcgttgcccacgctgatgctgacggcaatcctgatgcgggcggttgtccggcaaaccgcttgccgcgtatcgatcagcttgaggcgctgtataacgcgaacagcggcggtgccatgcacagcatccagggatggcccgtgacgatgcagtactggtcttcttcattaaccacttcaaccacctggaaatatctggcgctggatacgggcgcggaaagtgcggacggtaacctcactctctataccagttgtcttactcacgaaaacccggtggcggcatctatcaccatcgaaccggtggaggcgtcgcagtggtatgacggcagtaatgttcatgcagtgaaagtgaaaaaaggcgatacgctacagctgaaagtcacggtcagggacgccagcggtatgccgttggcgaatgcgccattcgtgctgtctcgcggcgatggctacgatcgccagggagataaattcattgcgtctaaagggagcagtgacgctatcgtcacgccggtggtgattgatggcgaagcgttgaacgatacttcgacgaaaaagggcgcgttgaccggccctgacggcagcaaaattattagcgtgacccgcccggatacgcacggcacccgtaccgccataaccgccgcgttgtatgataacgctggcgtaagtgccagcattgacaccatttttaccgttatcaccagcccggacagcgataaggccaatatgtgggggcatatgacggaatcactgactgcggcagacggcactgtgtatcagcgaccgctgctctatacggagctgagcagcaccagtaatactgcgcaatatatcgaagataacgaatactgggcgggcttttatgggccgaacagtaccaaaaacaacgcggacaactgccccgcaggctattacccatccgttacggcgctggactcgctctataacgcatacccgagccgcacaataaaaacgcaacagggctggccgattgaccactcttactggagtggaacgtcttcccagccgctttcgttaacagtacctaatacctactacatcgtcgatttggatgacggcagccgtcgcgcgatcaccaatagttccaccaataatatgcagtatcagatttgtgcccgggcgtcgacagcgcaggcggcgcgaattgtactctcttcttcattggcgctggatagcgcctcacagtccgtgaaggtgaaaaacagcgagtcgattccggtgacggtaaccacgatggacgcggcaggaaatccgctaggcaatacgccctttgctattaaacgtgacgcgggtacggcgcgcaattccagctattcaggctgggaggcatttccgttgagtattgatagcgagtcgcgagtctgggcaactgccgatacgtattacggcacgactggcgatgatggtacgctctcttttgcgctatttggcgaccattcgcccggcgtcaaaaatgtgttgaccgccagcttgtataacacccccgcggtcacggcgtcgttaccggtcattttcactgccattaccagcccggacagcaataaggccaatatgtggggccacatgccggaaacgttcaccgccagtaatggcgcgcaattaaaacgcccgttgctttacagtgaactgtcctcgacgacggatacgtcaatctataccgaaaccaacgaggactggtataaggtaaaaaacattacggagaaccgcggtgcgtgtcctttaacgcagatggcggcggcggcggattaccaggcgatatacaacgagcatcctaaaggtgcggtggcgacagacctggggttacctgttggcagtaactggtggaccggggacaggatattgaccggtcaatccatctatcgtcaatatttcaactttgcaacgggcaaattgggtaccacaacacaatcatccaattcagccttacagctttgcctgacagagccaagggtgaggaacatcgcgttctctttgctgccctgggatgagagtaaatccgcaggcgtggcgaaaaaaggcgagcaggttgccgccacggtgaaaatcacggacggtgctggtcagcctgtcagtaatgcgccgataagaattacccgtagcaacgcatatcagcgtgatggcacggcatacagttctaatcaagccgaagacaacattaccttaagcgacattcagtccgccagcgtgtcgaccttgaccatgaacgattcgaatggcggtttacttgcgcagacggatgcgcaggggctggtgacgttcaatatttcccaggatgcaaccctggggttcaaaaccacgctcaccgtaatattcatggatgacgagactcagagcgacagtaaagacgctatctttacggttctcactagcccggacagtgacaaagctgcaatgtggggacatatgccggaaacggtgaccaacagcgcgggcgtgacgttccgtcgcccgctgctgtctgccgagatgtcgagcggtgtgtccacctcgtatagagttaacaatgaatcctggccgatggtgagcaaagccgatgcgcaacaagccggaatcactggctgcgatgaggcatatcagccgctgctgaacgatctgcagacgttgtacgccgatcacccgaatggtgaacttttcacactttacggctggcctgtgaagaacaacggcaaatactggtgggcggtagacagggtcgggaagaccgaaagctacaacggcgggtactaccagtatatgcggctggatacaggggcaacgtcaagtaccaactcaacgagcgcaacggcgatgcaggtgtgtcgggtcgaccctcatgcgccgctgccggcgaccattgaactgacatccacacttcccgtcacggtaagcgatgcggttaaagtgaaaacgggtgaagcgataccgatgactgtcaccatcaaagacgccagcggtattccggtggcaaacacggggtttaccttttcgcgcggtaaagggatcagtcgtggtggaatagtgaaagagagcggatacggtgatacaacggacgatctcacgctacaggagctgacgccgacggccacaacggtggagctgccgcgctataccgacacgtatcacggtattaccggcgcggatggtaaggcgaccttcagcctgcggcaggatagcgggatggggttaaaaacggcgataaccgtcaaaatggatgattaccctaatctaagcgcctcgctaaatgtgatgtttaccgtagttagcagcccggatacggataaggcgcagtactggggccatatgccggaaacggtgaccagcagcgatggcgtggtgtttaagcgaccgctgttgggcgcagaagcgccgtcaaaaacgaatactttcggttctctggtctacggcaatgaaatctggccgctgtttaaccatagcggcgcaggtctggcaagccaatccggctgtcctgatgcgtatcagccaacgctgagtgagatgcaaaagctttatgaggattatcccgacggcaaactgggtgaggtgttcggttggccggtcaatcgctcggagtttagctggtgggtttctgacaaagccgggacccattatcagagcatctaccttatgacgggggccgtctattcgacgaagacagcatctgataaccagccgctggtctgtctggtaaatccgcatccggtacccgcgtcagtcaagataacgtcaacgatgctgaatactgttaacgaggcggcggtagcgaagaaaggtgaagcaataccattgacggtgaccgtcgcagacagtgctggcaacccgcttgccaatcaggcgtttacgctggtgcgcggcgagtcgttgaatcgggctggcgagaaggttgcaggcgcgttgaccattgagggcgtcgcgccttttgtcagtgcgaaatcgttggatgccagcggtgatacgttcaccggaaccaccggcgcgaatggctccgcgacctttacgctacgtcaggataatagcccggggttaaaaacgaccatcaccagccagatagcggacaataccgttatccaatcttcacttgatgctatttttacggtgctcaccagcccggatacggataaagcccggtactggggccatatgccggaaacggtcaaaaccagtactggcgtaacgtttaatcgcccgttactggcggcggaagtgccgtcgggaaacggttcttatgatgttaataatgaaacctggtccagcgtcaacgcccaaaacaggcaaacgccgggggcgacaggatgcgatgaagcacgtcagcctctattcagcgaactgcagacgttgtatgacgacaacagtaacggcgcgctggggacaaaatacggctggcccgtgggcggagacagcaattactggtgggcgtctgatgttgatcctcaaacgcatacttatcagtcgatcaatttaaataccggtgagcaccatgattttacgtcaacgacgatgtattcacggcaggtatgcctgaatcaggcgcgttcaacattacagaaacctctgcgatga

SEQ ID NO: 398355 - DNA, 969 bp, Salmonella enterica
atgcaagcaacagtaaaacggcggctgacaaaggtcgccttagcgctggtcgtcgcgggatattgcgccgcgcctgccgtagcggcggatggcaatctaaaagccggtcagtggcagattgtcagtgaaagcactgggacgattcaggggtctattccgtggatcacccgcagcacagagaaagtgggcgagagcgataaaaatcatgtgacagtaactatcgatcgtggaggccgtaccatcgccaatgatggcgacaagcagttccacgtaggtgacaaggttaccatcaactgggcgattggcgatacggaaggcgatctggacgtcgacaatacggccaccaaaaaaaccgtacagtggatgagctacagcgatcagaacggtggcgaacctaaggagatcggcaccctgggtagcgatacctatgaaattcaggcggaggatgccgatcgctacattggtgtcaaaatcacgccaaccaccacaaccggtgatcctgacgtggcggaagtactgtttctgaacgatctctccaccgacgcaggcggtggtgcagacgatgatgatattccggaaggcccggtctatgacagcgatgtacacgtggtgatttacgaggctggcacacaaaccgacctgctgggtaaagagaccaaactcaaaaccaacaccacgtataaagtcctgctgtggaaagataaagcgggtggcacggcaaacaaatacgatactggcgaagaggtcaccacccagtacgattatcgctggaaattcaccggtcagagcggcgtggcgcacaccggggctccgggtattgtcaacgaaagttacaacaaccacgacctcgttatcccgattaccaacgccgaagcgaaaacggcgttcgagggggccgagggcggcgttaccgtcggcaccgatggcgttcagggctttggtctgtctatcgactacagacgcaaataa

SEQ ID NO: 398356 - DNA, 462 bp, Salmonella enterica
gtggacttccttaacggcgacccggaccagcccatcatcatggggcggacgtatcacgatattaaccgcgcgccgggtgccctgcctgacacgaaaacgcagatgaccattcgctcaaaaacctataaaggcagcgggtttaacgagctgcggttcgaggatatgacggaccgggagcaggtctatatccatgcgcagaaggatatggacacggaggtgctgaataaccgcaccaccgatgtgaaggtggaccatacggaaaccatcgggaataaccagcagattacggtggggctcggacaaaccatcacggtcgggaaggaaaataccggcgggcgtgaccagaccattactgtagcccatgaccgccacatcacggtacgcaatgaccagacgctgaaggtgaagcatggaccggatagcgagcatcagccacaacgatggcctgtacgtggcgaatga

SEQ ID NO: 398357 - DNA, 1755 bp, Salmonella enterica
atgacggtggaaaaactgattgtcgaccatatcgacacctggaccacggcactgcaaacccgctccacggcggggcgcggcagctcgggtaagattgacctgtacggcattaagaagatgcgcgagctgattctggaactggcggttcgaggtaagctggtgccccaggatccaaacgatgaaccggcgtctgagctgctgaaacgcattgcggcggaaaaagccgagctggtgaagcaggggaaaattaaaaaacagaagccgctgccggagattagcgaggaggagaaaccatttgagctgccggtggggtgggagtgggtacagattagcgaaattggtcatgattggggacaaaaaacacctgatgaagatttcacttacattgatgtcggctcgataaataaagagtatggcattattgaagagccatctattctttcagcaaaagatgcaccatcccgagcaagaaaaattgttcaaaaaggaaccgtcatatattcaactgtccgcccatatttattgaatatagcgatcattgagagcgtcttctcccccgagccgatcgctagcacagcttttgctattattcatccttacaccgcgatgaatgctaatttcatatattattatctacgctctcctgtatttattaattatgttgaaagttgtcagacaggagttgcctatccagcaatcaatgacaagcagttcttttctgggataatcgcagttccgccgtcatccgaacaggctcgcataactaaaaaaattaaagaactcatgtccctctgcgaccaactggaacagcactctctgaccagtctgggtgcccatcaacagctggttgaaaccctgctaaccacgttaaccgacagccagaacgccgatgaactggccgaaaactgggcgcgtatcagcgagcatttcgacacgctgtttaccaccgaagccaccattgacgccttaaaacagaccattctgcaactggcggtgatgggtaaactggtgccgcaggatccgaacgacgaaccggcctctgaactgctcaaacgtattgcgcaggaaaaagcgcaactggtgaaagatgggaaaattaaaaaacaaaaaccgctgccgccgattagtgatgaggaaaaaccgtttgaacttccggacgggtgggaatggtgtctattcgaagacgtcgttgatattcaaagtggtataactaaaggaagaaatttagccaaccgaaagctgatttcaatcccttatctacgtgtggctaacgttcagcgtggttatcttgacctttcagaagttaaagagattgatatccctgaggaagagaaggataaatatcatgttattaaaggagaccttttaatcacagaaggtggtgactgggatactgttggtagaacaactgtgtggtgccatgattggtatatagcaaatcaaaaccatgttttcaaaggaagaattataggacaagacattgatccttactggcttgagacatacatgaatagtccttattcaagagattattttgctagtgcaagcaagcaaacaaccaacttagcatctattaataagactcagttaagaggttgccctgtagcgatccctccaagtagtgaagcagataaaatcatgatcaaattgaatgattttaatgaattgtgcaaaaaacttaaatcacatatccaatccgcccaacaaacccagctccacctggccgacgctctcaccgacgccgccataaattaa

SEQ ID NO: 398358 - DNA, 630 bp, Salmonella enterica
atgccacatacatcagtttctacctatgccagggctttatcaggaaatacgctgtctcatgttgctgcaggaaattatgaaaataaactatcaacaaaaatcctgaaaggaatcttgtgggtgcttacggcaggactggcctacggatttacgagaataattgaacattattgcaatgttaaacctaaagttgcggagttctgtgccaatgcagggactatccacaatcaccttgctgatgctgtacgtgatgaactatttactgcagatattgagctttctgatggtcggatattaacattcgaacaagtcacgctaattgctggaggcaaaccaatcgtcaggatatcggatggagagcaaacagtagaggttgaagggacttttgaagatatctgtatgaggctggaagatagcttttttaccgcgccagcgtattataattatgatattgataaacaatataaaaccgtgagagagcgaatagcagaatataattgcttaccacaatcattaggcaccattcctcccatacaggattatgtcgatcagaccggcgacatgaaggcggcgaaagcgcaacggacggccgaaacgaaagctcgctaccataaatattgggactattaa

SEQ ID NO: 398359 - DNA, 996 bp, Salmonella enterica
atggctaatttctttactgatttaaataactatattaaacaaaatcctattgaatacatgcgtgattttggtattgaaattctggagaagggaagtcacccatgccctatttgtggtgggatagatagatttaactggcgtaaatctggtgactatccgcagacaggatattgccgaaagggatgtggaataaatggcagtaagatattacagcccctttatataataacccaaaagaccagcttaccatataaggacataggtgcacgtattggatttaataaatcagaaaaatggactaacccgaatcatttttatatgcgccctacgccaaaactaaagaaacaggaatttaaacttgccgatttagatgataagaaacttgaattatttacgcaaagcataagcgaacacacgaaaaacgccacatggaaagaatcaccttacctgctagccaaagggattagaaaaatgatgtgggttggcggtcacggccaaacgctattggattattaccgtgctgacgggactctatcagccctgcaaagaatacccgttgaggataaaaagagtttcatacctaatagtcagatttcaggcgcttttcactgtgaacgaaatcaggatgggaatattgaaacaatattcataggagaaggctttggaacggttacagcatttcaatattcaataagcgatcaatatccatcatctttattccttactgctggaaatgataacaatttattgaatgtcgcaacagaagcaaggcgatgctatccaaatgccgatatttgtattcttaccgataatgatagtcataaagataacgctggtttaaaggcgaccataaaaacaatgtcgcaagtaaataaatgttggtgggctatgcctgtaactgctagtgaggattggtgtgatgtttttcagcgcggaaaatttgcagtgcgtgatgaatttcgaagggttcttacagaccgcaaaccatcaatataa

SEQ ID NO: 398360 - DNA, 327 bp, Salmonella enterica
atgacagacacaaattactttaaagaaaaattacgctcaatggcaattgaaaagtatgttaaggaaaatagaaagctaattgcagcacagataagcgagcaatcgcaaaaggttcagcttacggggcttgtgtgcggtaatgatgcagttgctttagctggtgtcagcaaacctatgttctatgctgcaaaacgttttaatcctaaagaatttccacaggcgatttatcaagagacagagggttatatctggtatcgaaaacaagacattgtagacttttttgcgaaacatccagcaaggcgatatgggagtaaatataatggctaa

SEQ ID NO: 398361 - DNA, 1890 bp, Salmonella enterica
atgaacgggtttcatagcaacaacgaccagaaaattaataattaccaacaaaaaatccgtatggttgtagattggaatgcaaaaccatattctggagaatatgatgaattcgacaatcccgtcggcccgctgtatagatttttaaaagatacaaggcatcgcatttatattgatccaaatgcgaaaccagatattccagacgaggatggttatgtcacctgttatgaaccgttgcatattgactggaatgcaaagccagaaatccatatgcatattgactggagttgcgaatcatattcaggcgcgtgggacgaatttgataacaaaattgaatcagcgccagtaaataattttggtcagtctgcgtttaatgctggcaatcaaaagcaaaatatacaaaaaacatcactatgctttaattcaccaacaccagtagttgatgattctaataaacccaagacagaatcattgggaaaagataaaaataacgaaagcgatgaattatgcggattagggcaatatatttatgaatgtataaatggcgctggtcgaagggaattaaaaccagcatcaaaaatggctgcattacaggcattatcagcaatgtcaccaaagattaaaggctacaacaacgtaacaatgggattacttacttttactgtttgcgagtcaggcgcaggtaaagaaaaaccacaagaattttttgatgatattgcggtatctgctggaatggcggcgtctgatgcaccaacatcaaataaaagtatttacatggatatctttcatggtaaaggacgtgcagcatttgtggttgatgaagtacatgaaatgctaaatgggatgcgcggtataggttcaaaaaaatctgaacatgctaacggaatggaaggaagtattttaaaattatctacaaaacactatgcaaaattatctcctacctatgcaaaagagatttgtaactctataacgaatgaaatcaattcagctaagaagcgaattgaacaacttaaaaataacttagatgaagatgggaatgtaataaataaagataccgcaaaaggtagaattgataatattcaaaaatctattgagtacaagaaagaaatgattaagaagattcgaacaactaaaagaatcgacaatatacgcttaaatctatttggttcatccactccgcgagaaatgaggccacatatcaacaagcgttcaatccagagtggttttttaggacgaataatcatgggatggagtgacagtgttaacgcattgcgggagccatactcaacggaaatggaaaaagatataataatgaagtatgcggaatgggtttctaacagggagggacaaatcacagctaacgatgaatcgaagcgatatcttgatgaagtaatgtttaattatgatactcagcaatatagggagcataaagattatgcaccattgtatcgaagggtttatgaaaacacatgcagaattgcatcattacttgctgttggaaattttgatttgcaaataactttagcacaagcaaaagcagcatttaaaattgttctggacagtcttaatgctattatcacgctatgtgaggttagtggtagcgaatttgaacaatacgaatttgaaaatgaaacagaagcaaaagtttatactgtaatagaaaaaaataaaaaccaacatggatactgttatcttagcgttctgcgtgacaaattatttaatggtaaaaaaattagcggcatgttaaaccgctataagttaaccgttgagcgatttatgaataaacttgtttcatcagattatttatctgttgctgatgcaaataaaaagccagcatataaattagaaccatcaggaatcaatagaatgttaacattaattggggctgtctag

SEQ ID NO: 398362 - DNA, 270 bp, Salmonella enterica
atgattacgcttaattcaggtgtggataattcacgtcaattgccagacgataaaatctctaataaagaaattctggctttgctaaatataggtcttcaagaatttagcaaggctaaaaaatggaggccagaagattttcctaaaggtgtacgatctggacaatcaatttattattcaaagaaagaagtaattgagttttttggaaagtatggatacacgcctaaagatgccccagtaaaaccaactattgtggcggctaaactcaggtag

SEQ ID NO: 398363 - DNA, 252 bp, Salmonella enterica
atggttaagcaggactggcacccagcagaaatactttgcgcactaaaaaaaacggggactagtttagcggaattgtcacgcgaacacgggctatcatccggtacgctgcaaaatgctttaagcaaacaatatccgcgagcagaaaaaataatagctgatagattaaatatagaaccgtctgaaatatggccttcacgttatttcaaaaaagatggcacttcgattaaacgagttataaaaaaacctatttaa

SEQ ID NO: 398364 - DNA, 132 bp, Salmonella enterica
atgactacctttatttttgttgccattggctatgtttttatgggcgtgcagcatgatacaaaggttgtgagtattgttggtcctttgcggactgatgggcttgattttctcaataaccggtcttttatgtaa

SEQ ID NO: 398365 - DNA, 147 bp, Salmonella enterica
atggggcgcaatagcgataaccgtcccggaggtgggcgcgtgtaccggcagcattctcccacgcccacgggtgagcgcctggccgcgcagcacgcgatcgccgacactaacgcacagctcgccctcagcgccaatgtgctgttttaa

SEQ ID NO: 398366 - DNA, 303 bp, Salmonella enterica
gtgagcctgtttacgctgcatgtgaattgggcgttttcgtggatttgggtgacgctctatccggtagttcccggcggttcgtatcaggcgcaagagatattgcagtccttaacggttgtgccgggtactgatggcgtgcgggcgctgattgatttggatccgaatgccgatgttgatgccttacctgatggaatttacgcccaggtagcggtctactccgaccatttcagccaggtttcagtgatacgcaaagttctgctaagtatgaccagttggatgcgctatctctatttaggccattaa

SEQ ID NO: 398367 - DNA, 279 bp, Salmonella enterica
atgccagcagaacagcggcttgccgaacgccagttgaaaacgaaagcgcttcttaaatcactggaaaactggctgcgtgaaaaggtgagaacccagtcccgacactcagaactggcaaaggcgttgacctgtgcgctgaaccagtggctggcggcctgccgaataacccgtcacgtcaatacggttcgcgctgtacgcttacctaaagcactagcggttaaacgtgttactgaaaacactggacgtaaaactctgggtgttgatagcgaaatatggtaa

SEQ ID NO: 398368 - DNA, 159 bp, Salmonella enterica
atgaattttgccactatattaaaggtgatattttgcgtcagtataaaactgtttaagctgggtaatggcggaccacttagcttcggggttttaccatatttcgctatcaacacccagagttttacgtccagtgttttcagtaacacgtttaaccgctag

SEQ ID NO: 398369 - DNA, 690 bp, Salmonella enterica
atggcggagcaaatccaaagacctatgcgtagctggttattcataccagcaatccgaccagaatggttttcgagtgccatagcaagtggtacagatgttattatcattgacatggagtattctgttgcttctgtagataaagttatggcaaggtctaacgctgtttctcttatattctctcactacccacgaacattaccaatcgcactgagaattaatgctctcgatacgcctgaagggattgacgatctctgcacgttatttgattttggtgtatttccggattttctaatcctgccgaaaacggagtctgccgatcatatcaagattctggaccgcctgctaactgccataggggtagaaacatccctcatagcggtaattgagtcactgcaagggctcaatatggttgaggcaattactaaagcctcgccccgactaagaggactgatgtcaagtaccgtagcccgtactaccagagattttatgtgtctatcaagtcacagaatgataagtgcttgtacagcctccgggattacagccattcataccccgtattttgatatacatgatatagatggactcgaagcagaaacatgcaaagccattactgatggttttacagctaaagcagccatccatccagctcagatcagtattatcaataccctttttaatatagtggcataa

SEQ ID NO: 398370 - DNA, 720 bp, Salmonella enterica
atgcgcaattacaatagattatggattgtctggctattatggattacagcaatattgtactttctgtcaggcaggagtgatgactttcccaatgatgttattgttataattaatacaataattttgctgttcttaataagaactttaattttcataagaaaaaaggtgtatataattactatgtttaaaagcaagcaaaaaccagtatcaataccacaagacacttcacaaaatgtaaccaatgaagttaaacactcttcggagttgccttctttttcagggaagagttgtacaacaaactcaataaaggaaaaaaaagattgttttattgcgagcgatacttcatttaccggtattctaaaaggtggtggaaatatcattattgagggacaggttgagggagatgtgatttgtgataatcttgtaaaaattgagagtggtggacatatcaaaggggaggttcgtggtcaacaagttctaatcaatggaaaagttgaaggtaaatgttatgccgccaggctgtctattttacctaaaggcatcatgcatggggatattttttctgacgaaatttcaattgaaaaagggggaagttttatcgggtgctcacaattaatggaggcatcatcaaccaaaataaaaaatacaattttaaagagtgaacgatttataccagatattcagtcaaagcttatacttgaagataagtctattaagtga

SEQ ID NO: 398371 - DNA, 324 bp, Salmonella enterica
atgaatttacacttaagattaaaagaggtggatttagcattaggtaaatggattgatgctaaagacaggattagccaattaataatacttaacacgatgaggattttattatttactttttgtgtttatataattgggttcattgattttaatttttcccatatggctgaaaatatcatgtttaatatatacagaatagatgtttacattttttatggtataatgatactgcctttgctagctatatctatattcttcacattcagccttttatttatattttattctttgctaaagagatgtttgtctaaagtggttagttga

SEQ ID NO: 398372 - DNA, 675 bp, Salmonella enterica
atgtctttaatgaaaaggtttcgttttttatacattatattattctattggctggggggctgttcctccacgcctgcagatactccggtagcttcttcgaaacctacattcccatcagatccgggagcatttccaacaccgcccccccttcctttaccgatggcattacctgtcagtacaggctcccggggttcagtccctgaccgtgagtccttacaaaatcagaagcttcccgtcgcccttatggcacaaaacgggcgagtgttaacagtctgggccctgggtctgagaaactggttatgggcatatggcccaactgaatcctcctcatttggcaatctcagaaactggaatattgaacccgtcgggactctggcgggggcattcagatttatcaactccgttacaggaacctgtattacagcctataaaaacggtctgattcacgacagctgtaacatcagtaataccgcccaggcgtttgtgctgacgccggcaacaaacgggggcttatttatgagaagcgtgtcgcttgggaaatgcgtcagttataacctgataagccacaccgtttactccactgtcaccctggctgcctgcccagctccaggtaccaacagttatgatcaaatctggtatttgtccccccctttaattgatgccattgcggagtaa

SEQ ID NO: 398373 - DNA, 825 bp, Salmonella enterica
atgcacaagaaacttattcttatgttagtaacggggagcatgttctggtctggcatgacgcaggctgcagtgacagactttaacattgtcacgtggaacttacagggctcttcggctgcatctgaaagcaagtggaatattaacgtcaggcaaatcgtttccggttctgatggagctgatatcctgatggtacaggaggcgggtagtctgcctctaacaacggaactgacacatcgccatattcagcctgttggtatcgggatccctatcaacgagtacacatggaacctggggacaagtcggcgccccgatattcgttatatttattattccagagtggatgtcggtgctaaccgggtcaatctcgctattgtatcccgacagcgggcggataatgtttttgttattcgcccacccactttggtatcacgtcctgtgattggaatacagatcgggacagacgtcttttttaatgcccattccctggctaacgggggacctgactctgcagctattgtcagtagtattaatactttttttaatcagccccgctatcgtcacctggagtggtttctcggcggtgacttaaacagggcaccagcccggcttgaaagtgacttgataacagaaggtattgaccgtgatgtggccatagttgcgccgaccgttgccacgcagcgaagcggcagaattctcgattacggggtaatttctgcgagggccgcatctgcatctgcattggttgccagtattttctttcagcgaatgcgttcccagctgtcatccgatcatttcccggtagggttcttcaaaggcgcacactga

SEQ ID NO: 398374 - DNA, 537 bp, Salmonella enterica
atgagaaaatatttgaaaattccggctcaggtattgttatcgtttatctttttccatggaggcccggtattcgctactgatttttcaccagaagtgacatttcgtagcatgactggctttgtttttttaaacgccctgccaggttccattggtgaagatgatcaaactcactttattattaccggcgtatcagatccatcaatttcagcggaggaggctccgggaggtatagttcagttacgggaacctcctggcaggagagtttttccggcatgtgttgcgatttcacgctctatggaagtgttaagagcaacaaactgtaatgatggcttgataacctattttacccttctgccagccagtaacggagcggtacaaataaagagtctcaataccggtgtctgcctggtgggaactgaaggcgaaggaataccttcaacaggcgactgtactgaaacagatcttactgtcagtccggatcacctctggtttatcgcgccgccattcagtgcagcccacatgtcacctctgacataa

SEQ ID NO: 398375 - DNA, 357 bp, Salmonella enterica
gtgctgactgacggcaggctccacaccgatgacacgcccgttccggtactgttgccgggtaataagaagacgaagaccgggcggttgtggatgtatgttcgcgatggccgtaacgcgggttcttcgctggccccggcggtgtggttcgcgtgcagtccggacagaaaaggcatatcccctcaggcccatcttgcaggcttcagtggagtactgcaggctgacgcctacgccgggtgcgacggtcatataaaggaagccgcgtgtcgggcccgtgcccggcgtaaaatccatgatgctcacgttcgcactccctcagcgctcacggatgaagcactgaaacggatcggcgagttgtaa

SEQ ID NO: 398376 - DNA, 135 bp, Salmonella enterica
atgggttatctggcggacatccagtttgttgatgttgccgccgccattgaaatagccgacgacatcatggaactggcgaaaaccgcagaagtgcagagcaggggagagcgaccaacaacggcaaaagtttcataa

SEQ ID NO: 398377 - DNA, 702 bp, Salmonella enterica
atggcaggatgcttccagggatttgcacaagaagggctcgattttcttcaacaggtgcggattgaaaatgataaaacgtggtttgaagagcaccgttttatttacgatcgcagtgtccttacgccgtttcgcgcgctggtggatgatttagcacctgcgatgctggaaattgacccactgctggaaacccgttccgcaatcggcaaaaccttatcacgcgttcatcgtgatacccgtttttcgcatgacaaatccctttatcgtagccggatgtggctgacctttaagcgttctgcgaaaaactggacggatgccccggcgtatttctttgaaatcagtccggatacgttgcgctatgggttagggtattacagcgccagcaagccaaccatggacctgttccgtcatactttaaagcagcgccctaagcagtttctggacgtcgccgaatgttgccgggctccgtttgaactggtcggggaaagctataagcggctgttggtaaaagatctcgaaccaactatttcagactggtaccatcgcaaatcttttgccgccatggtcaccgataacgatgtcgaaaaattgttccatgccgatttggtcaccttgctggcagacggattccgtcagttggaaccgctgtatcagtggttgatgacggtagagacgatgaagcaaatcgatccggctgatttgtaa

SEQ ID NO: 398378 - DNA, 258 bp, Salmonella enterica
atgatgcaacatcaggtcaatgtatcggcacgctttaatccagaaaccttagaacgtgttttacgcgtggtgcgccatcgtggttttcaggtgtgctccatgaatatggaagccgcgaccgatgcgcagaatataaatattgaactgaccgttgccagccaacggcccgtcgaattactgtttagtcaattaagcaaactggtggacgtcgcctgcgtcgagatccagcagcccacatcacaacaaattcgcgcctga

SEQ ID NO: 398379 - DNA, 606 bp, Salmonella enterica
atgacacaatacgcgtattaccatccgagaacctttgagattattgactggatagatacatcttctttagcagttgtattaccagattctataatctcggtaagtgatgaacagtggcaactaaaagataaaaaatgttgggtatgcctgaaccctatcgaaattattactactccgccgcccggcaagttttatcgattgcaggggaataaatgggtatatgcagaacagttatttactgctgccttggaccatgcaaaagcacaggttgtacaagcaataaaaaaacagcgagatgaaatcactgctgattacatcatcatcgacggcaaccatttccacagcgatgctaatagccgtattcagcagttgtctcttacccgaatgggccaggcaaaacaggtaccgacagggttaatgtggcagactaaaaataacggtttgatcgagctgaccaatgacatcgccgcgcagtttgaatccgttacaatggatcatgatatgcgtctgttcgctaacgcgcagcgtcatatcgcagcggtagaggcgctggaggatatccaggcagcgatcgattacgactattcatcaggctggcaaccatga

SEQ ID NO: 398380 - DNA, 135 bp, Salmonella enterica
atgatgaagaaacaggacgtgattatgatgaatatcctccgttggatgtacaaagggcataagcagaatcaggaggcatcttgctatctgttcatatcttttccccctcgactctacggaggcaagaatgtctga

SEQ ID NO: 398381 - DNA, 4188 bp, Salmonella enterica
atgagcggaaaaccggcggcgcgtcagggcgacatgacgcagtacggaggcccggtagtccagggctcggcgggcgtgatgattggcgcacctacgggcgtggcctgttcggtctgtccgggcggcatgacctccggcaacccggtcaacccgctgctgggcgccaaggtacagcccggcgaaacggattttgccctgcccggtccgctgccgtttgtgctctccagaacctacagcagctaccggacgaaaacgcctgcgccggcaggtcttttcggccccggctggaaagcgcccttcgatatccgtttacagatacgcgataaggaactgatactgaacgacaacggcgggcgcagcatccactttgcccctctgtttcccggtgaaacggccttcagccgcagcgagtcgttctggctggcgcggggcggcgtacccgcattacatgaaagtaatccgctgtatcttctctggcagtcgctgccggaagatatccgcaccagcccgcatgtttacctggccaccagcagcttacagggaccgtggtggatactcggctgggctgaacgcgtccctgcgccggatgacgccttacccgccccgctgccgccgtaccggacgctgacggggcttgttgataatttcgggcacacactggcataccaccgggatgcggacggggaatttgccggggaaatcaccgccgtgacggacggcgcaggccgccgcttccgtctggtgctgaccacacaggcacagcgggcggagcagcaccggcagcaggcagtatcagaagccgcatcccccctctcattcccggacaccctgcccgccacggcttacggcgcagacagcggacgccggctggcggaagtgtggctgacccacgacccggaatacccggataatctgcccgccgccccgctggcgcgctatgaatactcgcctcgtggtgaactggcggtggtatatgaccgcagcggtacggcagcacgcgggtttacgtatgacccgccgcatccgggacggatggtggcgcaccgttatgcgggcagaccggagacaggctatcggtatgatgctgccggacgggtggtggagcagcgtaatccggcgggattacgctacacctacacgtatgacaggaataccgtcaccatcaccgacagtctgaaccgccgggaggtgctgcataccgaaggcgaaggcggtctgaaacgggtggtgacgctggagcgcgcagacggcagcgtccttcacagcgaccacgacccggcgggaagacttattgcgcagaccgatgcggcgggccgtaaaacggaataccgtctgagtcccggctccggcctgttaaaggaagtcatcgcgccggacggcagaaaaaccgaattttactacaacagccagcgccagttaaccggtaccgtgtacccggacgggctgcaaagccggcgggaatatgatgcccggggcaggctcacagccgacaccctgcgcgacggcagcacgacacgctatttttatgacagcccgtacagtgaataccctgcggccaccgaagacgccaccggcagccgcaaacagatggtccggagccgctacgggcagctgctgaccttcaccgactgctccgggtatgaaacccgctatgaatatgaccgtttcgggcaactgaccgccgttcaccaggaggaaggaataagcctgtaccaggtttatgacagccgtggcaggctggtcagccggaaagacgcgcagggcagggaaacgcgctatgaatacagcatggcgggcgacctgacggcggtaacctccccggacggcagccgccgcgaagccgcccgtgatgcccgggggaatatcatcagcgccacgcagggggggctgacgcgccggatggaatatgacgccgcaggccgtgtaacacaactgaccagtgaaaacggcagccacacggtattcacttacgatgtgctggaccgcctgacgcaggaaaccggctttgacggcaggacgcagcgttaccgctacagcgccaccgggcaggttgtctgccacgaagaagcagatctgaccacgctctggcattacgatgagtcagaccgcgtgacgcgctgcaccgtgaacggtgaaccggcggagcagtggcgttacaacgaacgcggctggctggaggaaatcagccacctcagcgacggtcatcgggtcgccattcactaccgccgcgacaggcggggccgtcttatcagcgaacgtcagacggtccatgcccctgagacgaatgagcttctctggcagcacgaaacccggcacgattacagcgataagggactggcgaatcgcgtgacgccggacgccctccctgcggtggaatggctgacctggggcagcggttatctggccggcatgaagctcggtgacaccccgcttatcgacttcacccgcgaccgcctgcaccgcgaaacgcggcgctgctttggtgagtacgaactgaccacggtccggacaccgggcggtcagttacagcgccatcacctgaaccttccgcagcttaaccgtgagtatacctggagctgcggcgggcagcttgtccgcatctgcggacagcatgagacgcgggattatcagtacagcgaaaccgggcggttactccgcacgcgcattacatcgccccacagtgacctggagcagtggacgttcaccgacccggcgggcaaccggacagcggcgcgggacaaatacccggtgctgccggaaagcttcccggataaccgcatcagccaggatgtcgataacgtttatcattacgatgaacacggcagactgacggaaaaggacgagcgccggatacgcccgcagggcagcctgtcgcaccattacgggtatgataaccggcaccggctgacgcactaccgccagatgcaacagggcagcgtgctgacggaaagccgctatctttacgacccgctgggccgccgcaccggtaaacgggtatggaaaagccaggaggaacgcgaccttaacggggacggatatctctggctgaaccccacgccggaggtgacgtggtacggctgggacagcgaccggctgaccaccacgcagacggacgacacgcgcattcagacggtataccagccggggagctttacgccgttattccgcactgaaacggcaactgaagcgctggcaaaaacgcatcacaggagcctggcggaaaaactccagcaggatgcggggatggcgtttgtgccggagctggtggcgctgctggataacctggagcgggagctgaacgcaggccaggtgagcgaactgagccggcagtggctggcgcagtgtgggttaactccggagcagatgaagagccagttggcgccggcgtatacgccggcgagaaaaatccatctgtaccactgcgaccaccgtggcctgccgctggcgctgattgacgttaagggacggattgcgtggcgcgcggagtttgatgaatgggggaatatgctgcgggagaataacccggataacctgcaacagctaatccggctgccgggacagcagtatgatgaggaatcggggctgcactataaccggcaccggtattatgatccgggacaggggcggtatatcacgcaggacccgacagggctggcagggggatggaatttttatcagtatccactaaatccagtatcaggaatagatccttttggactgtcagggatggactcacttaatttatttcttagtcagcctggattgaagtctgaattaatgaatgtaatgtctagtgagccttggtatatgaatgagggagcttatagtattcttagtaagacccacaatgatatgaaaagattgaatttagctgatagcgatcagttttttcattgcagtgcattttgtcgcgtatctaaatcaagagccgcatctgggttatatgcaacatttctgggtgggttaaaagaaaaaagagatgcattcttaaataattttggattgtatggaaaaggcggtttatctccatatgacatggcaatggacaatgcagcggatctcaaagttaatatgcacggcattacatgtccttccgagcaatcgtgtcctgataggtgtaagcaatatataaatcctacacataaaaatacaattaatgtattaattgaagaaggatatcttgagtaa

SEQ ID NO: 398382 - DNA, 522 bp, Salmonella enterica
atgaacggattggtaccaaagcactttgcgtgtggtgtcgcgattattgttgtttttttcattgtttacgttgtaaaaaatatattaccttcaattgagattaatgagatggaatttgaaaattattcttccatacccgataattcgggtgttaaaacatggttgccaatgtttttcccaaaaaaatcagaaaatattgagttttattcaaacttggatttgaataaattcggggtgaaattttcccttaatgatagtaataatcaaacttttaagagggaattgattcattatgcatctctggatggggaaacttacataaaaaaagaagataagctagtgaataaaacttggtgcaaaattgaaaaaaatacagatgggcgcgaatcattatatcttatagggaattataaggatgataatacttattacttaataaatgtaacgggacatagtggacgtgaagataaatttaaagaaaagttaagtgaagagaaaatgacattatgtaattttgaatga

SEQ ID NO: 398383 - DNA, 423 bp, Salmonella enterica
atgaatgggcgtacaagtacctggcttggtggacatggaggtatagtaggatatgatagaaagggcttaactaaatattatgaatatggtcgttataaccctagtctagaaggtattgttggtgtcaaattaccaactgatgatggaaatatcagaaatgttattatccctgatttggttttagataaagatggtaatcccactaatgaatcacttgaaaaactcaaggtggctttatcggcaaaagccggaaagaatactaatgcagagctaacatgcagtaaagatgtagatgagaaaaaaatgtatgaatatatcaataaggtggctaatgataaaaaaagagataaatataattggaatccattatcaccaaatcagtgtcgtagttttgctgacgatgttttcgatgcgggggactga

SEQ ID NO: 398384 - DNA, 201 bp, Salmonella enterica
atgagtttctgttatactataacaatatgtcgttatagcgatccagattcttttcatcgttccgaagcattaagtggggatatttccatagccagaagaatgagggcttgtttaaaggtgatgataaaaatagatgtatccctgacggatatgggggcctcgttatataagttcatcgaaatgtgttttgttttgttttga

SEQ ID NO: 398385 - DNA, 213 bp, Salmonella enterica
atgaccaaagcagaaactgaacactatttacacggaatttatctagaatggattagtgaaaatatgaataccagcgaaaaggaattatcttttcatggatatattaatcacctcccaaacttttcaacgtttagatttggtgctgcacgctcctatcaacaaacagcaatatgggttaaagaatggaataaacaattaggcattaacagctaa

SEQ ID NO: 398386 - DNA, 369 bp, Salmonella enterica
atgagcgataaaaaatttggcgtctttttctggcgcaaaggtgaaaaaactgaagatgtaccatccgatataaatattgcaaataagggggttaagccaagaaaggtatttactgattatattgaggggatgagattcaaagacaaaatgaatgcaacaataccaaaccctcaaaaagaaaaatatgaatatgtactatcagaaattgttgaacctgataaaaatgagactaaaaatctgtttaagtcgggaaaccttaccgaagcattgcgaacgcggcgcgatataaagcggcgtaatgagatggagagtatggttaaacaaggtattagtgattatttaaatgcaaacttgggaattaaaaaatga

SEQ ID NO: 398387 - DNA, 258 bp, Salmonella enterica
atgaccgagaaaaaaacgcttattcgacttaccgacagtgaaattaaaaaattattgacagaacggcgtgatgaagcaatttcaaagtataaaattgaagtaagcaaatttctggaaggggatggggttggaggatttcgccccaactacagcaaattaaccgtaaatgatgtggtaacacatggagagttagccatgcatcttctgaatgatgttttattggcacaacagaatcttgacaggggatatgcaaaatga

SEQ ID NO: 398388 - DNA, 165 bp, Salmonella enterica
atgccagttaagcgtattatatgctcacttgacgaacaagagttaagtattattgagacttataaggagtattataaaaataaatatggtgttcgattaaatagaactgcaattatcaaaatgctaattagtcgtttgccaactgaaattgcagcatcaaaataa

SEQ ID NO: 398389 - DNA, 360 bp, Salmonella enterica
atgatcaagcctgtcaacacatcgtccataagcaaagaagaagcactctcattaatcaagcaagcagaagctaacctattgaaagctaacgaaagactagattacctaaccagaaaaacatatttaatccaaataactattaaaaataaaacttattttttatgtgacgatgattctttaagtaaaaatttcggaggggcaattaaattcaaacgaaaatgcgatgcacaacaagaattaatgttttggcttgaacgaattgatgccgttggaagtcctaatcttaaaagcgaaattgtcattgaaaaagatttgcttagaaattttatctcacacactgagaaacaaattaacaattaa

SEQ ID NO: 398390 - DNA, 828 bp, Salmonella enterica
atgaatatattaccaattatagttttatataaatgtcagcttgaaaattcagaatgtataaatacattattgagacttgataatgtttctcatcttaaggagatttttgtatataacaattcccctggtattatatctattcctgatcaatatatgggcataaatgttcataagattaatgatcacgaaaattctggagtaagtaaagcatataatgaagggttgaagtttgctaaaaagatgaactatgaatatgttcttttacttgaccaggatacgtcgctcccaggtgatgcattagttatttataaagagagtttgatagctaataaatatattaaactgttttgccctatactaaaaaagaatactggtgtaatttgttcgccattactctatagattacatagaggttttccggttaatcacttcaaagcaggaaaatacgaatttgatgatttcactccgattaatagtggcatgcttttaaatgttgatgccgctcttgaatgtggtggttataatgaagaagtattcttggattttagtgactttcaatttattgaacggttcaaaaaacataatccttgcttttatgttgttccattaattttatatcaagattgttctggggatgaagttgatccctcgaagctgttgattagatttagactatattgtcaatgtgcgaagaaatgtgtaagagaaaaaattcaggacgattttatctattttttgatggtttttgcaagagcagtaaaaatggcggtcaaaactaagagaatagattttattataaatttttataaatattatattcgaggatga

SEQ ID NO: 398391 - DNA, 633 bp, Salmonella enterica
atgataaataataaatgtaaatctccatattttgtattaaccgatggagatataaaatttccgaatattgaatcggcaggatgttggttaactagattggtttcttatatgataagatatcaatgtgttggtaagattggtatttcattaaactgggaactaattgaaagtgatccattttatgaggaaatttataaccaagaaaaaaggctgtaccatgaaaataaaaagataggtgagctttttatttcgccagtagatactaccgctgcgatctatcgttgggattggtctattagtggctataaattttatcctgaccacataagatatcttcgtccagaattatattcatgtagaactcctaaaaattttaatgcttttcatctgggttggttgaactataaaaagaaagacagcactgatatcaaaaagctagatgaaaaaattaaatgttttactataattggcgctgacttaaaaaaaacacaaattgccattgcaagtaacgaaataaaattctttaataagatattttatagacctatgaaggttttctggagccttagacggattatatttattttattctatacttttagaaaaggcatcaggtgttatgataatcattga

SEQ ID NO: 398392 - DNA, 846 bp, Salmonella enterica
atgtcaggagtactaatatttaatacggattatataatcataagtctatttattggattatcaacgattactatttactcatcgtatctaatgtttatacaagcagtagccattattctatctacaatagtagctccgttaggtgcatccataggtaattatttacatagaacaaatatacatgtggcatatcgtaaattcaacataattaatattggtttttttgcattagcaaccgttgcttgtgtaatatataataattcatcgacaaatttggttcagatgtggatggggaatagtgttatgtttccgtctgatgtagtaatactccttgcaattaatcttttttgtttaattgccagaagcgctgttgatgtctttaaggtagcattcggttatatgtcagatatacacttgccccttattgaagggttcgcgaatctactcttttctttaatattagtaaatttctatggagtcaagggagttatttatggcacaatattttcgaatattgccatcataatgatggctcgcccattatatctatatatttatgcattcaaacttggggcaaagaagttcgttaaagaccactaccgattatggattataacgatactttttttgctgataatctataaaggatatgataagtgtttatatatactaattaataaaattgcatttactcaatgggatataaataatacgctcgttcattttttaattaatcaatttatatttttgatagttacatcgatagtcacttcattcgtttatttgctttttttccctaaactgttcctcgttattatatccttcttaaggaagaaatatgaataa

SEQ ID NO: 398393 - DNA, 471 bp, Salmonella enterica
atgaaaactaattttatcatcatgggatgcctgttttttagcccattagtcttggcaggtcaggatactttacactatgcggattttattaatgagatgtataaagaatccgacgtgatcaaggctaaggcgctggagcttgaatcagagttgttacgtgcgaaacaaaccgacctctattttctgcctaaaatgtccgccgaaagtaagtataaaacggatacctctcgaggtgacataacggattctaaaataactgctagctctttgatttttagcacgacaatgtctgaccgttttaaagagaaaaatagtcgaattcatagtgctgaattgtcgcttgtctcagcaaatgcttttgttattacttcaatatttttaatagtggtatttatttgtaacaaattctcggcaatggtattgctatttaccactaatagctcggccaggtctgtattatctggaatataa

SEQ ID NO: 398394 - DNA, 237 bp, Salmonella enterica
atggtagcgaatgaaaaaattattgcggggaatgaacacttaatggatctaaacgttggtgttagcgcattactgacattaatgaagaaaaactctgaatttaatgaggaaatggaaaataagaagttggaacagcttaaagtcattattgacaggcaggaaaactatttccatgaacagtataagttcaagaaaaaaatgaagcgggttgttgaggtgctgtctaatgaaaactaa

SEQ ID NO: 398395 - DNA, 696 bp, Salmonella enterica
atgtacactttagtcttgcgttgccgcgatgcaattaagcctggcactatccctcacactttccgaaaatgggttacttctgaagttcttcccgccataagaaaacatggtgtatacgttaagacgcgtaaaaccacagtagaagaacgcactccgctgcgcgacgcagtaaacatgttggttggtaagaaaggactccgttatgacgatgcttacaatatggttcatcagcgctttggcattgacagtattgacgaactcgaactggagcaaattccgattgccgtagagtatatccatcgcatcgtactggacggtgaattcatcggtaagcatgaagaactaccaactcctgcactggatattaattatcctctgacgtggtggaaccagtacagccatgttttgaagttccatggcatgaatccgttcagtcataccgaggcgtgttcgctgccagtaaaaatgctttatggtgatgcggcagatgccccgtctcctacgttgaagctgatttattttctcatgcagcaggggtacgacatgagcgcaatcaaattggagatactggcgtatcgtcattatcttgaagttatgcattccagacttgaaagaattaaccaggtgtcggagtggatcaaggatggctctacgccgttcagaatcagccctccaatgaagcaagaatggcgctaa

SEQ ID NO: 398396 - DNA, 291 bp, Salmonella enterica
  misc_feature (193)..(202): n is a, c, g, or t
atgaagagtttagcaaaagcaaatgaagatttcaccatcttcaattttggcggcaaagacattcgtgtagccaataaaaatggtgaaccgtggtttgtagcaaaggatgtctgtgatgtgcttgggattgcaaacaatcgtgatggaattgctcgtctggacgacgacgaaaaggatgtcgctttaaccgacnnnnnnnnnnaccgacacccttggtgggcagcaagaactggccgtagtaagcgaatctggaatgtacactttagtcttgcgttgccgcgatgcaattaa

SEQ ID NO: 398397 - DNA, 225 bp, Salmonella enterica
atgagcgagataaagccgtgtccattttgtggatgcaaggccgattgggttaatcagcaattcaaagaatttaacttcggcggtcatcaaatcgcctgcattaacccggcttgccaggcaagtgggcgatattcaggtcagcaagagaaagcacttaaagcatggaaccagagggtaaaccatgaagcaaacataccagcttcgcaacgaagcgatcagaaataa

SEQ ID NO: 398398 - DNA, 174 bp, Salmonella enterica
atgaagcgtattgtgaagttttttctactcatgttgctgagcatcatggtgaatatggttgcagcgccagcgatggcatataactgtatttcgtctggagcttcaggtgaggactgtgaagctccagacgaaatacagttatatggcgagtttgcttactggacatgtttttag

SEQ ID NO: 398399 - DNA, 564 bp, Salmonella enterica
atggatgtactaatcagcatactttcaatagcgcttgctatctacgctgttatcagaatttgctctaaggcacaaagcactaaaacaaagtttttaaaatctatatgtgcgctttggtattttctgtatgcgggtgggattattgtatcttcagactatgaggagataggtgtagtactacttattgttggtacggtagtccttttctatcctaaaaaacataatgcggctacatctacaaagttttgctcagataataataaaaccgaaagcgcgagccatgatgactccgaggatgtagtatttagaaatcaggttgatttgagtaaacataagcatttgctaaagatagcttttacatatgagaacactaacggcgcggttaaatatagagaggtcgatgttaaaaaatttgacggtttatatattgaagggtattgccacagcagaaaacaatatcgaacgtttagagtagataggattgttgatggaattacacttcgtgatactggtgagttatttactacggaagaatgggacgaacaattttatttgacggtttag

SEQ ID NO: 398400 - DNA, 843 bp, Salmonella enterica
atgaatgatgaagatttgaatacgcaagatgtgattgagcggataagttcggcgtatggcgtcagcacgcaaagggctttggcggaagtgcttggtgtcccgtcaaacagcgtcagcacttgggttcagcgaaatagttttcccggcaaagctatcattcagtgctcattagatactggtgccgatttaaactggctgctgactggtcaagtttcaagtttgcatttgcaagattcgtctccgctgaaaggaaagcctctttatgacgagattttagcgagtggtggaaaacctgttttaaggcgcatccttgatgcgtacggttttacaatgcaaaaggagcttggggatttgttggatatctcctctggcactatcagcacttgggtaagacgaaatttctttcccggtgatgtggtcgtgacatgcgcacttgatactggtgtatcgctggaatggttagcgaccggaaagggaaacatgcgagaaagtaaggaggctagcatttcggacgttttaacgataaaaaaatcccgccttgaatcgggtgaactaaaagacgctggacgttggcatcctgacccctcaatgattccggcaagcgctgaggatttagtctttgttgaaggggtaaattcatcctggcttgttgattgctctgcctcaaacattgccaatggccgctggttaattagcattgacggcgcgctcgatgtttttgatgtagtcaggttgccgggtggaaaggcaaggctatcgaataagtttgcggagtttgaatgtaacttgtctgacattactccttctggggtgataatttttactttggagaagcatgtataa

SEQ ID NO: 398401 - DNA, 633 bp, Salmonella enterica
atgccatcagtttttcttaacctgtcaggaagcagtgtgttacctgaacatgaaaggcagattttgcgggagctggccagagagactcccgaccacgacagacttaaactggttgtgggtaacagagagtatgaagttagttacataccctggttggatggattcagcatcagttattctccgttaagccgaagtgcagagcgtgttgccagtcaactggagatgcagttgaatggagggaggactttttcacaagttcgggtcgacaatcttatcgctaatccgcccggaggtagctggctacaccataatgaactgcaggaaaaagtatcttcatgtgcatttaccgtcaacaaaaatgagtttccttgccaggatgagtatcttgaatgtccggttacattgtgtgtacccgataaaggtgtttttgttaagatatccttggattcaaatgtctgttgtttatttgattatgatacgctgaatcagctggttacacaggatgaacctcatccgataagcaggaaagtaattacggaacattttattgtgcccagagatgaatgtcatttcgatacagagcagagtaaatttgtctggcatggccctgaagagaactacacttatttatga

SEQ ID NO: 398402 - DNA, 1227 bp, Salmonella enterica
atggcttcaggcataaataaactgactgacagaaaattacggtcgctgcttggtgttgcctctggaaaagaggtaaagcttgccgatggtggtgggttaatggtcaggataacgaaatctggggtaattagctggttcttcagatacaggactggcgggcgtaactgtgaaccccatcggctaactttgggtaagtaccctgatattagtctgaagcaggccagggatcttcgtgaccagtgtcgttcctggctggctgatggacgcgatcccaaatttcagttgaagctcaccaaaagcgaaacactgaagccagtaaccgtcagggaggcgctggagtattggataagcggatatgccgaggacaaccgcgcgaatgttgagaggcataaagccgaactgaggaaacatatttatccctatattggtgatatggcgctggctgattgtgaaacacgatactggttacagtgctttgacaggatgaaaaagaaggctccggttgctgccggatatgtgttccagatgtgcaagcaggcgttgaagttctgccgcgtccggcggtacgctatcagtactgcgctggaggatttaacaattcctgatgtaggcaagaagcagtccagaagggatcgtgtactcaatgataaggaggtcggtgatttatggtctgtggtcacggaaggccagtgctttcgcccctaccatatcaacctgataaaaatcatcatggtgtttggctgccgtagtcaggaggctcgtttatcggagtggaaagaatgggatcgtgataaatgggtctggacagtacccaaagaacacagcaagggtggagacagaattaccagaccagtgccagaggcgatgagactttacattgaacaattgtacgaggagcatcataagtctggtttattgttgggagaaatgaaatcgccggagactgtcagtcagtgggggcgtcaggtttataaaaaactcggtcatgaagaaaaatggacgttacacgatctgcgccggacactggcgactcatatgaataatatgggaatagctccgcatgttgttgagcaactgcttgggcactcaatgcccggtgtcatggcaatttataaccgcagtcaatatttgtcagagaagcttgatgcgctgaataaatggtatgacagacttaatattttgtctggcgggttcactaatattgttttgttgaatagggctgaataa

SEQ ID NO: 398403 - DNA, 651 bp, Salmonella enterica
atgactagttttcttaaattgggtattttcgagcgagaggccaaagccccggaactaaatattaaacaacttgcactactaatgtgtggggtagatccgacagttaaaactgctgatatccctgaggcgaaagttgaagcttataatatatattatagacaattgagtcgatggttatcagcatctaaattatttagaggtggaaactcaacagcctatcccgcagactatatgtttgctttggcatatcctcttattgacgaagatattaccccacaacccataaaggacagatgtcttgcagcggtagctataattgcaaatcaaaacaaaggtaaagatcatctttatgctatgggaggggatgagttgctgcaggtaggtattgcactgaaaagcagtaagcgtggcttgcatcgtaaggaggatgaaaaggaatataatgataaattgatggggatgctggtcaagcttatagcacataagataggccattcgtttggtacctccaaaaaaccaagcatctcagctatcttaaatgaactatataaattagctgatgaggaaggtatatctaaaactggattatctaaatcagcaatatatgagaaaatccgtaaggcattaaattcaatttattatacggaatga

SEQ ID NO: 398404 - DNA, 960 bp, Salmonella enterica
atgtggccagttggtgattacacgggacgtattacgcccacagcatcagaagcattccctgcagcaaacacgagctattataccttatggcaaacctgggctagtgaagcaattgttggagaaggggaacaacgagatatagcggttgaaaggttgtgtgcttgtctttccaatcagaaaagtattcttgatttaggggatcttagcctacacactttacccctattgcctgcatgtgtttcaactttgaacatcagtaataatcatttatcgacccttccagatctacccgaaggtttaagagaccttacttgcgcaggcaatacactgacctcacttcccgcgctccctccaactttacaagcacttgattgctcgcaaaataaattatctgaactacaaaatgtccctcccgcgttaacggcgctcaattgctcaaaaaaccgttttagagagcttcctcatctacctgataccctccaatcattagattgttcaggtaatatgatagcctcattttcagaattacctgataacttacaaatactcgattgttcaggtaatagtcttgaagtcctgccggatctccccccttcattgaaaactcttaattgtgctgtcaataaattaataggctttccatttatgcctttttcgctgcaaacactcaattgctcatacaatgaactcaccgggcttcctccttttcctgattcactgataaatctcgacatcgcctataatgagtttaattctctaccaccactttctccttcattggctacattcgtatgtaccagtaatccacttcaccaggttccagtactgcctccttcattacaaaacttacctgcgccagcacatcgcttacggcactcccgccgttgccatctacgctacaggaacttcattgccagaataatgaccttatcttactgcctgagttgcctgtttcattga

SEQ ID NO: 398405 - DNA, 780 bp, Salmonella enterica
gtgaaagagaatcaaataacagcatcgatggcgaaagatattgcctttaagcttggcgcagtcctgaacgacgaagaagcagaaatttttgccgatggctataacgccgccctgcttaaagttaacaaaaacgcgtcaactgaattaccaaattacgctaatttatcaaccagttctcaggctgcacctgatgacagcgtcctgcttccatgcccattctgcggatcaccggctgaacactaccctgatggtgatatggaaggttacatcatcatgtgcggtaacaaaaatggagactgtaacctccaggcatttgggttcaccactccggaggaggcagagaaggcgtggaacactcgcgccgccatgcttcagggtggccaacctgtaagtaatcatgatgagttggcgctgtattatctgcaaggtcaaaaagacggccttgaatgggctgcgcagcttgcagaagcaaaccacccgaatacaggcgactggctttacgatgacccgatggatctggctaaagctatcagaaaaggtccagatatgcccgagttcgctggaagctctccagtaactcaggatggttggataagctgtagtgagcgaatgccggataatgatgaatctaaacccatcgcaatttttaccggaaaatgtctgggtcaggggatattcgttgctacatacgacgatgatgggttctttgactattgggagggtatggaaattatcggtgtaacccactggatgccgctaccagaaccaccgcaaaaataa

SEQ ID NO: 398406 - DNA, 603 bp, Salmonella enterica
atgggtaaaacggtgatctgcattgatacttatcctgaacccctgaaaacccatcctgatattaatataaaaaccggcacttatgtttgtgaaccgctatgttgtttgttccctgagcggttgttactctcgctatccagcgacataacattttccattgatttaaaacagataaaagagaaactcatcgatatggcagagaatggaactttatgtaactggaaggaacaggaaagaaaagccgctatctcctccagaatttataggggcataatacaagcaggtgtaacagctattgatgaagctaccaaaaatacaatagcctcaaaggttattgaggctactaacttaaagaatgcaacatttgatgcaaattacacgcaaagctcaattacgcaaatggtttattcatgtttgtttaagaatgacatattaatgaatatacttgatgaacaatcctgtcatgacctgctatgtttaaacgaccttactgaatatgtagcgctacaaattcataattgtcttttttctgaagacttatcttcactcgttaaaattacagaaaacgaggctcatctatactataaacatcatcatttatag

SEQ ID NO: 398407 - DNA, 258 bp, Salmonella enterica; identical to SEQ ID NO: 392677

SEQ ID NO: 398408 - DNA, 324 bp, Salmonella enterica
atgatgaaatttgacgaattagtacaagatatcgaaacgctgcttgcgccagggagcccaatgttaaagagtgacgaaacgtcttcagtcgaactcgagcagataccgcaacgagtgctctttgagatcggacgtgcgagtctggaaattggacaattgcgacaacttaaaacgggggacgttttgcctgtaggtggatgctttgcgccagaggtgacgataagggtaaatgaccgtgttattgggcaaggtgagttgattgcctgtgggaatgaattcatggtgcgtatcacacgttggtatctatccaaaaatacagtgtaa

SEQ ID NO: 398409 - DNA, 558 bp, Salmonella enterica; identical to SEQ ID NO: 392637

SEQ ID NO: 398410 - DNA, 270 bp, Salmonella enterica; identical to SEQ ID NO: 392703

SEQ ID NO: 398411 - DNA, 1632 bp, Salmonella enterica
atgcctataattaatggaaataaccctcctgctatccccgtggctccgcctctgccaaacagcaactctgcatcttcattacataatggggccgggcatggtcagcctcagcagacaataaccagctctggcgcattaaatcagcggtcaacgctgacaccgctttctcctgtacccggcacttccagtagtactggcaatgtttcgcacctcccgtcctcgccacgtaacttaaccttaccgagtaccgttaccttacacaacgaattagaagtaacgaacgattggtcatcactgaacctgttacataaagatattggttccaggggatttagggttgagaaaagtagcgatggtaccgttcatgctattggagaaaaagatggcacaagttttgatcgcatactctcacccgaagaagtcgaaggcctggcagcaataggttcgggtaacgatcgatttgtttttagtggcaaccgtggtggcgctggccatgtcatggtcactgctgcatctgattttggtcttgcgcgcgaagccattgtcaaaaaactggacagacaacataccactgatgctggtactgatccgataccatctcacaactcctctggcgcgatggagatcggtactgacgcgcaaccattgcctgagtcttccagcccattaaagagcgaccccaaactttgggtatcattaggtgtcattactgccggtttagttggtttggccgttacggggatagttcaggcaacagccttaacgccggcaccggaagaaccacaagatactgatcctgatgccgccgctgcgaatgcagagaaggcggcaagagaccagctcactcaggaggcatacaaggacccgaataatcagacggttataattgatcagaatggaaatgccatgccttcaggtgatcttaaagatgatgttctggcagccatagagcagcaggctaaagctgccggagaagaagcaaaggccaaagcgattgaagataatgccactgcacaaagaaactacacagaacagaaagaaaaacacgatcgcgaaatgcttctatcctccgggattggctacggaatcagctctgcattgattctggggggaacggcgggattaggcacgacgatagcgcttcatcaccggaacaataacggcgctgagcaacccccaattgagaataactcaaatagttttcccatgaatccttttggttcagttaatagcgctagcccggcagcaggtcgctctgaagaacccgaccccatttaccaaaacacgttgaatgtcaggaaccccacccctgaggaagatccttcagcgctttattccagggttgtacccagggctgaagatgtacaatctctctctgactcggagtcttttgatagcgtttccctgaactcggttcctgaggctatatacgctgagctggatccaactacattaggcgcaccaggtctttcaccctcctcagaaccaacgctttactcagagatgcagcagaacccggaaagagctaattttgatgcaatcagaagtcggatcgaaggcgtgtttagccgtaaccccacatcaccttctgcaggagcagcaagactaaccggccctgctaactttgtctaa

SEQ ID NO: 398412 - DNA, 969 bp, Salmonella enterica; identical to SEQ ID NO: 392753

SEQ ID NO: 398413 - DNA, 216 bp, Salmonella enterica; identical to SEQ ID NO: 397572

SEQ ID NO: 398414 - DNA, 468 bp, Salmonella enterica
atgcattatttttttagcatttttatctggtcgcttagtataagttcagcgtgggctgattgctggcttcaggctgaaaaaatgttcaatattgaatccgaactactttacgctatcgcccagcaggaatcggcgatgaaaccaggcgccattggtcataaccgggatggttctaccgatcttggcctgatgcaaattaatagctcccatatgaaaagactgaaaaaaatggggattagtgaaaaacagctattacaggatccctgcatttctgtcattgttggcgcatccattttatcagatatgatgaaaatctacggttatagttgggaggccgttggggcttataatgccgggacgtcaccgaaaagagcagatataaggaaacgttatgctaaaaaaatttgggagaattacagaaaattaaaagagatgccagcagacgagaagcttaccagactattttaa

SEQ ID NO: 398415 - DNA, 528 bp, Salmonella enterica
atgttcccactcaatggagaatataattcgtgtcagatatcagctagcgaagatatcataattattattgatggccgagttttgattcagggagtctggaaaggttttgaggcgctcatgcagcattatccacaggctcgtcgaatctggctcacacgcagagatattggaaaactttatccacctggctgcgatagagaccctgatatcgatcccgatttagcaaggcctgtttttattgagcatttcattaaatacgcttgcgcaaacgatgtagtgggcggcgaactcgcgccgttgacaaaaaaggaggaggagctgttatggcactttttatacaaaaagtcgatgagtcagatcgccagtagctatggcattagtcgtaagactttgtatattcatagattgcgtatctgtcgtaaatatggcttcaaacgttttttccatttgctatttatttaccaaagaagtcgccatatgttcgcatctaaaatttgccatgtagacaaaaatgccgatcaggcttga

SEQ ID NO: 398416 - DNA, 513 bp, Salmonella enterica
atgagaaatgattttagtagcatcggtctacagccatctgacatcgtaactcgccctcgggtgggtgtatcgttgtctgttgccattgagcctataaaaaaagtaacctcagtaaaggtgagtagtgaaaacgttaatggcaccctgactcgggagaaaatattttacaaaattaaacgtcgcagcttatttgtggtattaacaggagccattattctgacattgctctatggtatgtttaatatatataatgcacctgttcgtaacagctctgatagtttttttacatatcttggcgaatataacgactatgtaatctataaaacaaaagaggataaggtcacgttaagcgaagtggtttttgcttataactcgctaaaaattaaaacttacaggcagaatggacgccatctttattatatcagggaacctaatatgaatatttttctgcaatgtttaaatcctgttgaaatggcggtgccaaaatgtattacagtaaaagaacgttactga

SEQ ID NO: 398417 - DNA, 462 bp, Salmonella enterica
atggttttggtttcgagcagcttttcttttgggtgcagctctggcaccagcgcttcgccctgctcgttgattgcagggaacgccagcaccttagctcgtggcgtgatttccactacacgcccggaaaggtcatctgtcgcccagcgggtagccatgatgatttcgccgctgttcttcgacaggcgcgttttgaacgtcgaaacgtaccagttccagatagatttttttgtcgtcggactgagtgcttctttggcgttttttatcgggtcatcaatgatgccgagatcgattttcttacctgttaacggaccgcctacacccgcacagacatacgtccccttatggttggctatgccgaattcgtcagtgttgcgctttactgccacaccatcagcaggcttattacccagccatgctcccgggaatatgtttcggtattcaggcgaggacataatacgctga

SEQ ID NO: 398418 - DNA, 456 bp, Salmonella enterica
ttggtctccagtagcttatcgagtgggtgcagctccggtaccagcgcttcgccccgttcgttaatcgcagggaacgctaacactttagcttttgaactattggcgataacgcgaccagacaaatcatccgttgcccagcgggtcgccatgatgatttcgccgctgtttttcgacaggcgggttttaaacgtggaaacgtaccagttccagatagatttcttagtcgtcgggctgagtgcttctttggcgttttttatcggatcatcgatgataccgagatcgattttcttacccgtcaacggaccgcccacgcccgcgcaaacatatgtccccttatggttggctatgccgaattcatcagtattgcgctttactgccacaccatcagcaggcttattacccagccatgcgcccgggaagatgtttcggtattcaggcgaggacataatacgctga

SEQ ID NO: 398419 - DNA, 711 bp, Salmonella enterica
atgcacaccctcaccctaaaacgcgtacttgggttcactatcgtcattttgctgttactggcgctgtttatctggggaatcggtctggagacgctgaaagcgcgtcaggtcgatctgctgtatctggggcaacggcatttgatactggtctttacgtccatgttttttgctttactggtcggtatcccgagcgggattttactcagccgtcctgcggcaaaaggatttgctgaatatgtcatgcaaatctttaatgttggtaataccttgccgccgctggccgtcctggctttagcgatggtgattatcgggatcggcgatactcccgccattgtcgcgctatttctggcctcccttctgcctatcgtccgcaatacctatgcgggcctctgttccgttcccgcctcactgattgaagcggcaaacgggattgggatgacaaaatggcagcggcttcgccaggtagagctacctaatgcgtggccagtgatgctgtccggtattcgcatcgcgaccgccatcaatgtcggcaccgcgccgctggcctttctgatcggcgccagtagctacggcgagctgattttcccggggatttatcttaacgattttccgacgttgattctcggtgcaacggccacggcgttattcgcgctgattcttgacactctgcttgcctggcttgggcgacgccttagccctcataccgcctga

SEQ ID NO: 398420 - DNA, 2139 bp, Salmonella enterica
  misc_feature (2102)..(2111): n is a, c, g, or t
atgaaggctcacattaaaatcgacttaccacagcaacttattgactataaaccagttactgggggcccgaaaaagggtaaaagtcctgttaacagaaatgcccattttgcaaaagtgaggcatagtttagaatctgctataaatatatataatgaaagaaaaaaaacagttgagatgttattaggaaaagggaatgaacctcaaaaggtagtaataacttttcaagaaaacccagaaattaaagaacgaatggttttaaaaagtttagatgcaaatgggatgaaaataatgtctgttaatactatagatggtatgacaatggcaaacgtttctgtgcccgtagacggtttttctaaacttgaaaagattctgcaagaatatgctactgagaatacaaaaaaaggtaacccgaagaatcaaccatttatagaatccatatctaatatagaatatggcaattttcgggctttatggtttagtcaggatgagttccctgatgatatctataagatacacgatcttgagttatggttggactcaagtgatatagaactagaaatacttctgaataaatttgaacaactatgtggtcagttggggataacagttaaacaaggcacgcttagttttaaagatagagttgtaaaaatagtctgtgcttctatgcatcagttaatgctgcttcaacagatgacggagattatttcggaagttcggccctcgaaagctgtgagtgtagattttcttgatttgaaaccagctgaagcttttcagtgggttaatggtatgacttatcgaaaactaaatacattaattcctatttgcatacttgatacaggtatcaactctcagcacccactgcttaatacatttgtaaatcaaaatgcactagttgtagccgaacctcagtgggcgaatagcgatttaaaaggtcatggaaccggtattgctggattagcattatttggtgatcttaaattcgcaatacagtctaaagaattgccgataagtggagttattgagtcagctaaaattttacctgatactggcgtaaatgagcctcaactttatggcgctattaccactgatgctatctacaatatagaagccaaacaaccctcagaacgtcggatatttacgatggctgtgtcctctccaaatactttaagagggatgcctactagttggtccgcagcaattgacagacttgctgcaggtagtcctgatgatccagagaaaagattatttatattatctgcaggcaatcttccacctaatctaatttctgattatccggatgcaaatataacctattcaattgaagatcccgctaattcatataatgctctaacagttggatattgggcaagtgaagctaatattgtaacaagtggttatgatgttattgctgaattaactgatttaggaccatcctctacaacatcaagaatatggaaaaataactcaccatataaacctgatgtcgtttttgaaggagggaattttggttatgatccacatctcaattttacggcaaatttagaagaacttagcttattaacactttcgcatgaattcgctaatggtgagtattttagcagtttctctgaaacaagcgccgccacaggtatggccgcatttttcatttctaaactatggagtcaatatccaaattattggcctgaaacaatccgggccttagttgttcatagtgcttcatggccaagtaaaattcttgaaagacatacacctttgcgtacaaagcagaatgtggaatctcttttaagaatgtcagggtatggcttcccaaatttggctaaagcgatttcaagcggcgatcagtctgttaatttaatagttgaagattcaattcagccctacacagttgatggcaagttaaataaaatgattctttactcattgccttggccttcttctgaattagaaaaaattggtgaagaagatgtaaagttaagagtaaccttatcttattttgtagagcctaatccaggtgagagaggctgggataacaaatataaatatggatctttcggtttaagatttgattttaatagccctggtgaagaatctggagagtttgnnnnnnnnnnggctattaggaccgaccttaaggaatag

SEQ ID NO: 398421 - DNA, 1923 bp, Salmonella enterica; identical to SEQ ID NO: 394060

SEQ ID NO: 398422 - DNA, 423 bp, Salmonella enterica
atgcttacactacaaaaaacaaaggaacttaaagggatttctattgttctcgttatgttatttcaccttgtaaccattcacaaaacaactctgccttatgagcttagatgggtggcatcatttggtgtgtctgtttttcttcttgtgtcaggatatggactattcctttctgaaaaaagaaatggcttgaaagatttttttaaaaaaagattttcatctgtatacataccatttgttgttgctacatttttaataggggtgctaaatgaggtatcatacaaatcatttactgatgtacttaaaacagtattatttataaacccaacactccctgttgatggtacaatgtggtttatctatttcatttgtttttggtatcttgcattttacattatatttaaactgtctcttatacacatctga

SEQ ID NO: 398423 - DNA, 510 bp, Salmonella enterica
atgcgtcacgctgaccgtaacgctaacggcgtcatcgtcaatatgctgcaggttaaatgtcggccgggtgtgattggtcatgttatcgctctgaacgccgctgtcgtccgcgctgtccagtacgataaccggcgtcgacagcgtggtatcgatagtgaagttgagcgtcttcgttaccgtattacctgctttgtcagtcgcttccacggtcagcgtatagtcaccatccttcacagtgtctggccaggtataatcccagacgcccggtgtcgagctttgtgtcgccttaacccaggccatgccgccgttaatgctcagacgtacctcgttgacatcctcgggcaccgtcacgcggaaatgcggacggtcgtcattggtcgtgtagtcacccttgacaccgctgtcgttaaccagttccaccttatcaatggtgatttgggtatccaccgtgaccgtcagtggcgcggagtgttttacgttccccgcctcatcttccaccttcaccgttag

SEQ ID NO: 398424 - DNA, 657 bp, Salmonella enterica
atgctccacgctgaccgtaacgcgaacggcgtcatcatcaatatgctgcaggttaaatgtcggctgggcgcgattcgtcatgttatcgccctggacaccactgtcgtccacgctatccagtacgataaccggcgtcgacagcgtggtatcgatagtgaagttgagcgtcttcgttaccgtattacctgctttgtcagtcgcttccacggtcagcgtatagtcaccatccttcacagtgtctggccaggtataatcccagacgcccggtgtcgagctttgtgtcgccttaacccaggacacgccgccgttaatgctcagacgtacctcgttgacatcctcgggcaccgtcacacggaaatgcggacggtcgtcattggtcgtgtagtcacccttgacaccgctgtcgttaaccagttccaccttatcaatggtgatatgggtatccaccgtgaccgtcagcggcgcggagtattttacgttccccgcatcatcttccaccttcaccgtcagcgtataactgccatccgcccacgtgccggttggtataacgctccagatgccggtcgcgcctttggtcgccgtcagcgtctctttagtgccgccatgctgtacctcaaccgtgacaaaccgggcgtccgcgtcaatattacccagtaa

SEQ ID NO: 398425 - DNA, 525 bp, Salmonella enterica
atgttatggagtaaaggtcttggcgatctcattgaagcaaaaaagatcctcagacaaaaaaatattcatttcgttttaaatgtagctggtatattggccgaaaaagataaagatgctatcccgttggaactcattcatcactggcataatgaagggctgattaactggctgggacgctcttcgaatgtatatgagcttatccagaaatcgaatatcgttgcattaccatcagtttatccggaaggggttccacggcttttattagaggcatcatctgtaggacgcgcatgtattgcttatgataccggcggatgtgatagcttaattatccataactataatgggttgatagtgaaaagtaattcagctcaggagttagcggtagagttagagtatttgttaaaaaatccacagattcgcttagagatgggggcgaatggaagaaaacgtgtaaaggaattgttttccagcatattagttatcaataagacattgcaaatttataaagacactatcggttgctaa

SEQ ID NO: 398426 - DNA, 381 bp, Salmonella enterica
atggcctataccctacccaacgggaaagtaataaccagcgaagtattactgaaactgaaagcagaagaacttcctgggttgcctatagcttgcaaagtatgcccggcagcgacatggcaactgacgggaaatctggattcaccaggcctccgttgcttttgccgggtgatgcatcttttcagttgggacagccggaatccaccggaggagattctggattgcgacatgatttacgaaccggaagaagaggacgacgagacgattcacgagcaggaggacaaactccctccgttcctggcatcccgccgctctcttcttactcaggatggtcaggaagtaaataccgatcaggacttcgagggattatggccggaggcttaa

SEQ ID NO: 398427 - DNA, 537 bp, Salmonella enterica
atggctaccgtaaacgtgaatgtgcgtattgacgcagaactcaagaaaagcgccgatgaagtgatgcagatcgccggaaccacaccgacacaggctattaccctgctgtatcagtacatcgctgagaacaagcgtctgccctttgtggtcactaccagcgtgaaaacaccaaaagatttactatgtgaaagttcggatctattggctgaatctcttgcggtaatatccaatttacaggagtggacagagaagccggacgggatagagaaatcgaaactaatggaatattatcgtcgccttgatgtcctgtattgttgcgccaaagaaaaaatttatcgtcttgaaaacaggcgcgaagcagaactggcactgaactcccttaataaggcaatgagtattattttcgatgcggaaaacttcggatacggattagaaagagtgacgttttctaagatggagcagacaaatttattatttgctgttcaggattttgagcgaaaagtctcatgggttgttagctctactataggaatgtga

SEQ ID NO: 398428 - DNA, 228 bp, Salmonella enterica
atgaataaagagcgtcgtaagtggattcaagaaatccagaccaaattagaatctgtcaaaaaagaactctcagatgtactcgaagaggaagaggaatatttcaacagtatgccagagggttttcagtcaggtcagcgcggcgaagatgcacaaatggctattagctcattagatagcgcagtatcgcagattgaagatgcactcgactttctcggagaaattgagtaa

SEQ ID NO: 398429 - DNA, 465 bp, Salmonella enterica
atgagattcagacgacaagaacgctattcttatcactggacgccagctaaggaagccgcttatttacgcaagccgcagcgcgtacagaataaactggcttcccggtatcctcttattgccgaccagcttacatcgccgcagagttcgctggaagaagaaaaacaacgcagggaaggactgagcaataaatcagaaataaatatgcgaaatttccgcgctaatcagtggcggaaagctcggaaactttatttttcatgcgaccaaaacacccgcgagattattaaaaaagcatggcaaaacggtgtatacccgcctgatccaacctacctgatttatgtgatagagaaaaataatggcgactatcagcgccgctgtaatttctatgccgaacaggacaaaatccgccgcgaggaaaccgcccggatttataacgtccgagaaaaccagattgatttattccagtaa

SEQ ID NO: 398430 - DNA, 549 bp, Salmonella enterica
atgccaactaaacacatcgacgcagcacaatgggaacagattgaagaactcaccttagaacttacaagacagaggaaccagatagtaaaagaatctgaagttatgaagattatcattgatagcggcctcagtaagacaactaaagaagaaattagcagacaacttgattataaaccaagctgtagcgtcattataatgtacaaaataaatggcacatcagttattgagaatattgctaagccaacagtcatggaactcattaacagtagaaccccaggaaacccatgtatgatatttatttatggtaaaacatgttctggcagaagcacgtttattaagaaattaaaagaacaatgggatattatcacttatgacaacttaccagatcctgagcgggacataatcagccatgccagagggaattatgaaaacggtaattctgtagccgttgtcattcatgcgtcgaatcaggttgccgcaatgaaaaaaatattcccggaagaagaaagaatgttaaaaattggagaggtttttgaacataaagtttaa

SEQ ID NO: 398431 - DNA, 201 bp, Salmonella enterica
atggataagactaatcatggatttattgtctacagtgattttcatgatggatatgtgatggggggtgggaatttttgtaagtttcccgatggagctaaaatttttgataaagaagcaaatgctagacgttcggcttggcactatgatgctcaagtggtagagatagagattgtcatgggaaagatcacacgaatcttatag

SEQ ID NO: 398432 - DNA, 351 bp, Salmonella enterica
atgacaaaaaatcaacataataaaaagctaaatcccggtttcgttgtgggttcgattgttacaatacttattgcagcaagctatttagtcgatggcgttttcttaaaaccagagtacccgatatacattcaagttttaagcgggttgatcttcctgtatatatttccattggttttatgtttttcatgggttcgattgtttgaaaatgaattctgtgcattgggaatacatagaaatcaacttacatctcttttgttaaaatcattttttctattgtctactgttttttttgttgatagattcactcctgattatgataacaaccagctttttttattgctttcgaagtaa

SEQ ID NO: 398433 - DNA, 291 bp, Salmonella enterica
atgctctttagacataaagaatccctatctatgcgctctgcgcatccatcagatggacagaattactgggatgtccaggtggcgctggaattaaacaagaggcataaaaaaggccacttagcggcctcattctggataaacagattcttttctggcgttgatgccctcaagacgcacgcgctctttatccggcagatgcacacctatcaggcgaagaacgagaccgcgccagccctggctgacctgatggttatagcggtacaggtctgcattttcatttttcagctttga

SEQ ID NO: 398434 - DNA, 348 bp, Salmonella enterica
atgaaaaaactatttataattattgctttatttgcctcttttttattatcgggttgtaatgatgaaccgaaaggaaaagatttcatcgggcattggtacgaggaaggtaataaaacacatccaagtgatatcaaaatatcatatgaagatggtatttatcacattgatgttaatcgatatcaggcttttaaaattaagtcagatgatccggattataaaattaacaagcttgaagctaaagctgaaagtgattcagttctttcaggtcatggtccaatgttcccttatactatgcgattagagaatgggaagttaaatgttggaaatgaaacgtatgtgaaaaaatag

SEQ ID NO: 398435 - DNA, 942 bp, Salmonella enterica
atggatatacaagttgcgcatacactttttgaagctataaataatgcgacaaaatctcaaatggcaaatatgaatactgtaatgtctgttattgggattgttgttggggggttctggattgtttatattcaaatgaaatctttgtactggtattttgatggcttgacagttatttttagagatatattgtttactatattaaaatcaagcatcattctttatatggcattttctatctcttggtataatagtacagtagttcccgttgttactgattttccagtctggttaggtcatatactgtctggtagtggaggggaacataccaatttagttgatagtttgatttcaagttatattaactcaattgatagaatggttaatgcaatggagttttcaccattaagtaacttcaaacaaacattatatggtatattagcattgctttttcttttattaggtggtatcccttttttgggcgttgcagtaggtacattaattacacttaaagctgctactacaataatattaatattgggaccgatctttattgtttttctcttatttcctcagacaggtcagtatttttgggggtgggttggaactattggtggttttatgctgacgcaggtgctttttgcaatagttcttggaatagaaattaatttcataaatgctaacatcattaaagatggagttgtaaaaacagatttaataaactgtttaagcattcttttatattttggcgcatttactcttcttgctactgaaattccgggttatgctgcttcaatcatgagtggcgctcctagtggaggtgtcggtggtgtgggtggccttataggtaaaacgactggtgtaggtgccgcaagaaatatgagtcgtacattaggtagaactttggttaacaggtttaataaaaatcgcttagggccggggtga

SEQ ID NO: 398436 - DNA, 228 bp, Salmonella enterica; identical to SEQ ID NO: 394065

SEQ ID NO: 398437 - DNA, 180 bp, Salmonella enterica
atggtcccaacaagctgtcctccgtatacgttgtatccagttattgtctatcattggtttcgggatgctgcttttccagcaagatactatatgctggccaaaactatgaatgcactagccgaagaatacatgctcatatctatgactgatgtgctggccataacggaaaatggctggtga

SEQ ID NO: 398438 - DNA, 1236 bp, Salmonella enterica
atgttaaaaaatataatttatttacttgcagttcaaggcgggaattatatatttccattaattacactaccatatcttgttagagttcttgagccaactggctatggtatctatggttatagctttgccttgatacaatactttatattacttgtcgactacggtttcaattattctgcgcctaaagcaatttctttgaaccgttataataacgataatattagtagtattttttggaatatagtggcgataaaaattataattgcatccataggatttattgttctctctttcatttttatggttaattttattagctatccatcttcaattatttttatggcttatttaaccgttattggaaatatagcttatccggtttggttatttcagggattagaaaaaatggcaggtatagctattagtatgcttatttcacggattatctctgtctttcttacatttcttttagtaaaagatgtaaaagacttagctatggcagtgctaatacaatcttctataactataacggctggattcatatctatattttttctaatttcgctgcggaaaataaattggattatgccttcttttactaaaatgaaagagttaattattgatgggtggcattattttatatcatctgcggctataagtttatataccacaagcgccactataatattagggatatttacaggacctgcaactgtaggctattttatagctgcagataaaattagattagcgttacaaggtattattggtcctgtcacgcaagctgtattccctagagtaagttacatcataaaagataatcctgaaaatggtataattatagctaaaaaagtgtttaaatggcaatttacaataatgtttttcttatcagctttgctgtattttttatctccatatattatttatattttatatggtgaaacatatcgtatatcattagatattcttaaaattctggcatttacgccagcagtggttacagttagtaattatattgcaatattagtcatgattccttcagatatgaaaaaggaatttatgagaattattacaactagtggtgtcgttgggttaatatgtataacaatattaacttatttatattctgcgataggaacagccgtaggcattatatctactgaaattatcataatggtacgtttttatctggttgtaaaaagaaataaaaaaattaatagctttcaattattgtag

SEQ ID NO: 398439 - DNA, 912 bp, Salmonella enterica
atgcatgagtataaatttgtgaatttttcctctctacgaaatgatatttattgcgatactaaccgtagggcaagactatttgagcgctacagatgcttcaagacacgaagcactgatcaagaatgcaatatttttcattctacttattatcgctttcctaaagataataattttcccgtcgttacaacagtccatgattttacatatgaactatacattagggggattcgtaagactattcatagtctgcaaaagaacagggctatacaaaatagtgattcaattatttgtgtttcacaaaatactgctaaagatttattgaatttttgcgatgtagatgataaaaaaattcatgttatatacaatggagtttcggaagcttataaatatttaaacttagaggaggaggagtttatacttttcgtcggagctagatcagggtataaaaatttcgaactagctgtgaaagctgttgctaagtttagtaaaatgaaattaaaaatagtaggtgggggaacgttaagcaatagcgaaataaaattacttacagaatatcttgatggtaaatatgagtatttaggaaagattacgaatgaacatttgaatatactatataatacagcatattgtttaatatatccctcagaatatgaaggatttggaataccgctgcttgaagcaatgcgtacaggttgcccagttattgcagtaaatagatcatctatacctgaagtggttggtgatagtgcgatacttgttgatagggtatctattgatagtttattttcagctttgctgaggatacctttaaacagaaacgagctaagatataaaggattacttcaatctcaaaaattttcttgggataagtgcttttccgaaacatatgatttatataaatcactttgttaa

SEQ ID NO: 398440 - DNA, 1122 bp, Salmonella enterica
gtgacaaaaacagctttaattacaggtattactgggcaggacggttcctatctcgcggagtttctattagaaaaaggttataccgtacatggtattaaacgtcgatcatcctcttttaatacagagcgtgttgatcatatctatcaggatccccatgttaataatccaaaattccatcttcattatggagatttgactgatacttctaacttgacacgtatcttgtctgaagttaaacctgatgaggtttataatctcggtgcaatgagccatgttgctgtatcttttgagtcaccagaatatacagctgatgtagatgctataggtacattacgcttgttagaggctattcgtttcttaggattggaaaagaaaaccaaattttatcaggcttcaacttctgaattgtatggtttagttcaagagatacctcaaaaagagtccacacctttttatcctcgctctccgtatgctgttgctaagctttacgcatattggatcactgtaaattatcgtgaatcatatggtatgtatgcttgtaatggtattttatttaaccatgaatctccccgccgtggagaaacttttgttaccagaaagatcactcgtgcaattgcgaatatctctcaaggtttagagtcatgtctatatcttggaaatatggactcattgcgggattggggacacgctaaagattatgtaagaatgcaatggatgatgctccaacaggagtatccagaagatttcgttatcgcaacaggaaaacaaatctctgtacgcgagtttgttcgcatggcagctttagaagcaggcatagagttggagtttagtggtgtaggtgttgatgaagttggaactgtagtgaaggttacgggagatagtgagaaatatgttcgtgtaggcgatgagattgttcgtgttgattctcgttatttcaggcctgctgaagtagaaactcttcttggagatccatctaaagcgaaagataagctgggttgggttccagagatttctgttgaggaaatgtgtcgagaaatggttaatagtgatcttcagaaagctaaacagtatgctttgctgcgagaaaatggttttgatgtttctatttcattagagaattaa

SEQ ID NO: 398441 - DNA, 447 bp, Salmonella enterica
atgttggattatgcgttatttaaaacgatagtagataatactccattgatatcaatagatcttattatttataatgcaaaatctgaagtattgcttggtaagaggaataatcccccagctaaagcacactattttgttcctggaggtagaatatataaaaatgaaaaaatcacagaggcttttcaacgtatttgcaaagcagaaatcggtgttgatatctatttgcaatcggcaagatttttaggtgtttttgaacatttttatgaaaatgcatatgttggagaagatattagtacgcattatgttgtattagcttatgaaatacatatggacctagaattaaatatgttacctttagcgcaacataatcaatatgtttttatgccttctgaattgatagcttcgacttctgaagtccatttttatacccagcgttatttttgctaa

SEQ ID NO: 398442 - DNA, 645 bp, Salmonella enterica
gtggtgcgtgacccgctggtgaggcatgtggtgaacaggctggtggtcagacaccacagcgagtggtacagaggtcgtcccactgggaggtgggaaggattctacaaggatcttgacacagaggaaacggcatactgtgagaagtggcagacagatctggagtggatgagtaaggtgccgccgtttgataagggtgaggcggtgtggcattttcatccggtggtgtttttggatgcgttaaatgtatacgaaggtgaacgttgcagggttttattctctaagatatcagatgtaatccttcgccatgaaggaggatatgtaaatgatcctgacgataaaggaggagagacaaatatggggattacgctggatacatggaaagcgtttgcaccgagtgatttaggcattcaggcaacatcgaagacacttaatgaaatgacaaaacagcaagccgaaacgatttattataatcattattggaacccaaagggcttttgcaaaatagaaaacacaaaaattgcattgatgatttatgactggacgattacatctggacttgctgtaaaacaaatcagaaagcttttaaatagtgagtatgattcaaggattagtgtcagcaatgagatgaatgattcattgcattaa

SEQ ID NO: 398443 - DNA, 501 bp, Salmonella enterica
gtggtgaacatcagccacgacgaggggctgtatgtcaaaaatgaccggaaggtgacggtggagggtaagcaggagcagagcaccaccggagaccatatcagcctggtgaaggggacgcacagtctggaggtgaagggggacctggcgaggaaggtggccggagcgctggggataaaggtacggaatgaaatcgtcctggagagcgggggcaatatcaccctgaaggtgggtggttcgtttattgtcattcatgcaggcggggtggatatcaccgggccgaagataaacctgaacggcgggggcagtgcgggagtgccggtatcaacgctgcaaccggcggtgctgagggcgctggccgatgaaagtgatgatggttccagtgcgaatgatgtggatgatgcgggtaattcagagacaccacggaaaaacgttcaggacacgtttaatacccccccgcagaacctggttccgccacaaattcagagaatattttcacgataa

SEQ ID NO: 398444 - DNA, 273 bp, Salmonella enterica
atggaaaagagtcttttagttattgtccgacataaacccggtcgtactcgtctattaatgcgggccttgaaatccattaatgaccagactttcaaaaaaataaatatcgttattttctgcatgggtgagaaattggagtgtcgccatgtggatgatttttatctgaaagaactatcaaatatatatagtattatctacgacggaagctgtatctttgatgctattaagatgctgtctcttatacacatctccgagcccacgagaccgtactag

SEQ ID NO: 398445 - DNA, 690 bp, Salmonella enterica
gtgcgtctgctgtcggtgaaagataacgatgcccgccgcttttatgaaaaggagactttacgtaacggctggtcagttcggcagctcgacaggcaaatcgcgactcagttttacgaacggacgctgctgtcatctgacaaattgtccatgctgcagcaggacgcgcccgccgtctctgagggcttacccgagcattctcttcgcgatccttttattctggaattcctcaatctaaaggatgagtattcggaatctgaccttgaggaagcactgctcaaccacctgatggactttatgctggaactgggcgacgatttcgccttcgtggggcgtcagcgtcgcttacggattgacgataactggttccgcgttgatcttctatttttccaccgcaaattgcgctgcctgttggtggttgacctgaaagtaggcaaattcagctatagcgatgccgggcaaatgaatatgtacctgaactatgcaaaagaacactggacgatgccgggagaaaacccgcccgtgggattgattctgtgtgcagaaaaaggcgctggcgaagcttactatgccttgaatggcttgccaaataccgtgatggcgagtgaatacaaagtgcagctacctgatgaaaaactgctggctgatgaacttgtgcgctcacaaaacctgttggagacgcgcaaatcataa

SEQ ID NO: 398446 - DNA, 282 bp, Salmonella enterica
atgaatcaagaaagcagtttttggaatggtggagacgccctgagcaagaagagcttcggaaaagttgcgctgagggatggggagagaaaatctggtctgcttcacgttctgctattgcgattgagttgccagcaaaaaatgatatttccagcgatgactactccattcctgacttggttgattgggatgatggaagaaacgctggtattcaggaatgcgcagaagccatccgcgccgctggaatcaaagtcaaggagtaatttatgtgtgtatatcacctga

SEQ ID NO: 398447 - DNA, 360 bp, Salmonella enterica
atggattattcacagttaagtgattttgaaattaacaagcgagtggcaatttgctgtggatttgctcccgaagattgcgaaatcgcaaagttgggaacatcaatcgttggtgttgagtgggatgacgaaactggttatgcaataaaaacggttgattactgtaaaagcccatcagacgcagagcagattatcgtagagaacagaattggcattattccagcgccagaaaatggattatggaaggcagcgcatagaaaagttggcagtgatagtaccccatatcatatgactcaagatgaaaacccactccgcgctgccatgattgtctttctcatgatgcaggacgccaataatgcttag

SEQ ID NO: 398448 - DNA, 216 bp, Salmonella enterica
atgaaatcaatggacaaaatctcaactggcattgcctacgtaacatccgctggtagtgcgggatactggtttttgcagtggttagatcaggtcagtccgtcacagtgggctgcgattggagtgctgggaagtctagttctgggctttctcacctatctgacaaatctgtacttcaaaatcagagaagacagaagaaaggctgcgagaggtgaataa

SEQ ID NO: 398449 - DNA, 414 bp, Salmonella enterica
atggatattggcttacttattacatcccttaaaagtgggctcggagccctctctgcggttcagagcaacgaggtactccgcgaacgcatcgctttcattggcgagcagattgacgtacttcagaaaacccatgctgccaccgtagaagaacttgcccaagcgaaggccaaatgcgtagaacttacgaatgaggtagagcgttatcgggcacaggagcaatttgtccagcatatgggagcggcctttagaaaagatacctctggtggctatgcaagggcggtttattgtcccaactgttttaaagcggtcggctctttcttcgacgattttacttaccattgtgaatcctgtggttggtcatctagttttttgggaagagatctcgatagcgtgatgaaatcacttccagcttaa

SEQ ID NO: 398450 - DNA, 333 bp, Salmonella enterica
atgaagaagatacttcttttaggcttttcgttgctttctttttcggctttggccgcatcataccagatacaggtgccaactgactcgaaagcaacttacacagtgctggacaagggttctcaaggctcactcagaactattacgacaaaaagagaaggggcatctggcattacattttcgcagcgaatatacaattgcgaagcaaacgaagttaaatacttaggttctggtgagagcctggaagagatgaagaactccaaggccgaccctaacatgtcgccaatagtaagcgactccattgcttactacctaggtcgagaggcctgcaagtaa

SEQ ID NO: 398451 - DNA, 255 bp, Salmonella enterica
atgagtgtggcatctatctttaaaaaagaacacaaagttaattttttattttttatcttgtcgtatctctcgactgtttttttcttaagtgtagtcattgttggggtagtgacttttattaattacactaagcataattttttgatgtttgatatgatgtttgcacttaaaacagtgaagatgctatctattggcggtttttttgcatttatatggagcgcgttttgcatctctaatgacaaaaaaaatgtataa

SEQ ID NO: 398452 - DNA, 1632 bp, Salmonella enterica; identical to SEQ ID NO: 398411

SEQ ID NO: 398453 - DNA, 264 bp, Salmonella enterica
atgaaactactttctcttgctcatgacattgttgagatagtcaaaggttctaccgaaattgaagctatagacgtcattaatgttgcaatcgaacttgaagatgctgtagataatatcagtgatgcaataccgaacattacggctcgtttgtttacgttgagtttccctgatatggcttctacactaccttcaggagtcccagataaattgatgcagcaatcgcttgaactggtatcaaaatttgggaatggtcattaccattaa

SEQ ID NO: 398454 - DNA, 294 bp, Salmonella enterica
atgaagttaaagttaggtgctatatttttattgtcatttttattaactggatgcaaaaaagatcctcaagacaaatttgtagagcaatgtgttgattcaggtaatgcatctatctcagcatgcaaatgtatgtttggaagattgaagctaagacttcctgaagatcagataattgaatactcaaaggtaaaggtaccattatcattaacatttaatgagatgaatgatttcaaaaagcattatccgattgcattattcaacgctaactattattgccgaacaaattataattaa

SEQ ID NO: 398455 - DNA, 195 bp, Salmonella enterica
atgcggttgattggccttaccggcggtatgtttaactttatcggcggattgggcgggattagcgtaccgttggtgattggttatctggcgcaaagctacggttttgctccggcgctggtctatatctccgtcgtggccctgctgggcgcgctgtcttacatcctgttagtgggcgatgtgaaacgcgtcggataa

SEQ ID NO: 398456 - DNA, 1737 bp, Salmonella enterica
atgcaattaaatttaccaagtaatagattatacggaaatcaacaactcattgaatttgagaagatcactgctcttattggagaaaatggtgcaggtaaatcctcaatcctccaatccatctttgttaaccgcctggcaaaatcaatactttctgataaaaaagttgtttgcttctcctccggtcaaaatgaaaaattttccgagcatttctctaactacttaaatcaagagagaagtgctaatcgagggctaagtttagactgttgttattatgataagacatggtcaaaattattaatttttctctcaacaattagtaacgacaagggattagtccgttcatttcttttgaggaaagaatatatcgaattatcagaaaataatctcactgatatttcaagcattctcactgtgtctgttcaagttagtcgtgcgtatgtcaatagagtacaaaaggcattacaagatgaagaaaatggagaaatcgacacactacgctcgacaagttaccatcgtactcttgaaagttttataaatacaatagttgatcatgactatgattttagttctccgatggaatctaaattaatacagttagatttccaaaaatttaataccccatcatatattaatactgctgaagattattttgatcctataatttctttttatacacaagctgccgacaacgattattttatatcaaaaccgtcaatgaagttgacctttaaggatgatttggaattaagtgacttaagcgatggtgagtatcagattttatttctatattcactacttgatctatttgatcatcctgataccatttttctccttgatgaaatagactcacaccttcattataagaacatagagattctctggagggaattacatgcaataaaaggacatgcgattacctctacgcatcttattgattcaataacagcccgagaaaatacgttcgcaacattaaaaatagtagacagggggaaaatttgcgagcaagataaaatgaaagcattaattcaaagactttcagttttgactagaattaactcagtacaatttgaattatgtaacaaacttgataatattgttgtccttgatcattacaatgattggaaaatattcaccttactcgcacataaaaaaaacctagatattaataaattaattaatttacaaccaatcaaacatccttccggatacggaaatatcacacatgattttgcgaaatccaaaatagattggcttgaaaatttactatcctcagatagtgatagaaaaccccatcgtatttttctggtttgcgataaggatgaagcccccctcacattcaaaaatgatggcgtttctgttgctatacaaccactagaaaaacggattaaagaattaaaaaacaaatatagtcctagaaccgaaatttttttgctatcatggcatcgccgcgaaataaaaaactatctcttatcatattctgctatgtcaaaatatgataagattagttgtataaataatgataatctaccaaaaaattcctatttgaaactaaatgaccctggtgataatgagcatataagggctctagacgtaaaagaatatatgactggcttaatagattcagagggcatcggcttggatgaaaaaaaattagccgaatatatttcattcattcccgctgaagaaataagtatagatattgaaaacatgtttaaatttttagagagcaaactatga

SEQ ID NO: 398457 - DNA, 270 bp, Salmonella enterica; identical to SEQ ID NO: 392703

SEQ ID NO: 398458 - DNA, 960 bp, Salmonella enterica; identical to SEQ ID NO: 398404

SEQ ID NO: 398459 - DNA, 2121 bp, Salmonella enterica
atgacaatacaaaaaattaaaataacaaacttactttcttttgatgaaattgaaattgacgaactaaatgatattaattgcattgttggtagaaataacgttggtaaatcaaacttactaaagactcttaaatttttctacaataaattagaagggaaagaagaattacccccgagactgaattctaactattcatacaagggaacaatatcaattacgtttgataccacccggatttttaggattgcaagaagacaaccatcgaataaatatttttcattcattgtcagaaaactaattcctatacataaaagaagtgttttttcacttacaaagtatgatgatgatcataccacttttaccctttcattgaacatttataatgatggcaaagttaaatggtctacgaacgataagcaaacattaaatctaatattgtatctatacccctttttccatattgaacccaggcacatgaatttacatgagtgggatagtttatgggatctaatatcaagaattaaatcattcaacttatcaactattagtgaagattccattattacattttttgatgagtctattaataccaatggtgatagctcatacaaaaattacattaaagagctcaatgataatatatttacaaaaccgagtactcaaaaagaaaaaatccttagttatattaaggctggtctgaaaggatataattttgaaatagacgaaagagacttaaagcttcattcagacggaacaaactcttttcattttataaaaacatatcttaatatattaattacaatttcacgcagagaatatattactccatttatatttattgatgagccagagcttggattacatccaaagatgaacgaagtcctgattcacgatgtgtatagtaagtataaatataattcaggacgaaataataaagtaaccagacctaaagtatttatagcaacccactctcccaatataattaaagaagtaatcaaaaaatttagagacagacaaagagtctattgtttccgaaaaaataaagaatcatctacatcaataaggacactaaattcaacctatgataatgaaagttttataaatatatttagtgataacgaagcccgattgttttttagcgattacatcttatttgttgagggagaaacagagctcgaaatattcgggaatatgaagctcgctgaatatttccctcatttcaaaaatattgatgtatataaaagcagtagcaatgttatcggggaaaggataaatccctcttattctaactcgtctataccctacatgtttttatttgatgctgacaaagccatttcgattaatggtggggttggttcatttaccattaattataaaaagaatggagagtatttcagttttgaaaaaagaatccttgaggaggaattaaagaaacataaactaggattcagtaaaatacatagagaattaatgaataatacatcctaccttataaggtgtataaataaaaaactagatgttaatttaaccacacagaatttttcatttgattctgaatttgaagatatctttaacgccataaagaaaagactacttttaaaaaatatttacataaacagaactacaattgaagggtgcttgatacagaatgacagtttaatactgttttatgaatgggctgcaaaaaaatatgactttgatatcagcataatagataaactcaaaattaaaacacgcaagtacttaactcaggaattattagcagattatttcagggtcattttcaatggaaaaacaaaaactctgatagactataagcatttcaatttcaatgcttataaacaagcaatccagaaatgtcagcctcttaatgatagacttaaaaagacatcgacgagagcaaaagttttaatgaatttcattgaagaacattcaatagctaacaaagatctggacaaaacagatggttggactactaattttataaactacgcagttgaacacatagcaaatcaatctaaagctgaaaataaatctttcggaagtgtttttaaggtttatttccctgagttatatgatatcatcagaaggcttcaacccgatagtagaggggagatatga

SEQ ID NO: 398460 - DNA, 1104 bp, Salmonella enterica
atgaaaaataaaattctcagcgatgatttttttaagaatgctattcttaaagggaattcagctctcttcaatgaattcacaccaagcgttacagagcgagaagttggccctgatgttttttttgaaattgaaaagaactcagagcatcggaaaataaatgaaagaatcactaaatttattctttcacaaataccgattaactcttcggcctgcggatttgtacaaggaaaatcatattttgattttctaaacccacatatcaaaggttatttttttctaaggctagatatcaaaaaattctttcactctattcctgcttcagaagttaaatctctttttaaagtttattttagcaataccaagaaagaagaaaaatattcagcattagatattgctcttatggctgtattacataagacaagcaaaagcctgtctgattctgagttaagagataaagaaatccttccaattggtttttcttcatcccctgttatatcaaatataatcttccgaaaagtagatattttaattcaaaagtactgtgaagataagaatattgaatatagcagatacgccgatgatctattattctcttcagccaaaagcaattttatccatggagagcaatttgagagagaaatatctatttttatttccactctatctcttagattgaaaaaaagcaagagaactgctagcgaaaacacgatatctttaaatggatatgtaattcaaaacacaaagcaaaaaaaactatttaatatgtttttttataaagatgctcctattggaaccatacgggtatcgaataaaaaaacaaaaataataaaaaaaatgacagcattactcagacaaggaaaatcacctatatatattatggagaatgttttcaatttaaatagaaaaagttttaaaccaaagtacaccaataactatactttttacaatagatatgcaacagatcaattacaaaataaaataaaaggttacagatcatatttggtttccattataaaattcaatgaaaaatataaatccattgatgagaaattcttaaaatccgcaaaaaaattagtaaaagaactggaagatagcattccttaa

SEQ ID NO: 398461 - DNA, 258 bp, Salmonella enterica; identical to SEQ ID NO: 392677

SEQ ID NO: 398462 - DNA, 1968 bp, Salmonella enterica
atgttaacgctagagaatgccgttgagttagctaggccctgggctataaagttatttgaggaaaaaatacttcctttccttattaataaaggaaccgatgtttataaaaaagggcggggtgttctcaaactaagagggcaaatgtctgaatttttagctaaaacaaaagctcaatgctcaataataaactcactggcatttcctaatgttttaaaaaaaatcaatgacatttatgttcctttaaccttatcaacattagattctacagacgaaaatgaatatctcgttgacagaggggataagtttcttaagcattttaaaaatatattaataatcgataatgcaggaatgggaaaatcgacactaatgaagaaaatagtaattgatactattgatcattcagagtatatccctatttatatagagctacgaactctaacagatagccctattattgaacaaatcaataaactaatcggatttgataatgtcaatgataattattcattgaaaaagataccctttatttatttttttgatggagttgatgaaataccttttgatattaaaaatgatttaataaaaaggataaagtctttcagcgatgaaatggttgactcaaaaataatcatcacctctaggccagatcaatctctactcgaattacactcttttaatagatttagaatcaagccattaaatatagagcaatcttataaccttatccgcctatatgatgttaattcatctagaattggcagtagtcttgttctttctaataaattaattactgaaataaaaattatgagagaaaaagatgacaacacaattttagattttttaacaacaccattgtatgtttctcttttattttgttcgtataaatataagcctgtaatacctagacgtaaagatttattctatagtcaagtttttgaagcactttttgaaactcacgatcttagtaaagaaactggttatgttcgaagaaaatcctcaggtttagatataacagattttagtattatactgcgccgattggcattttggtgtttaaaaaacaatggccgactggaatttagcagggctgagcttgaagatgttataacaaacattactgagaaactaaaaggtattagtgttaaacctatattatttattaatgacttgatatactctgtaccactttttattaaagaaggttctctatatagatggtctcacaaatcacttatggagtatttttgtgcagaattcatttgtattgaagttaaagacaaaagggatgatttattattaaaattatacgaaagtaaaagcgtggtgaaattcaaaaacataattgaattaagttctgatattgattatgcatcttttagaaaatctattcttcaaaagtgtcttaatgaatatttcgagcacttagaaaaactaaaggattttaatttttcaaacgaatgtgataaagatatttgggcaagcattagttttttctctgacttgcgcctacttctaacaccttatagcaatgcgagcctaggtgatcttgatatctgtgataataatccctacaaggataatgattcactacataaccatttcgaaaataattttatagggtttcgagattttattacacacatcacatatcctatatctttaagaaatacagtttttgagattcttagattaaaaaaacccgaatacttctttaaagaaagagattatttcaatcgtatgtttctcgatactcttaaaatacctgagaatacaattatatcaacttccaatggttatacaaaggagcatgacaacgatatcataccagatattattagtatattattacattttagacatacgttattgatccccgtgatatataaggtagcggcaagtaacgtgctgaatgacattatttcagatacatccaatggcgtaaatgacttactcgatggttttgactaa

SEQ ID NO: 398463 - DNA, 594 bp, Salmonella enterica
atgtttgcagccccctttttaatcatcattgcatttaaagaaatcattatcggattttttattgggttaagttttactatcgtattttgggccatagacgcagcgggacagattattgatactctacgagggtcaacaatatcttcaattttcaaccctgccataagtgattcatcatcggtgacaggagtattactttaccaatttgtcaccgtcatttttataatcagcggaggactccagagtgtgctaaatgtattatataattcttatgaattattccctcttgattcagtactgacaattcgttggtcagtcgttaaatttgcattttctttatgggaatcatttataagcttaatgctttctttttcaattccaatggttattgggatttttttatgtgatatggggtttggcttcctgaataaaacagcaccgcaactaaacgtttttactttatcgttgcctgttaaaagttgtgtgtcagtttttattttattactcgtaatccatgtttttcctgagtttatcaatgcaggaataaatgcagatatatttagttcactattacgagacttgttgcatgagtga

SEQ ID NO: 398464 - DNA, 189 bp, Salmonella enterica; identical to SEQ ID NO: 393645

SEQ ID NO: 398465 - DNA, 1830 bp, Salmonella enterica
atgggaaagaacagcaaagcaaaacgagatttaaaaaagaaaaaaagcaataacaaatccagagaaaaatcccctggcaagggaaatagaagctatgaggacgttataccaaaaataaaagataatttaatatctgtttataaagagtacaaccttgcagaactttttctcacattaagtatttccgaattatggctacctaatatctcatcacctgtaaaacacactatagctttcaacacactgctctccatggatgttagtacatttaataaccaaaaggaacttaaaacatatcaacaagcaagcgaattttttagcattatttataagatattacctaacattcctcaaatggaagactttgtccctgaacaagactgggggcaaataaaaataccatggggagataatatttatagaattttttacggtagctcagtcgaacgcttatatgattatattcaagcttttggaattagatacgcagaatatccaattatccttaagcaaatggacaatgttcttattttacaggataagtttttatcaagcataaatccagttgacacactctcagagcaagagttctcgcccggccatctcgaaatccccccagaaacgttctggaaagcttgtcagcaggcgttaacggatacaagtcatgcctttgaacaattaataagtcagacagaaaaaatatttattaaaaaatccggggagtttaaaagcattaactccctctctgaattatcaaatataataatggaaggtttagcactccctgctattggcgtcagcattgataatcgtgtttatccattgtcattcaggaatatggcaaatgtaattattgagcactacgcttccaaaaaaatggatatcgattgttctgatgccatttcaaatttcatatcacagcgttttgaaagcataattgaggaaccatttctgctcctgagcaaaaaaaaggtcctaccttataaattctcaggattattacagggtaatgataagttttatttattttctctttttgatattgattcagcaagtaagttaaaagatatagaagaagacgttttcgaactttttaatcaaggtgaatgggctttatcaccgatttcatcatcacaattgttaggtattcgaaatggctcaggggaacaactatcaattaatgatattgaatttattttcataaattccaatcttactactgccatgcatttttttgagccaccgcgactaaaatatagttaccacattctctttcggacagaatttattgcattatttgactcaatagataatctaaatgaactatcattgtttttttcatatttagaacaaaataaatcaaaaataaatccgtttcttatttcaacaatagataagtttgcatcattcaaaggaactcattctgtattagaagatggtgccataaattttaacatgattactcttgaccctcattggggttctaactggagatatgaagaactgaaaaaatactggtcagaggttccctcaaatttccctgatgccaatgtgaaatggaacatcagtagtagttaccaaggaaatatttcattaatatcgaaaagtcttttctatgtatcctggtctacaacgattaataattgcacaattcatttttgtgccgattgtaagccattactaaatgaagatcatcttaacggtcagcttctgacattattcttagaatgcacttgcgatgctttttcgcaacgaaaagatattttagagagtacatccttccaaggtataaacagaattaccgtacactgcgctattgacaaaaaatag

SEQ ID NO: 398466 - DNA, 1731 bp, Salmonella enterica
atgtcagataataatatattgaaagaatttttcaagtctctaaatgaacaggaaaagccatttactcagcttttaaaagatgatcggctaggtatgatattacgttcagctgtaaacgaattaaatttaatgcattataaaaatcatagtgaatacaacgcgacatttagtcaggaagaatattattatatatttaaactgggcgtctctcgattaattaaattagcccttgaagcacgaacctcgtttgaagcccctgctataatgtttctacaaagctctgaaataagcgctgagacacataatattgtaagaggcttaggaatgatcgaacatggaaggagaattgcgcagtcagtttattccggccacactaaaatagaaaaaatagagggaaatgagtttaaaataaccataccatcaatacttgttgatgaagaaagccatgaaaagcacatatctaatcattataaagatcaatacagagaaaatctcattagaatttataaatcaaaattcatggaagaattcaaagtagatgttgacaataagttgtttgatttagtttatccatatgacacttattttatagggtacgaatccgcacctattctagatgaattcttttttgggctcacctattcagagcttttcaatcaagatggatttgacacttttcactactccgtaaaatttggagggatagagtttcaaaaatataaattagctatcggatttataatgtcggtaattgaaaaacatttaaggttttcagaaaaactcacaataaaacataccacaataaaattagagaatattctaacagtttcagcaaatacagacgaatttatagaaagcatgtgtgatgcaattaattactttggatcgtcgctaaaaggatatactcagcttgaattaaccgatgcacgtaaaatttttgaagtaatttcttatagcagaagaaacataaagttattagacaaccctggagcagagctaccgatgctgattcaaagctctgatgaaagtttcttcttctgtattgcagcaagatatagctcaccattacaatatcttcatgactccttaaggtttcattttagtaaggattatgataagcagcaacaatcacgagaacaagtattacaaagagcaataaaaggtgttttgaacgaaagtttcagtaatttacaataccaagaaaatataaagataaaagagaatggtaaaacattaactgatatagacttagttgttgtcgaaaaaagcacaggaatagtttttctttgtcaattaaaacatcaagaactttatggtgctgatctacatgcaaaacatgttcgaaccactagattaaaaaaacaagcgtcggattggcttacttcgatgaacaattggttaaacagcataaccgaaatagaactaagaaaatcgttgcaaataacaaaacatgtaccaaaattaacaatatataaattattcataacaaaacattatgcctatccactcaaagagctatcagatgaagatacagcgtattgtaactgggcgcagtttatttatgccattcaacttatcgacgatgataaggggaaaagaaaagatagtatttcatctttaatcctcaaattaaaaactttaaatcaggaagctaacattgaatatcttcatgagcctacatcgaaatggatgataaaaaatttaactttcagtttagagcaagaaagataa

SEQ ID NO: 398467 - DNA, 387 bp, Salmonella enterica; identical to SEQ ID NO: 393901

SEQ ID NO: 398468 - DNA, 1632 bp, Salmonella enterica
atgcctataattaatggaaataaccctgctgctatccccgtggctccgcctctgccaaacagcaactctgcatcttcattacataatggggccgggcatggtcagcctcagcagacaataaccagctctggcgcattaaatcagcggtcaacgctgacaccgctttctcctgtacccggcacttccagtagtactggcaatgtttcgcacctcccgtcctcgccacgtaacttaaccttaccgagtaccgttaccttacacaacgaattagaagtaacgaacgattggtcatcactgaacctgttacataaagatattggttccaggggatttagggttgagaaaagtagcgatggtaccgttcatgctattggagaaaaagatggcacaagttttgatcgcatactctcacccgaagaagtcgaaggcctggcagcaataggttcgggtaacgatcgatttgtttttagtggcaaccgtggtggcgctggccatgtcatggtcactgctgcatctgattttggtcttgcgcgcgaagccattgtcaaaaaactggacagacaacataccactgatgctggtactgatccgataccatctcacaactcctctggcgcgatggagatcggtactgacgcgcaaccattgcctgagtcttccagcccattaaagagcgaccccaaactttgggtatcattaggtgtcattactgccggtttagttggtttggccgttacggggatagttcaggcaacagccttaacgccggcaccggaagaaccacaagatactgatcctgatgccgccgctgcgaatgcagagaaggcggcaagagaccagctcactcaggaggcatacaaggacccgaataatcagacggttataattgatcagaatggaaatgccatgccttcaggtgatcttaaagatgatgttctggcagccatagagcagcaggctaaagctgccggagaagaagcaaaggccaaagcgattgaagataatgccactgcacaaagaaactacacagagcagaaagaaaaacacgatcgcgaaatgcttctatcctccgggattggctacggaatcagctctgcattgattctggggggaacggcgggattaggcacgacgatagcgcttcatcaccggaacaataacggcgctgagcaacccccaattgagaataactcaaatagttttcccatgaatccttttggttcagttaatagcgctagcccggcagcaggtcgctctgaagaacccgaccccatttaccaaaacacgttgaatgtcaggaaccccacccctgaggaagatccttcagcgctttattccagggttgtacccagggctgaagatgtacaatctctctctgactcggagtcttttgatagcgtttccctgaactcggttcctgaggctatatacgctgagctggatccaactgcattaggcgcaccaggtctttcaccctcctcagaaccaacgctttactcagagatgcagcagaacccggaaagagctaattttgatgcaatcagaagtcggatcgaaggcgtgtttagccgtaaccccacatcaccttctgcaggagcagcaagactaaccggccctgctaactttgtctaa

SEQ ID NO: 398469 - DNA, 939 bp, Salmonella enterica
ttgcaaaaaggtttatgtaaagagcaaagaagaatcaaaacatcgattcaaagagatcgtatttctttagaaaatttaagaaatgaattttatgaaatatcacagcttctaagcgacaagaataattttaaagaactagaggagctattacagctcaaagaaaacatcgacgtattggatggtaccctaaaaaacctatctttaggttcagtaccaagaaatttagggagtatagagaaagactaccgtcagtatcgcgatttagagattgatgctaaaagtcttttaaagcagattaataactctgtatactcagcgcttgatcattttactgttaaagatgattattcaattgctgagaaagactttcgtagcaaagcagccatattacatgcgaaaataagaaaattttccaataaaggacgcaatatattaaaagaagagacgttgcgtttcgaagagataacaaacaatacaaataaagctttccatgaaaaaacatctcaatatttatccgatctacaagaaaatagaacttcactcaaaaaaacacttgaaaatttagatcttgcttatcagattcaagacattgaaataagtcaaacctacgccccatatattaccgcattagaaagcttaagagaggaaattgatttagaaggcctcgcgatctcttcagtcaacgaaaatacacggttgaagaaacaggtagagcaagtgaatgcactcgctcaacttggaataactgtggagataattggtcatgaaatcgaaggtttcgatatgactattgagcgaggtataaatagactgtcatcaacaaacctcgatgaatatcagaaaaatgctttatcaagtattacccaagcacatcaatcattaagcgattcttggcgttttttaagcccattaaaattatctggggcgagagaaacctaa

SEQ ID NO: 398470 - DNA, 987 bp, Salmonella enterica
atgtttgatgctttgatgggaaatctatggggtgatggtgatgatatattacgagataaccgtattgaacaagcttgggaaaattattctgaattagaaagaaatgaaaataattatattacaaaagaagctatcgagaatactgtaattaatgttttttttgaggaaaggcattttcaatcttggcctgtgtggaataataaaaccactcacggcacagccatgtttatagctggaattcatgacgatttaatagctcagctatcaacagatgctggttcagaagctcaaggtgcagaggttcgggctaaagaacgctttcttcaaacattaaatagctttgttaatccatttaaaagagaaggcgaagaacagattactgatttcaatacaagtgttgtcgcatggaatggtaatctgcaacgatttattatcgatgaagttagaaactttgatatttcaaattttgaccagctagaacatatagttgaaggaagtattgatgaaagtggattattttccgggaaagtgaaagccttcggagaatggtttgataatattacagtcaaacctaaatctgcatataagaccagaaaagatactcgctttggccctttctttttaagattaggcacatttgaagttataagaaaaaatagtacattatcagatgaacagcatgcaaccttcgaccgtatccgtgatcagtttggtggagtaatggtttttcgtgatgatttacgtgttatgccatacggacgtgaagataatgacttttttgaaatcgagaaaagacgttcaaaaaatgctggtttatatatgttcagtaatagggcatgttttggtggtgtatgtataacgaaagaacataaccccaacctacgagataaagcaggtagagaaggtataattgacaataaagcatctaagttatttagagagatagtcgaaaacattttaatagaaattgcaaaaaggtttatgtaa

SEQ ID NO: 398471 - DNA, 225 bp, Salmonella enterica
atgcagacatcaacagaccgcatcacctggcggaacggctggcgtttaaatggcgaaccgtcctgtgcgcatgatgtacggggaatatttgaagaacgcctcgccgcgaaaaaatgggaaatatacgaacagcgtaaagctgagatgatcgagacgtgcgttttcctcacaccgaaagactacgaattagcctgtcgtgaactggctgagttgctggggatctaa

SEQ ID NO: 398472 - DNA, 123 bp, Salmonella enterica
atgaatcttttaattaaaaggaatatagaagcatttttaaatttactgggaattcaatttaaaacaatagagaagcagatagaattgaattttgaatcctttgattttttcaggggagaatga

SEQ ID NO: 398473 - DNA, 153 bp, Salmonella enterica
atgaccgagattattgcgggcaattaccatgatggcatccagcttatcagcgagttcaccttcaatgcattccagcgtatcggcgatcatttctggagtaagctcatcagagctttccagcaattgcaacagactggtatagtcagcagctaa

SEQ ID NO: 398474 - DNA, 153 bp, Salmonella enterica
atgaccgagattattgcgggcgattaccatgatggcatccagtttatcaacgagttcaccttcaatgctttccagcgtatcggcgatcatttccggagtaagctcatcagagctttccagcaattgcagcagactggtatagtcggcagctaa

SEQ ID NO: 398475 - DNA, 294 bp, Salmonella enterica
atgagcacaatcattgaaatagttgatcaggtttctacaggcaaggggatcagcatgtattatttatttgataggttattgaagacatttcctccacatgaaaggtttatcgagttagagggtatagcagaatacaaaactgtacaggcaccacatagatgcctgatatttagagagcatattatacaagaagcattaaaaccatttttagagaaaaatatgataagtataaaatatgacttaattattaaaaacattccgttaaagcaagttttaaaacaaaatactgtatag

SEQ ID NO: 398476 - DNA, 342 bp, Salmonella enterica
atggattatattaatcgatggcttggctctgaactgctgatgttttgtattctaccgtgggggtatgccgctgcggtggcatcactgctgatcctgatgttttccaaaaaacgcagccgacagattttgctgtgggtattactaccacagtgggcagtcgtggtattgctgttactcacgttgcagtacacccagttgttgagccaaacaggcacggtatggatgttgatgctcctgttgccgattctgagttgggcgggcttgctgcccgcgctgctgctgggagcctggctgcgcaagccgtgtgccatattgtgttcattggggtgctgtgcccggtga

SEQ ID NO: 398477 - DNA, 501 bp, Salmonella enterica
atgaaaatcataaaaaaattgattatcgcaagtgcgttgagcatgatggctgctagttgttatgctggctcatttttgccgaactcagagcaacaaaaatcagtggatattgtgttttcctctccccaagatttatccgtatcgcttattcctgtgtcgggcttaaaggctgggccaaatgctcttggcacgaaaattgcgaagcttgaagttaattctactactcttaaagaattcggggtcagggggattgctaacaaaatagtagaccttactggcactgcatggcgtgtagctggtaaaaatactggtagagagatcattgtgggcttatcaagtgacagtcttagaagagctgatggcacggaaaaatggaatggggtgaactggatgacctttaatagcaatgacgcacttgatattgtcctgacaggagtggcgcagaatgtcacagctgacacgtacccaataactgtagacgtagtgggatatcaaccttaa

SEQ ID NO: 398478 - DNA, 294 bp, Salmonella enterica
atgacaaaaccattgtttgactataacaatcctctccgctgttccggcaattccgtctcggaggtgctggataaattcagaaaaaactacgacctgataatgtcactaccgcaggaaacgaaagaggaaagagattttcgcaattcaatctggctagctgagcgtaacgaaaaagaactcatcaggcagacatccatccgaccattccgcaaagccacttacaccaaattcattgaaatagacccgcgccttcgtgattaccgtacgcgttacggcgctatcagcaataactga

SEQ ID NO: 398479 - DNA, 861 bp, Salmonella enterica
atggctcttactgatatcaaagtcagaacagttaagcctgcagacaaacctttcaaacttaccgatggtgaggggatgcacctgttggttaaccccaatggctcaaaatactggcgtcttcaatatcgttttagtggcaaacagaagatgctggcgttaggggtttatccaatggtttcattggcagaggctcgtaagaggcgcgatgccgcgaagaaactggtatctgatggtatcgatccctctcaaaagaaaaaagaggacaagattgaagaaagcggagcactaacctttgaggctgtagcaagagattggcatgcatcctgtagcaaaaaatggtcggagtcccatagtgagcgggtgcttaaaagcttagtggataatcttttctctgcgttaggtcagcggaaaatttcggagctgaagacaagagatttactcgccccgataaaggtagttgaggcgagcggacgatatgaagttgcctctcgtcttcaacaacgtacaactgctatcatgcgtttcgcggtacaaaatggtctgcttgattataacccggcccaagacatggctggtgcggtagccgtggctaaacgagtgcatcgtccagctctggatttcgaacgcttctccgaattgctcgatcgtatcgaatgctttaaaggtcgaaagttgactaaattggcagtgaaactaacactgctggtattcatacgttcaagtgaactgcgttttgcaagatgggaagaaatcgattttaaaaatgcgctttggacgatacctgcagaacgagaacctctaaagggtgtaaagtactcacatcgtggttctaaaatgcgtagcctcattttgtacctctaa

SEQ ID NO: 398480 - DNA, 423 bp, Salmonella enterica
atgttgacggaagatttggcgctcttaatgcctatatctttggagttgatgaccatcgaacttttattatcgccggaaatagtcaccgttgaggcattaccagcctcaatggctgcgcctttggcattatcgtgcgtgacggtagagttcgtaatatcaagaacgcccttgttggacgcgataacagtactgtctgtacccgtggaactcactgtactatcgctcacattcaggaaagcgttgcctgttgtgctgccaaccacgcgcagttgtcccctcgtgagcgtgatttcactcccgtccgtgatgttcagcgtgctgccttcttgcgaaactacatcgctgccggtttccgctgttgctgttaccttgatgtcgctcaatgtcgcttgcgactcgccgctgagcgtcatgatgccataa

SEQ ID NO: 398481 - DNA, 636 bp, Salmonella enterica
atgtcggcatccagcgttacgctgtcaaaatcggtagtgatcgcagtttgcgaatcaatcagcgtgaacgatcctaagtgctcgtcggtttcgggcgcgacaaaggtggccgttgagctaaggttcagcgtcccgtccaacgtgacgttggtggctttgataattggcgagctgttggcggtatccagcgtcgcgtttatctggctgccgtcctgcaaggtcagggtattgtccaccgtcagcagcgtacctgtcgaaccgctcgcgttgcccagcgtaatgccgccatcgttggtcaggttgccgacggttgacgggttggtcatgttccactggctggtttcgtcaagcgtcaatgaactgttcaggccgttgacgctcccttgcagtgaggatttttcggccagcgacaaggacgatactgtgctccccgcgtcaatgttgccattcagcgttgtgttgttggcctctacggttgccgcattatccagtttaatagccgttgggccagtcaatgtgctgtcggttaatgtaatgggcttttccatcaccgtgtttttatcaacgtgcagcgcggcggcgtcgtctgaggtcacgtccgcattattgaccatcagcccggagttattgctgtaa

SEQ ID NO: 398482 - DNA, 1257 bp, Salmonella enterica
atgggtattacgtcccgcttaaaagtcatgtcgttcttgcaatattttatctgggggagctggctggttaccctgggctcttacatgatcaatacactggattttaccggcgcgaatgttggtatggtctacagctcaaaagggctggcagcgattatcatgccgggcattatggggatcattgctgataaatggctgcgcgctgagcgagcctatatgctttgccatctggtttgcgcgggggcgttattgtacgccaccaccgttaccgatccccagacgatgttctgggtgatgttggttaatgcgatggcgtatatgccaacgattgcattatccaatagcgtttcgtactcctgtctggcgaaagcaggtcaggatccggtaacgtcatttccgcctgtgcgcgttttcggcacaataggttttattgttgcgatgtggacggtgagcctgatggggctggaactgagcagtgcgcaattatacatcgcttctggcgcatcgttattgctggccctgtatgcactgacgttaccgaaaattccggtagccgagaagaaggcgaacaccacgcttgccagtaagctcggactggatgcttttgttctgtttaaaaatccacgcatggcaatcttctttttgtttgcgatgatgttgggggcggtgctgcaaattaccaatgtcttcggtaatccgttcctgcatgattttgcccgtaatcctgagtttgccggtagttttgtggtgaagtatccctctatcttgctttcagtttcgcagatggcggaagtgggctttatcctcaccattccgttcttccttaaacgctttggtattaaaacggtaatgctgatgagcatgctggcatggacgctgcgtttcggcttctttgcctttggcgatccatccccgtttggctttgtgctattgctgctgtcgatgattgtttatggctgcgcatttgatttcttcaacatctcagggtcagtatttgtagagcaggaggtggactcaagtattcgcgccagcgcgcaggggctatttatgaccatggttaacggcgtgggggcgtggattgggtctcttttaagcggtatggccgtggattatttttctattgatggcgtaaaagattggcaaaccatctggctggtctttgccgcctacgctctggcattggccgttatttttgcattgttctttaaatatcagcaccatccagaaaaactgtcgaccaaatcattagcacattaa

SEQ ID NO: 398483 - DNA, 1236 bp, Salmonella enterica
  misc_feature (75)..(84): n is a, c, g, or t
atgattacagagaataatatcaacatagaattagaaaaattatttgataatattttaagaaaatcatcaattcgnnnnnnnnnnccaccaattgaagtcggaaaaaacaatgatcttatcagcgattttcactctaaatgcgagaaatttaaggattgcctcaaagaatacctgaccaataatgataaaatattagcccacagagtcagaagcagattaaaagtcatccaatctctacaggatggtatcataaattgcttagaatgttttcttacaggtgatattaaatctgcatacgattgctttgaattaatgcttaagccacaatttatatcacggcatataaaaaacatatgcataccattaacagagatgtgcaatagccaaaggccattatttagagtcaggaaatccgaccgccccctatccacaagaaaagatatattccatattccatttaaccaacgccatctggttagggcgcagcgatactcagttgcaggattaccatgtctgtatcttggcacatctttatatatatgctggcgtgaaatggataagccagattttgataaactatatatatcttcattcattactgataaagaagacgacaaatcacttctattgaatttgagtgctgactttctttacaaaactaggctttttttaaaaagaaaaaatgctccaaaaccaatagaaaaatattcaactagtacaatgctatcctacttagccttgtggccgcttatactcgcctgcaattatttaaagaaacataatgatgcttcatttatacaagaatatattattccaaatttactaatgcagtggattagtagagacattaataataataatattattggaattgcatatcgttcaactaagcttcctgcaaataccgatagcagaaaaggtataaatgtagttctccctccaaaggcacgatatgaggatataaaaggttacgatttctgtcctgtgctttcagataagtttaaatttactccgccagtttcatggcaagtcctcaaaacccttgagtacgtccctctgcgccaatccttttctgatagagagaatttgagtgaggaacttagacgcaaaaaaagttgggaaattatggggaatattgatgatgaaattttgagcatttataaactatcagacttctacaaacttgaagtttgcatggatgagattctggtttacgacgaaatctttggcggataa

SEQ ID NO: 398484 - DNA, 858 bp, Salmonella enterica
atgagcaccatcctgaaatgggcgggaaataaaaccgctattatgccggaactgattaagcaccttcctggtggcccacgactggttgaacctttcgcgggttcctgtgctgtgatgatggcgacagactatccccattatcttgtcgcggatattaatgctgacctgattaatatgtatcaggtaattaaagatgaagtagaacacttcattgctatctcaaaggctctctttgcctgcaacaacttttctgaacagtattatgttattcgtgaagagtttaatcatttgcattccttagacttaatctggaaggctgcttatttcctttttctaaatcgccattgttaccgtgggttgtgccgttataaccgggcagggcatttcaacgtaccttacggcaactataaagctccctattttcccgaagcagaaattcgcacttttgcggaaaaggcccagcgtgcaaagttcatttgtgccagctatgacgaaacattggcgttattggtgcctggggatgttatttattgcgatccgccttatgacggtactttcagtgcctatcacactgccggttttactgaggacgatcagtatcagctggcctctattcttgagcgccgggcatcagaaggccatccgatcattgtttcgaacagcgacacttttctgactcgttccctgtatcgaaatttcacccatgaccgcattaacataaagcgcagcatcggcgttgccgcgggcgaaggaaaaagggctgacgaacttattgctgtactcaagccggaagtatgggctggctttgatccagccggcgggcctgattgctctgtcgtgcatgaggtgcgcgcgtga

SEQ ID NO: 398485 - DNA, 1257 bp, Salmonella enterica
atgcaaaagcaaagggtttctcaggtgtttgttcctgggggaatgccgaagttgacttacgttgaacgcacacaaggtgaaataagagaaaaacttgaaagtgcaaaagataacttatgtaaattggttacacttacaggacaaacgaagtcgggtaaaaccgttctgactcaaatgatatttccatttactgatcctaatgttatctgggtagatggaggtagtattaccgcagaaaatgatatttgggagcaagtgttagaccggttagatgtttaccccaatgaagaggttaacacctctgatacagcatctacagttgtatctggtaaagcaaatgtatctgcaagtatactgattgcaaaaggtggtggtgaacttggagtctcgcaaaatgatggttctaccaaaggtaaaaaatcagctcgaaatataacttctaaaaatgcagcaattaaggctcttgcagaaagtcaagcgagcctaataattgatgatttccattatttagatagagatatgcaaggcagttttgttagggccgttaaaccactagtatttcatggtgtgcctgtagtattgattgctatacctcatagaagatatgatgcaattaaagttgagagggaaattactggccgattagaaaatataatgatgccatattggtctattgatgaattgaaacaaatagcaactataggtttcccactgctgaatgtaaatgtttcctctgctgttgtggatatattagcttcagaagctctgggtagtccgcacttaatgcaagaattttgtaagagcttatgtgccgactattcgataaaagaaacttctgagaaagaaataaaaatatcgaaagttgatgactcattatttaaaaatgttgcagagtcaaccggtaaggtagtatttgataaattggcaactgggccccgccagcgctctgatcgattgatgagattgttaaaaagtggcgagcgagtggacatatacaaagttgttttgtatgccctctcaaaaatgaaacctggaatgcaaaccattcagtatgaagagttaagaagtgctattagagacatagtggcggagactcctccgcaggcgcatgaggttactcgtgtactggaaaaaatgagtgaaattgcctctaatgaagaagcttcaacccctgttattgattgggagcgcgaagagcaaaaattgcacattactgacccattctttgccttttaccttaagtggcgggctcattaa

SEQ ID NO: 398486 - DNA, 468 bp, Salmonella enterica
atgaatgatgcattgttaattttaggtatacccgcattaattggcgcggctattggttatactatttgcttttttaaaatgcgaaataccacgccgcagaaaccgcagcacatagacctttcagaaattaaggaatattgtgaagatatagaaaatcgcgctgtaagcgcctctaattcatttgtaaaaggatggtttaaggatgatgtacagaagataaatgatatttatgaatgtttagaaactgtatattcaagaatgaaaaagagtgatgaaaaagaagaaagaacgcataaagcattagttgatttatttcaaaatgccgtcttaaaaaccgcagatgatgcggaaatgaaagaaaaaatacaagatatggaaagtgagataatcgagttacgcagaagcattaatagcctaagttatagaccacgaaatattatagccgatagaatatcaaataaagattaa

SEQ ID NO: 398487 - DNA, 243 bp, Salmonella enterica
atgaacatcacagccgccaatattactcctgttaataaagtactgtcaacacgcccagaagatttaatttcaccatcagccgcgcaaaagctagttggtattaccgctactgagtggcattatgcaagacgttaccgcattgatactaatgattttccgataaattacggcgttggtaatggtcgttatgctctttttagcgcatcagaagtgacagaattttttaaccgctttaagaaataa

SEQ ID NO: 398488 - DNA, 1731 bp, Salmonella enterica
atgagtatggaaatttatgttgtctgtcatgatgaagatgtaggcactacttattattcagatggttcaataagctttagacaagaagatgaaagcagaattattgttggtagtgattcagattttatttattacaaagatgggtcgcactcatttattggtgaacgaacacccgatgaattaatggcggattttgaatattatgcaagacacggttattttgatgatcccgaagtagtggaacaaaaatacccatcggttacattaaattctaccacttgttttaataattatacacctaagacggaattagataagatggtaggtgatttaataattaacccgcttgatgataattacggaatgccaagttatgacgaagtaaaaccatatcataagctattaaataacaatcctgttttaactggcttgtttgattggcaaattgaaaacactagaacatattgccctgaattagcattggcgttttccgttgcgtcaatggcttctttaatttctggcagatggtcatataagggaacgctaacgagtaatttatatattgcagttttagccccgacatcagttggtaaaactcagacgatggatttattttccaaaatcttacaagattctggggacgaaaatagaataggcgcagataattttaaatctgaagggggtatgtctaaagaagttgcggaaaatgcagcaaaaacattcatgttagatgaattaggatttttaattgcgcgcattatgtcgccaaaagcatctcagacagatacacagattcaacgagcaatccttaaaatgttcaccgcttttaattctggatattcaccggaggcaaaaagtgcaaatagtgataataataaaaataacagtgtaattaaaaatgcttgcccatctatttttggcgtgtcaacgccggatgtattctggagtgcattttcaagccgtgaggctgggacgggttttttaaatagaatggtagttattgaagccaagacaattggaaagcgtaaagaaccaaaaaattcaccaatgccaataaatgtgggtgaatttgttagcagtatttatatgcgctttaatacggttgagtccggtcgcttgttcatatctaatgattgcaagactttaattgatggtgtcaatgttgataaactttttcagtcggtgacaaaaatagaagaagatttgattttatctgatgataaatacggttgtgtttatgcaaggcttgcagaattaacgaaacgagtagcaattgtatttcaggtaacaagcaatataaacagtacacatattgaatacgataacgctcaagccgcatatgattttgttagattttgtcttgattattcatatagcagcgccgtaaatagcattaaagatagcaatatagagcgtttgcagggtgaagtaattaaagcgattaacgaaatcaagtctgataaatcagggaatgcacaaaattatgacggtgtaacagggaaatggattagggagcgaatgttaaaacgcaaatcatctattaataatgataaagaaagcgatgcagcattaatgaaaatgtgtagaaatggtcatatttacagaatggaaattaaaaaggatttaggaaagcaaacatattattatgttaagcctgaatttttaaatgaatttgaagatgtatttaaatcacatggctataaattgcgaaatacgataaattttgaataa

SEQ ID NO: 398489 - DNA, 360 bp, Salmonella enterica
atgatcaatactgacgatacgttacctataagtaaagaagaagcactctcactagttaacaaagccgaagctaacctattgaaagcaaaggaaagactagattacctcaccaggaaaacatatttaattcaattaaccataaataataaaatctactttttatgtaatgatgattctttaactgaaaaattcgggggcgcaattaaatttaaaagaaaatgcgatgcacaacaagaattgatgttttatcttgaaagaattgaagctgtaggtaacccaaagataaaaagtgaaatcgtaattgaaaaagatctgcttagaaattttatctcacacactgagaaaaaaattaacaattaa

SEQ ID NO: 398490 - DNA, 288 bp, Salmonella enterica
atggatacagtagaagaactaaatggaacatacttctatgcaggaaaatccaatctgaatgctgccgaacttctgtttatgatttttgtgagaataccgcaagccagtttgggattggtgttgcagatttcggggccgttgttgctctggtatcaggtcgcaataatctctggacaagggcgaaacccgctggagcgactaaaggcacatcatacgcgtccaggactgcacgtgcagtgtttaaaaagtcaaaatttccctttggaatatcccttccgacatggttag

SEQ ID NO: 398491 - DNA, 186 bp, Salmonella enterica
atgaatgataatgataaaaaaatagaagtggcagcgtctgaacttgttagattgattattaaaaagctacaagatgaaaatacggatgttatatgtagaacaagcttatttataacttacaatcttttttctcatgaaagcgattttactgttgtttatgacacgttagggggagatctggaatga

SEQ ID NO: 398492 - DNA, 444 bp, Salmonella enterica
atgaggttaaaaaaccgtccgggccaacgacattgggatattgaatggattgggattgatcgtcgtagcatggtttaccgcgcttataaacgtcaggacatgcaggatggtgaggatttttctgactatttaaaccgggaacgcgttctgaccgatgaatttgagattgaaagtggctgtgaggcttctggcttcattaaaggtgataaagaacgctggagcatcagtggtgatgttcacgagataaagaatctgcctgtaatcctctatagcaaacagacattgatgacttcatcgaaagacggtttgctgaagaaaaacgtatcgggtgtgaagagttccaagcacagttgcttcgtttatggcgatacctcgttttctttcagtccggccaaactcgctttcagttcatcaagactactggcggcgtctcttggcgcatag

SEQ ID NO: 398493 - DNA, 246 bp, Salmonella enterica
atgaagatggcttccataacctcactgaaagaaaacgaggtatcaaaaacggagctggtagccaatgaaacagataaagaacctactatagtcgtagctgaaggtgcttttgattcggccactgctcacatggaaacagaagctgaggagtggcaatccattaagaagctgtgccagcgagaaggtgagctacctatacgtattggtggtatcaaaatagcggagcctccagagcaatattcataa

SEQ ID NO: 398494 - DNA, 378 bp, Salmonella enterica
ttgaaatcacaaaatacctatacagcacaaagcataggaaatatttttaaaactgaaaagtcagattccattttcatttgtaatgtaaacaacaacgagcgttacagtattcatgatctatcgaaactacttcacaaaaaagataataacatgaaatacggagaaaacgcatatactgaagaaattgaaaatggtcatattgaaagcgcagactcaagcattaaaataaaaattaaaggttatagttgtaaatatatgtactacaggccaatagcgaacattttccaagtcgatttctctgaacaaatcaaggccattgtagaagatttcataacagggaagaaaaaatgggtattgaaaaatggcattgtaaaataa

SEQ ID NO: 398495 - DNA, 186 bp, Salmonella enterica; identical to SEQ ID NO: 398491

SEQ ID NO: 398496 - DNA, 459 bp, Salmonella enterica; identical to SEQ ID NO: 374350

SEQ ID NO: 398497 - DNA, 1161 bp, Salmonella enterica
atgggctgggaaaggacgaaagcaacaacaatggagttgcctggtgagccatcttttacgggatggctgttggcaggcggtgttgccgcggttacgggtattttgctgtttattctgcatgcgtcagacatggttaaggcactggctgtattcaatatctggtggctggcatccagcccggttcttggctggtttttcctgttttgtttgcgagggtggctgtggggcagaacagtcagcgaacatcagtttttgcagaaggaagctgaatacgggcagcaacagtgggaagtttgggcaggacgttatctggctgtgcttggaagcagcatactgctaccttccggagtaacctctgacgccattgctaaatctgatgctgcagatgcgccgcaatttctttcactgaccagccattttgatgcgaaatcgacgacgtccacctccttgctcggactgggtctggccagtgtacaaaacgcggtcgcgatgttgcctgcgacagtgccgttcaacgtcaccattgtgagcgacatgatttcgtcaaacttcgagacccggtttcgtgaatcatgggaaaaaatttatccagggcgggcgctgacaggttcgatttcatgttgtgaagccctttcttttgcctggatcgaagagcgccttaaaaatcccgttttcgatattgatttgatcctgatattgcagaatcagggggctgaacagtattccgatgcactcgcggcgttgatacttaccagcgatgatgttgctgaaaaataccatcttcctcactctgcccgcatcttgcgaccaatgctgctggacatgccaaatttcagggctgatatgggtttgttcctcgaaacacaaacgatcgcctgtcagacatcaaaagtgttttgtgattatgggcactggaatgactggtttgctgatctaatgacggcgtctcaatcacatctgacaccatgggtgccccaggagattgatgtactggaaaaatataacggtattccaggggctggcagtgcgtggcttttagccgcattgctttccgatatcacattggttggcaaggcacctgttttaggtctgtttacttccggaactgatcgttttgtcagtaccattacttcagggagcaataataatgacgccggttag

SEQ ID NO: 398498 - DNA, 1017 bp, Salmonella enterica
atgaataatattgcatttatcattacgaaagcagaagttggtggcgctcaaaaatgggttaatgaaatagctaaactaattaaggatgattgcagagtatttcttatcacctcagaagaggggtggttaacccaaagtaaaaatttttcagaagtttatttgcttcctgagataaaaaaaaaatttcatttggctacttatttaaaattaataaacttcattaggagaaataatataagaaccatcatcgcaagttctgcaaatgctggaatatatgcacgaatgtcgaaattattttgtaagttcaagtgtatttacgtttcgcatggatggtcatgtttgtataatggtggtaaattaaaatgggtgttttgcgagatagagaaatacctttcctttctaacagattttgtatggtgtatttcggagagtgataagaggaaggctataaaagagattggtattaaagaaaaaaaaataatcacaatcactaacgctgttcctcctatgcctataactccaaggaaattgttagagaataaagtgctttttgttggtcgtttaacacaccctaaacgtccagaacttattgctcgagttatatctaaaaggccagattacaagttggatattatcggagatggcgagttacttgaatctctaaaaactcaatttgcacatttcgagaatataagatttctaggcgaaattaaagatttttctaactatcaggcttatgatgtatttgctttaatttctgatagtgaggggttaccgatgtcggcacttgaagcgcatacggcaggcataccgcttcttctaagcaatgttggtggttgctatgaattgattgaaaaaaatggattattagtaaaaaataatgaatgtgatatcaatgataaattaaatgaaatattttcaaattatgaattatttcgttcgaatgctaaaaatgcaattcagaagtttgatattaataattattcgcggttatataagaaaattattgtggattga

SEQ ID NO: 398499 - DNA, 1311 bp, Salmonella enterica
atgggaaagaacagcaaggcaaaacgagatttaaaaaagaaaaaaagcagtaacaaatccagagaaaaatcctctagcaagggcaacagaaactatgaagacgctatgcaaaaaataaaagataatttaacatctatatataaagagtacaatctcgcagaactttttcttacattaagtatttctgaactatggctacctaatatctcgtcacctgtaaaacacactatagctttcaacactttgctctccatggatgttagtacatttaataaccaaaaggaacttaaaacatatcaacaagcaagcgaattttttagcattatttataagatattacctaacattcctcaaatggaagactttgtccctgaacaagactgggggcaaataaaaataccatggggagacaatatttatagaattttttacggtagctcagtcgaacgcttatatgattatattcaagcttttggaattagatacgcagaatatccaattatccttaagcaaatggaaaatgttcttattttacagaaccagtttctatcaagcctaaatccagttgatacactctcagaacaagagttctctcccggccatgtcgaaatccctccagaaacattctggaaaggttgccatcaggctttaacggatgcctgtcatgtgtttgagaaaataagaagtcagacggaaaaaatatttattaaaaaagcacgggaatttagaagcattaactctaccgctgaattatcaaatataataatggagggcgtagcactccctgctattggtatcaacattggtgatcgtgtttatccattgtcattcaggaatatggcaaatgtaattattgagcgctatgcttccaaaaaaatggatatcgattgttcagatgctatttcaaatttcatatctcagcgttttgaaagcataattgaggaaccatttctgctcctgagcaaaaaaaaggtcctaccttataaattctcaggattattacagggtaatgataagttttatttatttgctctttttgatattgattcagcaagtaagttaaaagatatagaagaagacgttttcgaactttttaatcaaggtgaatgggctttatcaccgatttcatcatcacaactattaggcattcgaaatcgctcggggaaacagctatcaattgatgatattgaatttattttcataaattctaatcttactactgccatgcatttttttgagccaccacaactaaaatatagtcatcacatcttctttctgacagagttcattatttttttcatatttagataa

SEQ ID NO: 398500 - DNA, 2658 bp, Salmonella enterica; identical to SEQ ID NO: 395502

SEQ ID NO: 398501 - DNA, 594 bp, Salmonella enterica; identical to SEQ ID NO: 395501

SEQ ID NO: 398502 - DNA, 294 bp, Salmonella enterica
atggctacgaccctcacccagacacacccgttactctccgttcccttcaatgctgccacggacttcaccgtactggcggagcactgcaaacagttcgctgaaatcctgatcgaacacgacgatcccacgctgaaaatggcgctttgcggcaggcttagcgcctgtctgcaactgctccagccctcactgctcgatcctatcccggatcacatgatggacagcctgaccgttgatacgctccccacccgcctcccgcctcccgcgtttcgatcccgaatgtaccgaactttgtaa

SEQ ID NO: 398503 - DNA, 378 bp, Salmonella enterica
atgatccggcgtgatcgccagcttcgtaccgttgcgggatgcgccggacaatcccagcgagcggttattcagccgctcactctgcgccagcctgtcacgcccggcctgtttcagaatgcagcgcaccgtcgccatctcgttttgcagggaacgtttcgtgatgacctgcgccagccgttcacggacatagccttcaatatgccgcgccttaagctgctccacccggcggatctgcacattctgcgccagcaccaggcgctcacaaaaccgctgcgccagcttaatgcggtcgtgaacggttttatggctgccgcctgcctgctgcgccagtcgcttcatttcctgttccagtattcccatattttccccccttcatga

SEQ ID NO: 398504 - DNA, 504 bp, Salmonella enterica
atgatcgagagattcaaaaataatgagggtggggttttaagacacgatttactgaataaagcatttctagagcattcaacgacaatcgagtgtgtaaggagaatcaaagaatttttatctaatttgttatataataatgggtttcgttcattatcaatagatgatttacaacagttggctttgaagataagagacccaaaagatggagttaaactaccaaaattcgatgactatgactggtttaacgggttggggattactatccacgatacttacgccacgaaaatctatcttgattatattgatataaaagataatagctttgaagctagtttaagttttagaatccaagaccattttggtctggatgttgcagatgtaaatggtaaatggtttgaatattcgcaatggttttgttcttggtttattttgcagaggtataaggtttatgattataaaccatttataaatgaagcaaattttagttgcgtaataacggggtaa

SEQ ID NO: 398505 - DNA, 462 bp, Salmonella enterica
atggctactacccccatccagacacacccgttactttccgttcccttcaatgccactacggacttcaccgtccttgccagccactgcgaaaacttcgccgaaaccctgattgaaagtaaagatatcgcgttaaaaatggcgctctgcggcagacttaataccgccctgacgctgctccatcccacgctgttagaccccgtcccgccccatcttgttgaaagtctgaccgttgatactcttccggcgaattccccccagtttgggccggaatgcaccgagctatgtaactactgccttgccctgacgcagaccctggcagggcagggattttcctcggaaacggagaaattccttagctggctgttgtatgacctgatcaactacttcgcggcagaaatgaaagccccgctctggctgcgtaccgccgatggggtgaagtttattgacggggtgacagcatga

SEQ ID NO: 398506 - DNA, 477 bp, Salmonella enterica
atgaagaataaatgcggaaaaatagcgctgtgtttatttttgttggctggcgcttataatttatggaccctgcgtccggttaaagttctgtatgcctattcagattttggctcgacagtttttctggttgtggatcatctgccgtggactgacagagataaaatcaggtggtacctgacgcaccgggaagaatttaagaggaaataccctttactggatcaggactggtttcgttattatgttatagatattggcaacggctttactaatgctaaagattatcacgatgggccgtatgaagatttatattgctttccaaccattaaggatgatgctgattgtatcgtgaaagattacttattaatcgttgatgagtatcctgataggaatactcgttttggtgtaaccgttattgatggcgagcttgagtaccagttaacgcccgagaaacaaatagagagagttttctatccataa

SEQ ID NO: 398507 - DNA, 141 bp, Salmonella enterica
atgttcctgctggcagtcaccttttatgatgaacatccgggcgcggataagatggtgacgttcgggtttatctgggtagcgctggcgattttcgtgatggatgcgctgtatacccagcgcagaacgcgtaaaggattgtga

SEQ ID NO: 398508 - DNA, 462 bp, Salmonella enterica
atggatggaaggcggttcagattgtttaacgtagtcgatgattttaatcgggaagcgctggcagtcgaagtggacttaaatatcccggcgcatcgcgtagtgcgcgttttggagcggctcagcgccgaaagaggctatccggcgtttatccgaagtgataatggaccggaacttaccaccgccatcctgtcggagtgggccgagcagcatggagtcatactggattttattcaaccgggaaagccaatgcagaacggatttatcgaacggttcaataagacattacgaacagaaatactcgatatgtatctgttccgaacgcggtctgaagtccgagagttaacagaaaaccgacgaacggaatataacgaggaacgcccgcataactcacctggcggcataccgccggttacctatgcaaggcaaaaactggccggagactctaactggcagtggtactaa

SEQ ID NO: 398509 - DNA, 1005 bp, Salmonella enterica
atgttagctgtaacacctccttttacctggcgactgcatcacggcgactgcctgaacattatgccagcactgcaacccggcagcgttgacctgattttgtgcgatccgccatacggcacgataaagggcgcagaactgaaaggatgggatacaagcaccacccggtgggatgatgccattgaaccagtagagatgtttgccgcgtgcgaacgcgtgttgcgggttaacggcgtgctggtactgttcgcccaggaaccctacacaagccgcctgataacgcaggcgcataataacctgccgttcagttatcgcctggtgtggaagaaagagcatttcggcatcgggcttaacgccagaaaagcacccgtttcgtattttgaagacgtcctggtgttttcaaaagtcgaaaaatacgacccgaaatttgatcacccgctgcgtgagtacgccagacagataacaacgttcgccggggtaacagcgacacaggtaaagaatgcactcagacacacgaaggcagaacattttctgaggcataatgcaattcagttcggaataccgatacgcgacacgtacaaccagttaatcgccacgtacaacctgaccgcaatgccgggcttcctgacgtatgaggaaatgaaagcgatgcacaacaactggcgtaataatcgacaattaccgccacgcgttttcaatctgccacccagaaagcggcataaatccaacatactggaatacgcccgcgaccgggagaagtatcacccgacacagaagccggtcgcattactggaagacctgataaagacctacagcaatcccggcgatacggtactggatttcacaatgggcagcggctcaacaggcgttgcctgtctgaataccggacggcgatttatcggtattgagaaagataaaaagtatttcgatattgctgtaaaccggatgaatattattcaatcgcaggtgaaagattatgagcagatttacgacccctgcaattcttga

SEQ ID NO: 398510 - DNA, 525 bp, Salmonella enterica
atgaccggtagcctccacattaaaaataatgataacgtaagtttcgctattttaaatgaagacggcaacgcccgcgcgattatctacaagatcaaagacggcgacggtatccatatcaataacggcccagacaccggtgaatttgtttttggtaaaaataacgaattttattccccgtcaaacctgcacgcaggcgacggtattttcggtaataacggtgatacatacggcgcggcatggggaaacacctggctgacaagctggatcagtaacgctttcggcagccgcgataataatattaatgcccgcgcttctattgactgggtacgtcagaatttcctttcaggctttcggttgggtgctgttgagtattctaactcctggagaggttatggctacaacgaccagccgccttatgttattacaggggcttacaacaacaatgcggatgatataattgatacaatttttcgccgtccgctacagatgaatatcaatggatggcgtaatatagactggttataa

SEQ ID NO: 398511 - DNA, 690 bp, Salmonella enterica
atgatgaatattaaaaactttacaccaggcaatcctaaaacacctgaacaactggaacttgccaataagcacagggtgctgtttttattttctgaggatggtcaggagtggtatgaatctcaaaagcaatttgcacctgacactatcaaattcacctatgacagtgacggcgttattcgcagtatttcgcgtgacgtgtcgatgctgtggccggttgatgcgagtgttgccgaggtggctgatactacagccaaccgccgcgcggatatcagcggtcgctgggggtttgatggtgaaaatgttgttgacctgatgacgccggaaaaagcccgccggatgaagcgtagcgaaatcaaccgttggcgtgacaaccaggaagacggcagtacaacattcgagtggaacggtcacaaatgggacgccagcaaagcctcgcaggagcgtctttcgtccattctggcgctgtctgatacggccagcctgccggacggtttttactggactgatgctgataataacgatgtcagcgtcacgcgtgacgatctgagcgccattaacgcaaacatgaccgccgcaatggttgcgctgggctggaaaattcacgaacgccagcgcgaaatgaaaaaagaagtcgatgaattaatccggattaacgatattctgaattattccgtaggctggggtgaataa

SEQ ID NO: 398512 - DNA, 528 bp, Salmonella enterica
atgaccggtaatctcttcctgaaaaatgatgaccgaatgcatttcgctattttcaatgaagacggtaacgcccgcatgtggctctacaaggataaagacggtgacggtatccgtatcaataacggtattgacggtggtggggaatttattttccataaaaacggcgaattttactcaccggctgtgcttcacgcaggtggcgctactttcgccactgacggcaatattaacggttcgctatggggtggctggctgaatgactggctcagtaacgctttcgccagtcgcgataacaatataaatggtcgtgcaacgtgggattatatcaatcaaaatttcattacccgcgttatgcgcggttcaccggttaaccctggtaaagtgaatgagtatggcccggcagaagcgcccgccgggtgcgtggtgaccagcgttcgtcacgacccgacgaccgcgtatgggatatatttcacgtatcgccccctgagcgcttttatcaatggtggctggcggattattgaaggttaa

SEQ ID NO: 398513 - DNA, 1059 bp, Salmonella enterica
atggcgtatttaacccccgatgctgaaaaaatccgcgccgacctgctgcgcgacctgaaaaaccagttgcctgacgctgacatcgcgccggacagtgattattttgttcgcgcgtcctcggtggcgagtgtggctgagggcctgtatcagcatcaggcatgggttgtgcgccagatattccccgacacgtccgacagcgactacctggcgctgcacgcccgcacgcgcggtctgaaaaggaaacccccgaccaccgcgaaagggcttgccggtatcagcggttcgccgggttcggtgttgccggcaggctcgcagatacgcggtgaacgtcttgccgtcaccaccaccgccgatgtgaaactgactgccggcacggcagacgtccccgttacggccgtacaaagcggcgtatccggcaacctggatacacaggtaatggcagagctggtgagcgccccgatggggattaacggccgcgtggtcgtcaaatccctggtgggcggcaccgacgaggaaagcgacggcgagctgctcgaccggctgcttgatatcatccgtcgcccgccggcaggcggcaaccggtacgactatcgccgctgggcgatggaagtgccgggggtgagcagtgcctgggtgtacccgattcgccggggcgcggggacggtcgatattgccatcacctcagccggcgggctggcctcagacgagattatccgcaacgtacaggcccatatcgacgacgtgcgcccggtcacggccagaaacgcgctggtactgtcaccgcagctacgccgcattgattttgacgtcatcgttaaggctgaaggtgtgacaatggaacaactacgccccgacgtggagcgcactatccgggatgcgatggcgcgtattgcaccggggcagccgctgattcgcagcaatattgagacgctgatttccctgctgcccggcgtgactgaccgcaccatcgtcacgccggcgggcaacgtcatcgctcaggtggatggtaaacaccttgagtggctgctgccgggcgctatcaacgtgagggataaataa

SEQ ID NO: 398514 - DNA, 693 bp, Salmonella enterica
atgatgcacattatcagccagcggattaaccaggcgctggcacgtatccgccaggcctttcgcatccttatcggggcaaccgacagcgcggcggccgtgcaacgcactcaggcgcaggggatcggcaacgagaatctgcgcgggattgagctgttccagcagtacggcttcacctcacacccgctgcccggcacgatggggatcgtgctgccactcggcggcgtcagctcacacagtatcgttatcgccacagagcacggcgcataccgccttaaaagtcttcagcccggcgaggtggcgctctataccgacgagggcgctaaaatcgtgcttaaacgcggtaaactcattgaggtcgactgcgagacctttcgcgtgaactgtaccggctttgaggtcaactgcaaacaggcggcggtcaactgcgacatctgggcaacctcggctaccgacagcgcgagctttaccactccagaactgagcaccagcgagaagctcaccgcgcaggggctgatttccggcaacggcggcatgagcgttaagggtggcgaaggttcccgctttaagggtaatcttgaccagaccggcggcagcttcacgaccgatggcgacgtcagcaccgcaaaagtctcgctcaacggtcacagacactctaacggccacgatggcgcgcctaccggcggcccgatgtaa

SEQ ID NO: 398515 - DNA, 1440 bp, Salmonella enterica
ttgagctggcaggataatttacaggacgcgtcctttaggggcgtgcgttttgatgtggtcagtactcaggacagcgtggcccgcgatcatgccgatcatggttacccctggactgacggcgaggacgttcacgatctgggacgcaaggcgcgtaacttccgtttaaacgccgttttctggggtgatgattacgatacccggctgcagcaatttaccgccgaactggacaagcccggcgcaggtgagcttattcatccggtatacggttccgttccgaaggtgcagttgattgagtaccaggtcaaacacgatgcgagcagtccggactatgcggaagtgggcctggtgtttctggagtccgtgaccggcagcgcgtcagatacgcccgccgccccggagcaatggggtgactccctgtttaaccgtctggacgggcttaaagaccgcgcgcagtcgctgtttactgaggcgctggccccggttaatcgcgtgcaggcgctggtcagcaagggtaaaacgctggcgacggccatgctgaacacccttgatgtgatgcgcggcgaccttagcggcattatccgggacggcgtgagctatctggattcgccgggccattacgttaacgatttgctcaccattctggatccgcgcacgttaccgctggggcagttgctgcaccgccggcacggtgcggcgtctgtcgcccgttccgcgacaccgacaacagcgccagcgccgtccgtcacgtttaccccgcagggagccgcacagcccccgactgcaggctaccatgcccccggtacgtcatccgccgcgccggaggcgaacggcccggccccggtcatgtcagcctggcgggaaagtaccggcaccctgaaccgggtcgcggcgctgccggagtcgatactgcgccacgaggtcagcggcagcgtgcctgtgccggagaacgccatcacgaccgacgtgcgcgagctggtcaccctgcataaaacgctggccgcaaaacaggccgcagagctggctgcgatgctgtttctggatgaggagcgtgtcgccggtctgtcgcaacaggatctggaaagcgtgacaaacgacgtgcgcggctttatccagtccgccattacggccacccgcgacaactaccgggaggcgacagagcgattaagcgaagatccgcaaccgctggggctgttatggcggccggtggtggaagaccttaaagagacggcgctgaccgtccagatgatggcagaggccattatggcgactcgtccgccgctcacctggcggacggtcacccaggacggcaacctgcacctgctggcgcacgcctggtatcaggattacacccgcgcgcacgagctgctgcgcctgaatccgcagatacgtgatcctaatgacatacgccggggggatacgctcagtgcctacgcccgataa

SEQ ID NO: 398516 - DNA, 2319 bp, Salmonella enterica
atgagccgcgattttcgcctttctatgggtctcgactttcgggacaacgcctcgcgggatatggcccgcgtgctgcgtgacggcgtaaagcaggctgctgatgccacccgcgcaacaaagcgccagggggaggaacagaaaaaagcggccactgacgccacgcaggccgaaaaacagcacgccgaaacgcgccgccgggacagccaggagaacatcagcaccagccgccggcaggtggaggaatatcgccgttctgcccgcgcgcgtgaaatcctggccgtgcgatctgaacaggccattcagcgcgaaatcgatcgcaccgttgccgcctacaaccggttaagccgcagcggcaccctgacggcgcgcgagcagtcgcgggcgtatgcggcgatgaaaaaccaggtcgccgcgcttaacggcgagatgggcaacctgacacgtcttgagcgcgtgcgtatggcaggcagtcagattggggctatagcgggcggcctgacagcggccgcgctgccctttgtggcccccgtcagaaaccagatggcttacgagcattcgcaggcgaacctcgccaatacggctttttaccagcaggacgctgaggggcgtctggcccggctgccggagcttaacgccctgatccacgatgccatcgtccggggtggcggcacgaaagataacgcgcaggcggccaccggccggctgctgaataccttttcctttgatgaaattaaagagcgtctgcccttcctgcaacaggtctccagcggcaccggcgtcagcggtgaaacgctgggcgatatcgccaacgccctgcgccgtcatctcggcattgattcagcggccgacctgaaacgcgctgtcaatatgatggtggcgtccggtcaggcgggcggcgtggagctggcggacattgcgcgcatcatgccgggccagcttgaacaggccgggcgtgcgggactgcacggccttgacgggctggcgcaactgctctcggccgatcaggtctcactcaccacgtcgggcaacgttgatgaggccggcgcgcaggtcaacgcgctgctgcagcgtatctacggcaacagggcggagatggccgcgcagcgcattaaaatcgacggtaaggggatcgacctgcacggaacgctggcgcaggcgcagttacacggcatgtcgccgcttgatgcgctggttggtctttccgatcgtattattgacaaagaccccaaaattcgcgccctgcgcaaaaagctcaacagcggcaaactcagtgacagtgaggcagccagcacccgcgacgccctgcagacgatggagaacgactggctgacgaagctgctcggcgatccgttctcggtgcgcgcgatgacggccctgcgtaaccagcggcaggcccgcactgacaatctggccctcacgcagcgccagcgcgatttgccggacggtcagggggcggccgaggtgaacttccagaccatcagcggcaccagtgactttaaaaccgatcaggcgaagagtctgcgcgaattgtcgcagatggacgccatgaagcccgtcgctgacgcagccggtaagtttgccggcgtggtatctgagttcaatgaaaagttccccggtctgtctcaggcggctgaatccgcttcgcttgccatccagtcgatgacggccgcagcggtgacctttgccgggttaaagctgctgctgggtaataaaataccgggcataccgggtatgccaaaaacccccggctcgccggaaatgccgaaaggttccggcctgcggggattggggttatccgggctgctgaaagcgccctggatgctgctggagggctacgtctatggaaaaggcgctgaggacttccctttagtgcagcttgaaagcggtaaagagaaacgccagagggtggaggagaaatacggccccacccctgatgcaattaaaaacgtggtggaaagtccgggactgagcgatgtgttcgacgagtggcgcggatggtggcacgacctgaccggcgataaggaaaaggacgcaataccgccccgcgaggttcctcaaccggccgcgcgtaatgatgtcgtgatgccggatcaggttcccggcgtctccccccgccgcgacagcacaaacgcgcccgccgatgccggcacatcgccttcacgtaaccggacgaacgtcacggacagcgccagcgtaaacgacctgttacgcccccttgaggttcatacccatctgcaccttgacgggaaagagatcgccgagaccgtgaacgaatacaacggctatgatgcgctacgcagtacgggaggtgacttttga

SEQ ID NO: 398517 - DNA, 165 bp, Salmonella enterica
atgcagatgagccggccggagcttgacggctggcttgccgccctgaacgtcttccaccgcccgccagggcgcggccgtaagggcggacgtcataccggcgacgccccggacaccccgccacaaaaaacctttaaatcccagcgtaagaaacggagcgcacgatga

SEQ ID NO: 398518 - DNA, 387 bp, Salmonella enterica
atgaccgggaaaggcacgctgctgtacggcattgagcatgacggccgcacgcattacgactttgagatccgcatcccggtgatggcggacgtgtacaccgcgctcgaccaggccgaacgggttcacggcaacagcgacagcggcgcgggcgacctgtattaccgcatggcgctgatggcgctgttgctcacgcgtctcggtgacctgccggcgcaggatatcacccctgagctgttgctgtctggtctgctttcggaggactacgagcgcctgaacgagaccatcgcggcgcttaaaaaaaagcgcaggaacgcgaacgccggcgacacggactgcggctcgccatccttgccctcggacaacacggcatcggcgaagaacgggtaa

SEQ ID NO: 398519 - DNA, 426 bp, Salmonella enterica
atgtatgccacggttgccgatatggtacagcgattcggggagcgccactgcgccgggctgacccgttccccgcgtgacaggattgacgaggcggtgatgaccaacgcgctcattcaggccagcgccgagattgacggctacctgacggcgctgtaccccacgccgtggccggacacgccgcgcattctggtcgggcgctgctgcgacattgcccgttaccagttaaccacggcggaacacccactcaccgacgagatcaggctgcgttatgacgacgccatccgctatctggagaaggtggccgccggcaccattcgcctcggtcgtgacgacagtggcaacgtctacaaaccaacggcgcagtcgcgctttatctcaacaccccggcgcttctcgcgcgacgacaccaaaggcggtgcgttttga

SEQ ID NO: 398520 - DNA, 432 bp, Salmonella enterica
atgatttacatcacctcaaaacgcgagggctttgcccgctgcggcgtgcgtttcagtgaaacgaccacgtcttacccggacgatcgtttcacgccggagcaactggcagacctcgaaagtgagccgatgcttatcgtctcccgcgatgccggcatgaccgccgggcaggcggcggagcaaatcagccgcctgagagacgcccttgatgcggcggagcatgaggtggcggtggttaccgcagagcgtgatgtgctgcatcagcagctcgctgacatgaccgccgaacgtgacgcgctgcgcgaacaactggcggcagcaacaccggcccccgcgccggcagaggatggcgctgtcgctgattccggtggcgctgacagtgatagtgctgacgcagcgccgaagccggcgcgtgccggcgcgaagaaaaaataa

SEQ ID NO: 398521 - DNA, 402 bp, Salmonella enterica
atgatggacagaaacacggcccgtaacgacgggaaatacttcgccgtcccgatggccgccggcgtggtgattggtggcggcctgatggtggtgcttgatgacaaggggctggcgcatgaaggaaaggcgcagaccggttaccgcgtcatcggcctcagcgatgaagcgtttgacaacagcaccggcggggatggcgaggtcagcgcgctggtacgccgtggcgaggcgttttatttcgacaacgacaccgcagccccggtaacccaggtcatggtcggtaagacctgctggcttaaaaacgcgtacaccgtgaccgccaccgccccggcggagggttcggttgaggtgggtcgcgtgctgaccgtctccccggatgatggtgttcaggttctgattgagtaa

SEQ ID NO: 398522 - DNA, 1170 bp, Salmonella enterica
atgaaaacatgtatcgccgctttatccatttctcttactgctgatgccaccccggcgacacgggtacgtattttcccggccggggagtttcgcagcaatgacggtcgcccgaaggagtgccgcacctgggtgatgaatgccgcctgtgcgcagcgcctgattacggcggccgccagcaagaaaaccgactacagctttgattacgagcaccagaccctgcgggcagttgtcaacggcaaacccgccccggcgtccgcgtggtttaaatcgctggagtgggttgaaggtgacggcctctacgccgtggacgtggactggacggcggcagcgtcacagatgatagcggcccgcgagtaccgttatctctcccccatgtttgattacaaccccgtcaccggggaggtcggccagctaatcaatgtggcgctgaccaacttaccggccctggaggaacttgacgagggggttattgccgccgcgtcccgtctggcggccacatcatcaatcttcccggaggaatcctctatggatgaagaacagattgcgtacctgctttcgcagttgcgctggatcctgaacctgcccgaaacctcaacggcggcggatatcaaaaccgagcttgagaagatcattaccgccatttccggcggcaaggagcttgctgcaacgaacgtcgatttgctggcgctgattaacactgctgccgacaaggacgcccgtattgcagagcaggaggcgaagattgccgacctgtcgcagaaggtctacgacccggcgaagttcgtgccgctcgccgccctctcgcaactccagacggcctatgcgggcgtggtgaccggctcaaacgagcaggaggtggagcagcttatcacggtggcgctttccgatcgtcgtctgctgccgggtgagatggagtcgtgggcgcgagatttgggtcagaccaacccggaggccctgaaaacgtatctggagaccgcccggccggtggccgcgctcaaccagatgcagacgcaggtaacgggggtatcgggtgcgccggtcaccgcaccgcgcagcgccgacccgcgcaacgagggtcagggtaccgctgagattgatccggtggtggccgcactttcacaacagtttggtaacgacccggcggagattgcccgcctgatgggggaatga

SEQ ID NO: 398523 - DNA, 171 bp, Salmonella enterica
atgagcgataaaataaaacgctatcctgacgatgacgccctcaataagttcggtggtggaagtgacaaaaatacctccaacaaaactgttgctattgagccgttatcatccaaccataagccgtgcgtcattcccaaattagatgacaaagggaaggattccgggaaataa

SEQ ID NO: 398524 - DNA, 438 bp, Salmonella enterica
atgagcaagattactttaaccgctgcgatgattaagtcactggcagcgtttgcagcagaagacgggcaggatgcttacaccctgtctcatggtcagattccggcgcaggctggctttgccggatattcaggtcttatcgcatattccacgtctgaggatggtggcgttctggcgctcgaaggtacgtgcctgaatgaagaggttagctgtcgtaatgccattgatggcacgtggcttgatggaggggtgatcagccgcaatcagaagcaggttgttgcggcctttcacgagcacgctcatacaggtgaaaagaagaagtcgggcgctatgccttacacggaagaaatgaaactccacctgatgcagttaattattaatgatgatattgagggcttacataatgccctcaatagttcggcgaatttaattcagggttga

SEQ ID NO: 398525 - DNA, 216 bp, Salmonella enterica
atgagttcacttaagcaagaagagttaaagacaatgctgtatatgttgcgcggcgcgatgtgtgaagagtccgaacctgtgcagcagatggtgaaagagtccgaggagaagacgcgggagttcatcgcccgacttgaggcggattaccccgataaaaaaggtattgcgggcggcgtgattgcagcacttgattacctggcaaaaaacgggttttaa

SEQ ID NO: 398526 - DNA, 579 bp, Salmonella enterica
gtgtcttggtcactgaatcctgttaaccgtgtcgtcctgtggggctgtggcggcgtgatgctggccctgctggcagcggtggcggtactggcctggaaagtcagcgacctgagcgaacgggccgggacgcttgccagtgagcgggatgccgcgcgtgacgaacgcgacgatgcccgcgctgagacggccgtgcaggcgatgaactttaaccgcgttaaccagataaccgaggaggcccggcgtgtcaggcaacaaagcgccatcaccgcgcagaacgtcaggcgcgatattcacgcgcatatttcaccggagtcctgcagtagtgtgttgctgcctgctgatgattctgaccggctgtacggctacatcaacgcgctgcgtgacgaagccttacacccggatgccgccggagcttctggccccgacgctgccgtcactcccacccggcgattaacctggggtcaggcggttgagtggttgccgctgctgatgggcgatatccagtcctgtaacagcgataaggcgggtctgagacgtattgataaggagagagtcagtgaaacaacgaaaaaaaattaa

SEQ ID NO: 398527 - DNA, 303 bp, Salmonella enterica
atgactaactatgcaaaattgggtgagtacacggcgttaaaaaaacaggcagaggatgccgccaacaggagatattcactgttacataaccttagcggggagtttcaccgcctgcgggaacagtatgaaacccctgtcgatttctcctatgtaaaccgggagcttgagcgtgtggcggaagcggataaagagatgcgggccgctgtgaagcaggcgaatgaggcggccccgttatgtgggcaacctgaaatttcgctacactggttgatgcgaaattatgaggattcagggtggcgcaggtaa

SEQ ID NO: 398528 - DNA, 444 bp, Salmonella enterica
atgactcccactacgacaagccttatcagggcgattaaaaccggtcaggcccggcttggctgggatgatgccacctaccgtggtgtgctcgttcgtctcaccggcaagagcagcgcgaaagaatgctccatccgggagatgaaagacgtcatagagtacatgcatagccagggctttccacgtcaggctccgaaaggtaaaggccgcaggcccaatgtggcagaacatcgcaaggcgatgctcgccaaaattgaggcgctgctggctgaggatggtctgtcgtgggcgtatgctgaggggatcgcttctcaaatgtacaaaacaaaaacgattgagtggctgcataacaaagctaaccctcatgacaataaaaaaattaagtctttgatgatagcgctggaggttcgagccagggcgaagaagaggcgggagaaacagaagtga

SEQ ID NO: 398529 - DNA, 375 bp, Salmonella enterica
atggctaagtccgcgaccgaacggaaggccgcgcagcgtgcgcggctggcgtcctgtggtggcctgcgtcatgagctggtgctgacccgtcaggaagcggaaatgctcgatcgtaaccgccagcgccgcaatccggggcgcgagccatacagtcgcaatgagtatcttagcctgcttatcctgtgtgataaccagcgtcttgaccgtcaggaagcccgcctcggcgtctgtggtcgttgtggcaatcccctgccgcagggatgcggcggcgagcatatgcgcatggctgctgactgctggtatacccgtgattgtcttaacctgaatttaaccagccccgtgactggtcacgctaatcttgacgaggatgaatga

SEQ ID NO: 398530 - DNA, 381 bp, Salmonella enterica
gtgactattcaacgtttcagacctgttgcgccggcagcgatcatgttgtcggaacagggcgactatgtacgctacagcgattacctggagcaccttaacctttccccggctgcggctgatgtgctggccgaacgtcaccggcagattgcggtaaagggctggacgccagagcatgatgatacctacatcggcttcgaactggctgcggcggccataagctatatagagccaatggaggctgaaaattactggcctgccgactggcttgatgacagttttaagccctcggactaccggcgcaatctggttaaagcgtcagccctgctactggccgaacttgagcggctcgatcgccagtctcagggtattcagcatggctaa

SEQ ID NO: 398531 - DNA, 345 bp, Salmonella enterica
gtgaaacgcatcgatatacgtgttgaggggctgagtgttgaggctcgcaccaacctcgctcaaagcgttctttcggcgctcgtgggtgctggtcgtcgggcggttaaaaggctcgcactggggtgttcgctggcgttcgtgctggtctgggttgtgtcgtgggtactcttcaaaacaggtattacccgcgattctaccgatggcagccgtccgtctaatctgacgctctataccgacgctgcaacagggtgtcagtacctggggaacggcaatggactgacgccccgtatggatgcgcaagggtatcagatgtgcagtgagaaaaccaaaggaggcaagctgtga

SEQ ID NO: 398532 - DNA, 192 bp, Salmonella enterica
atgaaattcatcattattagcagcgtgtcgtatgtggttgcggtactggcattcattggcttcctgtcgtttgtgatgtggcgtaacgcttttcgggagttcgggtacggttactggctcagaatgaccgttggtgtggttgccttaatgtggattttttacggtctttactggctggggaggcacctgtga

SEQ ID NO: 398533 - DNA, 702 bp, Salmonella enterica
atgaataatcagcagaataagcagaataaaaagaaagtggtgtttatttgtggcccgatgaccgggcatgaaaattataaccgcgatgcctttatgcaaacagaaagggatttaatttactggggcgatagcgatgttgtcctcaaccccgccacgctgcctgatggtctggagcatgagcagtatctcactatcacgcgcgggatgattcgggtgtctgattcaatttgtctgctgccgggctgggaagacagcaacggcgcacggcaggaagtgatatacgcactgaagcgtaatatctggccgatgggctttgataatgccatgcgggaaaaattaaaagaggtgttatggagtatgtttactgtcggtggctatgcctgccgttctgcgctttctaatcccatgcggccagcggtgaaagcctgggaggagttcggtttgcataatggcttccgctgccgtcaggtggctattgccgaaccgctgccgaagtccttgcgtgagttcgccctgctgccccgtcagggtgtgactgacgcagcggagaagctgacctggatttccggggtgctggagggcatacagaagcgtttttcgtcgttgccgttaaagcttgatgacctcggcgaggttaaggctgcggcggatgaagcgcataaaaccctttgcgaggtgctggctaatgaggtgattgaatga

SEQ ID NO: 398534 - DNA, 222 bp, Salmonella enterica
atggccctcaccgtcaccagtgcgcagtaccgacgccccggagagctgcatatatacaacatgagtaatggttctgtggctgaggagtttcctcacctgccgccacgtattggcctgaaatgctatgacgctgccgggcgtcgcatacgtaaacccgccgtaattaacgaaatgaaagccgctattaaacggcataaacaaaaatggaaactagcaaaatga

SEQ ID NO: 398535 - DNA, 708 bp, Salmonella enterica
atgaacaaagaaagatatctccagaaaattaaaaaattactgaataaggcgaaatgtaattccagttccgaagaggcggcgacggctttacgcatggcgcagacgctgatgcgtgagcatggtcttgatgaagcgagcgttgagtttaccgatatctccgaagcgctcaccaaaggcgcgccggataacgccagaaagcccacacgctataccgcgatgttgttaacggtgattcgtaatgctttcggggttgaggcgattctggactggcgttataccgcgcgcgggataccggttcgcatcgtccggttctacggccctgccgagcgcccggaggtggcagcgtatgcgttcgatgtgctggcccgtcagttgcgtaaagcccgcgctgactttatcggcgggttacgcaagaacatcaaactctcaacaaagacctcgcgggcggataactactgcgaaggctgggttaatgctgtctggagtaccgttaaagcctttgcctgtaccgaagcggaaacgaccctgatgcaggcgtatttcgaaaagcgttacggcaatctgaataaggcgggaatgcgtgaggctaaaaaagttcgtgggtcggatgaatcgcgccatatgggatatctcgacggaaagaacgtaaggctgcatcacggcgtcgggggaagcagtgacagcccagcgcttatcgggagggggtga

SEQ ID NO: 398536 - DNA, 186 bp, Salmonella enterica
atgaacgcaaaagagtttaaccggcagtataaggttggtacttgctttatccgtcagacgaatctggagttcggcccgatagtcaggacggtcggtaaggcaaatgactttaactgcggcgctatcgttgaaattaatgttatcccgtactttgtcaggatcgatgagctgataccggcaatgtaa

SEQ ID NO: 398537 - DNA, 228 bp, Salmonella enterica
atggatagcaccagtgactacgcccgcaacacgtaccgctgctatgccgttggtgcttcacgttgtgagcaggccggagagtatgagcgggcggcggtgttgtggttcaaagcgtcagagcggccctgtaaggcgcgggcgcgtaagtgggcggaagaccgcgccgacttctgccgtcgtgccgctacagggcgctggagtaagccagatgaacgcaaaagagtttaa

SEQ ID NO: 398538 - DNA, 207 bp, Salmonella enterica
atggccgttgaggttaaagctgtgttcaggcgtgttggtggggtgacgatggcggagattgatgtggctacggcgtcgcctgatttttgcagtgaggagttgcgggaggcgacgatggcggcggagttactgaaagcgcgctttgccaccgtcaccgggttcaacaatgttaattttattgatggggagagtaaatatgtcagttga

SEQ ID NO: 398539 - DNA, 216 bp, Salmonella enterica
atgacggtaagagtgacatttgaatttacgcacaccaaagacgggatcgacgttgtgtctgatgttgtgcctgcggctgagggtcactgtgcgcgcgaaatggcatttgctttagcggctgttgctgaggttcgtttcggtgcaggggcagtgagtcaggcgttgaaggctgaacctgaactctacgggcataaatatactgacggcgttcactga

SEQ ID NO: 398540 - DNA, 219 bp, Salmonella enterica
atggcagcggttataaatatcgtgattgaggataaaaacggtcgtattgaaacgcttatgactggcggcagagaaggtaaggtaacgccaggggaagttaatcaggcaatgggactggcaatagtgataaaagaggcgctggaggcatcaggtggtgagttgtgggccaggtttgatgttgaaaaagccatgaaagatgcaggtgctaaaacgcattaa

SEQ ID NO: 398541 - DNA, 222 bp, Salmonella enterica
atggcagttgcgataaaaatcgtttttgaagaaagaaataatcaaattgacattgatgtatcagggcggccagaaggtgagtctacccaggcagaaatcagcgaggccaaagccttcattgagttttatagtgaacacctggcagaaaatagcgcccggatgaagttatatgaaacggatatgaacaagatttttaaacgcgccggtcgcacggctaactaa

SEQ ID NO: 398542 - DNA, 330 bp, Salmonella enterica
atgtcagttaaaaccgaagttaaatcattgcgccgtatctgtatgcagggagtaacgcttggaacagatactaatgaaatatcgccgcttatttatttctctacggattaccgtaccaataccagaatagtcattctggatatttacagccgtaatcgcgcgctggctgatgatagcagccagtgggagattgaccggaatgaagagcagcgcattgtcttaccggttcataaccgcgaggagtttcgtcgcgcatacgggctggcgcggcttttgcgtggtcgtccccgttctcgtgaagcgctcttgcactggaggacgtatggctaa

SEQ ID NO: 398543 - DNA, 936 bp, Salmonella enterica
atgcaggacttaattgaccgggtaaataaaatcagggagcggaataactattcgcagaatgaacttgcgctaaaaatcgatcgtagtccggcggtgattaatcagtttttacagggcaaatataaaggtaataaagaagacgttgcggcccgtatccgtgagtttgtggaaactgaggaagcacgctttaacgccagattcaaagcgccttcattcgtggaaaccgattcaacaaaagaggcggaaaagcttattaaatttgccatgaaataccggactatctgtgtcttaacggcagattctggcctgggtaaatccaccattctcagggagttcagggccggacgtaccgacacgatactgatagaggtcacatcaggttttaccccgcgtgcgctgatgaaagccctgctaacggagcttaagcctgatgccagcaagagcgcgtccactgccgaactgatgaaagagtgtatcagcgggctgaatactaccccgcgccttatcctggttgacgaggccgagctgctgccctatcaggcgcttgaggcgctgcgccgtctgtatgacatggtcgagacggggatcgtacttgctggcctgccgcgtcttactgataacctcgttggtgcagatggtgagcatgtgcagctctacagccgtatcgcgcagtatctcgatctgaatgaggagtttaaacgccggtgctttgatgctatcgcggtcaggatgatgccggaggcggagagcgacgacgtcagaaacctgctttattactgtgctggtaacaatgttcgccgcctgcttaatatcgtccgtggcgtgtatgacatgtgcgacaggcttaatatccctgtaggtatcggtgcggtgaagaagtacaccgataaactgatgaatagctcaaagggaaaaaataaatcttttgctcattaa

SEQ ID NO: 398544 - DNA, 2070 bp, Salmonella enterica
gtgttaaacctgaagatatatggccgtctcgctatggatattgaaagcaataattgggtgacttcaagagagttaatcaatctgcctaatacgcctgattccttgcaagggatatctcaaaaagcgaagagagataactggccttcaagaagaaagtcaggagttaaggggaaggtttacgaataccacgtaaattccctgcctgaaagcataaggcaagctcttactgattatcgtgcgaagcaactggtcaacgtcgaaactaaagaggctaagccagttacgactaaacaccgcgtcaccgcccgcgatgaagtcggcattatggagcaatgccccgctgtcgttgaacaggcgttgcatcagttgacgcaggcgcagaaggaaatcgccagcgcgcgtattctgcttgcggctgaggttcacaacctgcgcgagaatgctggcatgacgcggacaggcgcgattgactggattgtgcagggttcacgtaccggcaatcttccgccccgcgttctggatgctgcaaatgttgctaatgcccgtcagggaaagcgcgtcggggttggcaagagttcattgcaggagtggtattcaacgtggttgctcgctcagggtgatgctaaccgtctgctggtacttctgtcagccggtcatcataaagccgtaccctggcagcaaatcccctggctcgatgatttctttgtcttctatcgcgtctggcagcggccatcggtggcagaagcctaccgcgactttgaaaagtggtggtttcgggagtatgccggtaacagcgggatgctggcggcgataccaggaatacacacggtacgccgtgagatgcagaaagtgccgaagatagtgcgcgaacgttaccgcactaccggatcggcctggcgttcgcttaatccgtttaagcgccgtgactggtcacagatgccggttaatgccgtgtgggtcggggacgggcactgtatgaaggtgcagacgtttaacccgctcaccaataatacttttcaggcggaagtgaccttcgtcatggatgccgggcaacgctttattgtgggctggtcgatagcgttatccgaaaacacgatagccgttgctgacgccctgcgtcatgccatatcacagcacggcgtaccgcttatttactattcggataatgggccaggtgagacgggtaaaaaccttgatgccgatgtggtcggtatgttgccacggctcggtattgagcactataccgggataccaggcaatccacaggggcgcgggattattgagcgctttaacaagaacgtgccgcgcgaagtggcccgccagtttgagagcttctgccataaggacgcggacgaagagacggtaaagttacaacagcgcatcgccgcctcagcgcttaacgcagcgcatcagggcaaggaactgacgccaagacaggttaaagccctggggaaaataccaacgtgggagcagcttgtggcggccatcgagcgcgaggtggagttgtacaacaaccgggagcataaatcactcccccgccgcgagaacggcaaacactacagcccggcggcgtaccgtaagcacctgatacgtgagcagggtcaggatgtgatgatcgactacctcactcctgaagagctgcatgaaatgttcaggccggaagaaatacgtacaaccacgcggggcgaagtgcatctgttcaataatatttattattccacggagcttaaattctataccggggaaaaagtcagggttaattacgatattcacgatgctgattcggtaattattcgccgtatggacggaacctatatctgtgatgctatctggaacggtaacaaggttgacggattcgccaagccggttatccagaaacgcatcgaagagcgcgttaaaggtcgtatcgatcgcggtatgaagcgcatcgaggacgccgagcgcgagctgcggccagcgctggcgcacaagcaggataacgagtttgccgacctgctggcacgggctgataaagaagctgccctgatagcccagcgggaagcggaattaaagacaggcacacataattaa

SEQ ID NO: 398545 - DNA, 546 bp, Salmonella enterica
atgaaacaagaatggattttagttaaagacctgctggggattggcggactacctaagactgtgcagggtatacaccagaaggctaaggctgaaaagtggcgtaaaaaatctgtcgctcaagagggcgttcgggggcgttcctatgcgtataactttgaggatctaccgccacaggcgcaggctatcttgtccgatgatgaaccgtcaacacaacctgtctttatatcaaaggagaggaaggggcaatctgaggataaatttatgaatgttttcaatgcagtttgggaaggactagaacccaaagaaatggatctcctgtcaaaactccttgcccgcaaaggtgcggagttgctcactcttttgttggataaagataacatcgcactaatgctactaaccggggaacaaagagaagctgctttaatgttgatgcaacttgatccaattcgcgtcagagagattttatccgaattacgagcaagccgtgatatgggtcgaacagcttctcagcaagctgtaggcgaacacagggaagacttagcctaa

SEQ ID NO: 398546 - DNA, 849 bp, Salmonella enterica
atggataattacgcaataaaaataaataataaaaataattatattgtcacgcaaaccattgaggatttttcacaaaaatctatagatgtctcaagttttgaaattcaattaatgcctcgttcaaatcgacctcttgtttgtattaataaagatgatgaccaatgtgtcttttttcaagaggtgatcaaagctaaaattgaaaataagaaattaaattttgctaggccaaatgaaatttcgctatcaatgagcattgccagaaaatcattgcaaaaatcgcaggaaattaggagtaagctgataaagaaatttggtaatgcaaaaacaatggatttatttgatcatcatgttaatgatgtttatgactaccttgaggaagtgcaaaaagcaataatttttagctacaaggccattgagacaatgtgcaactcagccataccagaggaatatacatataaaaatgatttaacaaaaaaagggatatatgaggtttatgataaaacagctatagagcgatgggtatctactacagataaaatatcaaagatactaccatccatttacaaatgtacttccccttccaaaaaatcgttttgggggcactttaaaaaacttgaagaacttagaaatgagatagtacacagtaaatcaagttcaacttcaacattgctcagtgaattattgtctaacgatattaataagtactttaattcttgcgaaaacatgcttttatacttttacgaacatgataagaaaaattcttttttccctgtgatgtcaggaatatcagaaattgctgtaattgagtgggaggatatgaaatctgcttttaaggtaattaaagattga

SEQ ID NO: 398547 - DNA, 519 bp, Salmonella enterica
  misc_feature (375)..(384): n is a, c, g, or t
atgtcaaagatcattatttttgatatggatggcgtacttattgattctgaacctgtatggcaacaggttgaatgcgaattttatcttagacattacaatatctctctcggcccaaaggattttgatttattcacagggatgccggtgggtattttcctgcggaagttgcatgaaaatcatggttttccgactaataatctgccgcaaattcaggacactatagttgcccaggttgcagaaaaaatacgtcaacaaccgaaacctatcgcgggtatctttgagttacttaattatctacagcggcggggaacgttaatggctgtagcctcttcttcaccgcaatatcaaatagataatgttcttaatacacttaannnnnnnnnngttattgcagcgagggctgccgggatgcgcgttattgcattacctgctgaacaccaacaaaatgacccgcgttttactattgccgacacagtaattttgaaccattgccaggtgttagagtggttgactgcataa

SEQ ID NO: 398548 - DNA, 243 bp, Salmonella enterica
atggctcttaatggaaaaatgcttttaaatggtgcagatattgcgccgttatcctttcccggtgttggaacatttatggcgttttccggcaacggtgcttataaaaatcgtggaggatgtggcaagttttcaggaactgctgccggtgatggcccactgcctgaagggcgatactggattgtgagccgcgggggaggtgggagtatctcaaaacataaaagacacgtacaacaaatttcatag

SEQ ID NO: 398549 - DNA, 150 bp, Salmonella enterica
atgataaatatcagaaaggaagccattgacaatgaaaataataattcaaataatactaccaccaacttttattttttcgttcgtcaatggttcctctttatgaatacacaggatcggttcactgatccgctcgccgcaagcccagattag

SEQ ID NO: 398550 - DNA, 387 bp, Salmonella enterica
atggatatgagaaaaaaacagtacgacacaccgttggcagagcgactggatataatcgcgcaacaacatcatttaagtggctccgatctggcaagaatcgcaggggttggccgctcgtcagtcaacgcatggaaaaagcggggaacaataagtaaagattctgccttgaaaatagctgaagcaaccggcttatctttgagctggatactcaccggaaaagaggatgggaatgatgtcttatctgatgatgaaaaaattttagtcaatactttcagggagcttcccccgatagaacgtgcaaatatgctcgcagccttccaaatgcgactggaaaagctaaaagagttttactcaacatacgtagatccatctactcgcgaaaaataa

SEQ ID NO: 398551 - DNA, 261 bp, Salmonella enterica
atgactgcgttagatagagcaataaaaatagcaggtggtattcgtccgttaggacgtgcgattggcgcatatccatctcaaattcacaaatgggttcatgaatacaatgggcgagtcccgacaagtgagcgtgtattccaaatttacttggctacaggaattactcctcatgagctgcgccctgattggcatccaaccccaacgagtgggattccagaggatgctatcaccgcaggcgaaggaggggatgaacaaccatga

SEQ ID NO: 398552 - DNA, 1008 bp, Salmonella enterica
  misc_feature (943)..(952): n is a, c, g, or t
atgcccgtaacattagaacatgtatcttccagaacggtacagcagaagttaaatacaaaaggtatcagaacttgggacaccatacagtacctttcagctttggatggagcgcataaggatactgtttttcatgaacaaatatctaatctacccgaagagtatattcatctggatgagatggcccgagatgaaaaagaatatagcttaaatatttatgagttcttttttgagtcaacgtctgaaattatatgtgaagatattaaatcaactttagatttttattatttgaatagtccaacatttcgtcggttggttaattatagagtcgattatagtataaataacgatattgataccagtaagtgtgaagtaatagtatccccaaattatagttatgaaaatgctgaagggagtcgtgtgtatttatcgttgccgtttaataagaaaggttttcctatcgatcctgaatctaacgactgtgataataatatatcatcagaaaaagtattgttagatttatttttgaagcatattttatacgatgatttgaaagcggatcatgatgttacaaatatatattctaatgttatttataaggaaattgattctacggctatggcacatgcatcgttgtgtttttctcaggcagcggtgagcgatgggcatgagttatttaatattgacagcgtaactactctacctaaaagtactgagcaaatcatatttgagggaaaggaaatacaaaaagaaattttatcctattttgaaaggagtaataattttcagccagtcaccgttcataagatggagagaaatataaaaaatatcgcagtaacgggtttattactatcatccagattaacaatagcagacggtaatgggctaaaaaatgataattcagaagacaagaataattttccatccaataaagaacaactgagannnnnnnnnntgcaagggctctcccggaggatcattccgccccaaatatggagcctcatccgttag

SEQ ID NO: 398553 - DNA, 1107 bp, Salmonella enterica
atgattagagcattgagaaaaagaattcagttatcactggttaatctttttttaatgatacataccggtaagaaagatttttcttttagtcagcaagaatttgaaagtcaggataaaagtcaactgaagaatatcctgatttattcttcaacggcgctgggtgatttcatgatgaactctccagcaattcatgcgctccgacagacatacccttctgcggcaatcactttgatatgccacaaaaagatgtatgacttcctcaaaggaggatgtgactgggacgatcttatctcatggaataataaactcactacccttcctgtgttggttaaagagatcaaaaatcgtggaacgccagacctgacggtgattcttcactcacatacaccttacgatttccttagcgccatcattgctggcactaagtatgtctttgtggataacgataagcaggaactcccactcgtaagtaaatgggcgaccaacagaatcagtaaatttgtggggcataccattcagaggaagctggaactcatcatgcctttgctgaatgaaaagcctgacaacagtatgcatctgccgttccctgtcgaacgtacgttgagtgaggtggattcacagcagcgttggattggttttcaaatgggggcatcatccttgaagaaatgctggcctgttgagcgatttgtcgcttttgcgacccagctttttgcccatgatgatgtgcgtgtcatcctgattggtgcacccaatgaagtgcctctgcaggatgaatttttgcaaaagctggatagccgctttcatgaccgcgtaaaaccgcttgtaggtaaaacgacgcttaaagggctgattcaggaagtgaagaatatggatctgctggtgacatcggatacggggcctatgcacctggctgtggcaatgcgcgtaccgacggtgagtatgtttgttattacctcaccttatctttatggaccctatcaggatcctcaattgcacaaggtggtttacaaagcctatacgacactggatgaaattaagtaccgttcagcattagagaaggttagttgtgaagagatcatggtgcatgtaaagccgttcctgcagtaa

SEQ ID NO: 398554 - DNA, 252 bp, Salmonella enterica
atgaacaccatcaatgaacaggatcggttcgtcatcactggcttcctgtttcagattttcgtaaatttccacgaacgtctgctgcgcttcgacactacatttatatgtaacgccaactggttttcggtagctgaaaccattgcggcgcagccatttggtcatgcccgcaacggtatagcgaacgccccaccattcatcaaccagagcgataataacctgtgtgggagcaaaaggttattcatcagatattaa

SEQ ID NO: 398555 - DNA, 1038 bp, Salmonella enterica
atgaaagctttaattattcgtagagataatattggtgacttgatactgacaacgccgctgatctcaactattgcaaaagatatgaactgtaaagttgatttgttggttaatacttataatcaaccgatcatcgaaaataatcctcatgttggtaaaattttattatacagcaaactgcaccaccgctctaaaggaacttctaaatttaaggtgttgtttcagaggctgaagacgattatcgagctgcgctgtgctaaatatgatgtagcaattattgccaaagaacattgggataaacgctctttacagtgggcaaaattagcaggtgcaaaaagaattatcgctatcggtaatgactgccctgacattatcaccgatgccattcctgaaaatcaagaacagcttcatctggtaaatttactggacagattaacgggacctctaggttgtacttctaaacccggtccactggagttgtatgtcacgccgcaagaattggctgacataaaagcaaaaatagattttcctcaagataatctgcctgtttatggggtgcagataagctcccgaagaaaagaacagcaatggcaaaaagaaaagtttgttgcgcttgcgcataaacttgctgccgtacaggcgtgccatatcctgttattctggtctccaggacaatcggataataaattacatcccggtgatgatgagaaagcttattttatcagtgcgcaatgtgccgatctgcctattattccggtaagaacgaacaccgtacgtgagctgatggccggtatgtcgttatgcgatcaaattgtgaccagcgacggcggtgccttgcatattgctgctggtgtgcacaaaccggtggttgcactgttcggcaacaaggatgtatggctatggacgccatggggcgtgccgtacgaaatgcttcaaggaaaagattatgatgttcgcaacattagcgtcgatgatgtattcacgcggtttgtaagcctgcgggaacaggtgtgtaaaaatatggcaacggatgaagcgtaa

SEQ ID NO: 398556 - DNA, 1386 bp, Salmonella enterica
atgaattcaaacacacaactgcaatttcaattcaaagacgttttagcttatttattgttgttttcttttggcgttttatgttttgtttggcctatacagaactccattttgccgaccaacagaaatctatttatatacttaagtgcggtattaacactatacttttttgtccgtaaagaatatatatccattgagcttagtcggctggcaaagtatgccatagcttcaattcttattttcctcgtgttcacgctgttcaatgggctatttgttgcggttgatatggaaaagatgctccgtagttggcagggacaatacctgcgtgcggggctattattctttgttggactctttttgtatccaatctgtaaatgtcactttaaaaatataacgaccaataaagtgctttctttagttgttctgtgttcgttaggggtgatatttatccacctgctgcaaaatatctatttttacatcaaactgggaagaatactctgggggcatacgtggatcgtgccaactcgcaccgagatgagcttccagataaacatggtaacgagtattttactggcagaagttgcctgccgattgttcctgagccgtaagtatctcatcttcagcaacaaactgatggctacctttattctgctgtgctttatctgttcagcattagcgaagacccgatggggcactatcggtttgattggtagcatgatttctatctgcgtttttattgccttaaaagcgattagccgtaagaatttaccgaagatctgcctgacagcgcttttggtgacgctgattgtgggtattgtgggctacacttcctggcatcaggattctcgctggaaaagcctgagtatggatatggtcgctggctgggatcttgggatgcacagtcgttgctataacggttttgatggtccgtcgatgcgggacagttctggtcgcataatggatgattcgaatagttgccgggcttctttcttccgccaagggatctatttgattgctgaacatccgtttggcgcgggtccgcgaaaagatgcattcttagtgctgctacaggaaaaatatcacgactctattattcagcagtctaacagtcactacgggctgattgatgtcacgcttcaaaacggtatacttgggcttatcaactggctggcattcgtcatactgatgatccttattggttggcgtgcattctcacgtgatttaattattcctggtctgtacttgtctctcttcacagtgagcttcttgttccgtagcagcgtggataacatgatgcgcgatcactttcttgagcaaaatcttgcattatccggtttaatgctgggtctgatcttttcaagtaataaaatatcgcgggataaaaaatga

SEQ ID NO: 398557 - DNA, 138 bp, Salmonella enterica
atgatcgtttttatctgtctgtacaaatatttcccctatgggggattacagcgcgactttatgcgtatcgctaaaaagattgcgtcacgttcaggtatttacgcgaaccaggcgaggggaactctcggcggaatttga

SEQ ID NO: 398558 - DNA, 1068 bp, Salmonella enterica
gtggaaaagttattcagaaatattctggtcattaaaatgcgttttcatggcgatatgctgctgacaactcccgtcatcagtacattaaaacgtaactaccccggagccaaaatagatgtgctcctttatgaagacactaagccgattttatctgagaatccggaaattaatgtgctatatggaattagtaagaaaaacgccacaacaaaaaagaaaatctctaacttcatttcattaataaaaaaattacgtcaaaaccaatatgatttagtgatcaacttgaccgatcagtggctggttgcactattggtccgctttttgtccgttggtacaaaactttcctctgatttccctcatcgtcagaagcttttttggcagaagagctttacgcatcttgtggcgattactggcgatcatatcgtcgagcgtaacctgtcgattctgaatccacttgggcttaacacgcttaatcacgagctgtccatgaactatgctccttcccattggcaaaatattcatgaacatctcaaacagctcaacgtgggtgaacgctatgtggttattcagccaaccgcacgtcagatttttaaatgttgggataacgagaaattttgcgaagttatcgatgctttacaggaaaaaggttatccggttgtgctgacctcgggaccagggaaggaagacctggaatgcatccgtgatattgctgagggatgcaaattatctcccgtcaccgcgcttgcgggtaaaacgacttttcctgaattggctgctctcattgaccatgctgcattgtttattggtgttgactccgctcctatgcatatttcagctgcggtgaagacccctatcatttgtttgtttggtgcgacggatcatatcgcgtggcgaccatgggcggaaaatgtcacgctgctatgggctggcaattatcagccagtaccgccaagagagtggctggaccgcagttataaatatccgtcagtgatcccttcggcggatgttattaacgccgcctggcaagtgctcaatggcgtggagcaggaagtcgaggtgaatgcacaatga

SEQ ID NO: 398559 - DNA, 444 bp, Salmonella enterica
atgcaccgtggtttcaaagacaaaggatctccctgtaaaggggattattacttaagggtttttgaatatattgcggatttgctgatatccgtttgcgggttcctgaagttattcgtttgcgggtttttgtggataactgagacgacgggggtgcggttgagtcattcaggggaggttttatggccggaaacgggaggcatacggaaaaacggcgattttatgtgcatcagcgggctggcggagccagcgccggaagccccggaggggctggcggtgatgtctgtttatggcggttcagaaaaatggcgcttagcgctaatgcgggggcggcgtggccagcaccagttcaagctggtacagttcccggatggccatctgctcgagacgctcaggcgtgcaccagtacgcctcatccgggggcaggcacttcaggatatgctgtga

SEQ ID NO: 398560 - DNA, 369 bp, Salmonella enterica
atgaatcttgaaggaatgggtattatttcgatgcttactcttatgctgtgtatattgtttgctttcatgttcatgcagatagagagtgctgatcaactcaggctggcacgggaggccgcgacgctgccggacgtcagggttatcggaaagatcacggaaagcgaaccggtaaatgataatactgtccgtctgcggcttgatgacggtaccacggtgacactggagacccgtgatgtcattccgtccggtgtcacggcggtgcttcgccggaccggtgaatcctcccgggaccagaaggactggctgtgcctgaaagcactgagtacgacgaatacaaaatgttaccggctgccgggagacctcttctga

SEQ ID NO: 398561 - DNA, 264 bp, Salmonella enterica
gtgattttgccgggtgccgtgcgccgggcgttgacaaatcaggagatgttgattcgggtgaaagcagcgatgaaaaataaatttaaatcaggtgatctctgtacgaaaacggcgacatacgcgcagttcaggacaaaaaacggagaatgtatcggtcaccagtacttccgttatatccgggagggactcacgttcccgcaggctgaaaggggctgctatttcagcgaggctgacagcatttatgaaaatagtgaagactcataa

SEQ ID NO: 398562 - DNA, 1272 bp, Salmonella enterica
atgagaaaaattgatcggggctgggcctcactcgaattcggtgcagtcatgctgctggtgatgattatcgtcgcctggggtgcctccgcactgaaagaccatatagagagaaaaaactggcagacggaagcccggcttgccagtacctgggcgacagcagcccgatcgtacaccggcaaaaattattccaccctgctggcagccagtaccgccacccgccctgcggtgatcacgacggcgatgctgaagaataccggatttttgtccgggggattcagcgacaccaacaccaacggccagaaaatgcaggcttatgtgatccgcaatgcacagaacccggcgttactgcaggcgatggtggtttcgtcgggcggagcacctttcccgctgaaagcgctgatccagatggcctcagagataaccaccggttttggcggctatgtggatgacggcaaaacggccacgggagccctgcgggcctggaaaatcccgctcagcgactatggcgcggccagcggtaaggggcatatagccattctgctctccacggatgagctcagcggcgcagcggaagacaccgaccgtctgtaccgctttcaggttaatggtcgtccggatctgaacaaaatgcacacgtcgatagacatgggcggcaacaatctggacagcgcgggaaccgtgaacggccagcagggtaatttttcactcagtgtcactgccgacggcgatatccgcagtaacaacggctggctgataacccggagcggtaagggctggttaaacgaaagtcacggcggcggattttacatgtcggataacgactggatccgcagcgtcaacaacaagggcatttacaccggcgggcagttaaaaggcggttcagtccggtctgacggtgacctgtcagcgggcggggtgctgaagctcgaccagacgaattatgccggcgcctggtgtccacagaacggggcgataagccacgacagttcaggtggaatactttcatgccagtccggtcgctggaaatcaaacaatacagcagatacccgggtcgtctggggaaactcagcctgttatccctcagacgcgccttctgtcgccgtatgccccgccggaacacaggtcaccggctgcggatatgcattaaacagtttctggggtgggacaaacgcaccggattctttttctcctgttgcagatggcaccgcctgtacccttaacgtgggtaaagccccccaggcctgttttaaggtatgggcagcctgccgctga

SEQ ID NO: 398563 - DNA, 729 bp, Salmonella enterica
atgccgagtaaaactgtaactgtacttgatgtactgaaagaggcagggaaagccaccacacaggaaattgcggcgaagctggatatcgaccagattgatacactgaagatactccgggatgaaatggaagcgggcgtggttgcatctgaagatggccgctggtcactcgttaacgtcaacaacgtcaacatcagtgccagtgtcgatgctgacgttaacattgacgcaataccaacgccaacgccaacgccaacgccaacgccaacgccaacgccaacgccaacgccagtggaccagaacattattttccgggcactgcaacagaacggtgccatgactgccgctgcactggcaaaactcgtaaaccgtaaaccgcagggtatggcggcagtcatgatcggaatggcgagtcggggacttgttgttaaaaacggtcagggtgaaggatgtacgtggtctttgccccccacaaacgttaacgatggcgctgacgctgacactgacgacgttgccgataccgacgccggcgctggcggttccattccggcatttccgggcgctgatgctgacactgatgattttgtattcagattactgaccagaggaactcaggaaagacagcgtgccagagagtacgccgcaaagcttgatgaggtatgcgatgcactgagtgtgttgcataagtacccggacctgatacagcaactcagcaaaggtgaacaaaaatga

SEQ ID NO: 398564 - DNA, 2184 bp, Salmonella enterica
gtgaaaataacattccgtgcgcctgcgctgtgtgcaggccttttcatgcccgtatttccggcactggcctccgtgagtttccaggatatcgtcactgccgccagcaaccctaatgacctctctcgtcaggcgctggtgacaatttttggcgacgtcgtcaccaacccactgtccggcagcggcagtacgctgattggcaatctttatggtttattcaacggcatcatcgccattctggcggttgtctggtttatgtttatcggcctgcgccatatcgtcagtgccgggcatcagggacaggttttcggttccggcggacgtgatatcgtcggcacgctcggcatcgtgagcggcttcctgatgattgtgccgaccggaaacggctggagtcttgcgcagctcatcatgctgtggggatgttccatcatgggcgttggctctgcaaacctgatggtagaggcagcagccgatgatattgccagtggctactccatgacggtgcaacccattcaggcctccacccgtacagcagcgcgtggcatattcgaaatggaactgtgcaaatacgccatcaatgcagacctgaatgactacaaccgcagcgcgaagtcctcgacgccgctgatgaaggagtcaggtaagaaggtcggaggtaactacatcgtcacggtatcaaacggcagcggtgtgtgtggtacagccagcctgcctgtcaacgggaacggaaagaccagccagtcaaccgtcagtaaattcttcaacccgttcagcggaaacgaatacaacggtgttatccaggcgcaacgaaccgcgatggatgagatgatcaaagatatggacggtgccgccagggaatttgtgaccacattcagggagaaacgcgacaccggcagcggaacgttaccggatatagaaacccgcatccagaaggctgcggacaactatgaacaggctgttcagaaagccctgccggaagataatgaggaaagggccaaaaaagaagcgctgaaggcgtacctgaaaacttatggctgggtggcgctgggagcctggtaccagacttttgcgacggctaaccagcgtctggcagacctggccgacagggcaccggcggtaacatccatgtcgtcgctgggggaagccggcgatactgatttcctcgctgcagtaacgaatgcgtacaaaacgcagctacagaactcgtcgttcacgccctcgctgggaaccatcacttcagcccaggaacaacaagcaggtgatggaagtactccccaagcccttatgatgaaaacaattggtactgctggacaaaaactaacaaacaagatagcaacagaatggacaggaaccggaaccacaagtaaccaggttaatccccttatcaaaatgaagaacgtgggggattatacaatgggggccgcagaaacaatctgggcaacctatacaatatcaagaattatcgttgcaggcggagtaaaaacgtttctgggtcatctcgcggacttcgccataggggctggcagtgcagcggaaaaaggccttgattccatttcgcctgtcgtccactttctgttgtttatgatgtttaccgccgggttttcgctgtcaatttatctgccgttcatcccgtttatattctggatgaccggcatcggtaactggatcgccagcgtgttgattggttgtacagccgggccgttgtggggcgcaactcatcttggtacaacccaggacaggggaagtcgcgcggcatatggttacatctacctgatagacacgatgatccgcccgccactgatggtcttcggcttctttttcgcttctgtcgcgataattgcaggaggaaccatcctgaatgccctttacggagccgtactggtcaacgttcagtctgactctctgacaggcatattcagtatagtgggatttctaatgctctacgcccgaatatgcacaacgatggtggcagccctgtttgccctgcaggcatatcttcccgatcatgttattaacttcctgggcggtcgtgatggcgtgaataccatggggaacatggtttcttcggttaaagatatcattctcgcgggtaaccggaatatgcgtggtactccaggcatgcagagacaacgttccccttcaaaaggaaatgatggtgataaaaataaagacggaataaacggataa

SEQ ID NO: 398565 - DNA, 639 bp, Salmonella enterica
atgactgaaagaatacctaactggtgtaaatataccaattcagtactaattatatacctattgtttggcattccgttttttttattgtgtggaatagctttcattgcattagttctatcagacgaaaacccaaatctcgatgagtatatttatgcctacggaagttgggcattactcattattccatgtgtatggttatacctgtctgctaaaaaaagacaaaagaaaatcaataccataattagcagcctgaaagagaccgggcgattcattcccgataaaaatcttgagtacaggatgttctggcaggcgaaatactttggtattgatgtcaggaacggcaccatgctgtacattggtatctggcccggtaaggttatggatgtgataggttttcaggctggcagcatcactgagacggccacatccggcagcagaattgacctgcataccagttttgtcactctgcctgtcatttcccttgagctggtaacaaagtatgcctcaacgattgcgaacaccattcacgcaatcaatcgtaaaggctacagttatccggttaacttccctgctctggtgcagaataagaagaaagaatgggaaaacatgacggggctgcctgtacctgaatacttctga

SEQ ID NO: 398566 - DNA, 246 bp, Salmonella enterica
atgggaaaacataaacagcagtctaaaaactttaacgggaaacatatagtctgggagaagatggctatcctggtggcggtactcttcatactgggcgcgctgttatggccagaactccaccgccgacatcctcaatggtcgtcgtacttatacaatccgacgatgagcacagagcaggatggctggaacagcaattgtcctgcaaatgttattaaagggcaggaagtggtgactccctgcccttag

SEQ ID NO: 398567 - DNA, 531 bp, Salmonella enterica
atgaaccctgaaccgatgaaaacgccggaattatgcccgaagcatggacacgtctggacaccggaagatgacgaactgttgataagcctttacccggataataccgcagccattgtggctgcccgactggggaggacagtcgacacgatctaccggagagtagcgatactcaggcaagagtatcggatacccccccaaaaaaactacttcacggataagcaaaaggattttatccgtgataactgccacgccatgacgtatcagcaggtagccgatcatctgggaaaaagtaaggaaagtgtggaaactgtcgccagaatcatgggggtcagttaccacaagaccggaaacttacaccccaacacaatctatcccgacagtgatgttttacgcgttcgcgctttacgcgatgaaggcatggcgttcagggaaatagccagaatattaggtatgccgagaacaacggcaataaggatatatcacaaacgcaaaactaaagctgacaccattgcaaagcgacagtctcaataa

SEQ ID NO: 398568 - DNA, 327 bp, Salmonella enterica
atgaaaatcactaacgccgttaatattatcaatgaaatttgttcgtatcttggtgatggctggtttattaacgaaaaaccagatatggaattaattgacgggtattgtcagttaataagtgaagttgataaaaacaaagatttttcaatgtattgctgcgtaaataatggaaggttacatataagaggttttgtttttaatgacgtgatgggagatggttttactcctgccttaaataaaggagcactgaaactggctaaatatataaggaaaaatgtaataagccagaaacattatcttttttcaatagttaataacaggaaatga

SEQ ID NO: 398569 - DNA, 579 bp, Salmonella enterica
atgtggttatctcagcccccggaaagttccggcagcggggaacggggcgcagaagtggcggccggaggagagacagcagcgccggatggcgctgtgaccttacaccccgtcaggggtgcggtgagcgcaggccacggcgcgacggggcggcgcgaccggaacggtcgctgcaggccgggttttcacgcatcagaccgtagcgccagcccgaaaccgcgccagcgggttcggcggagcctggcgggtgcgtcagcagccgcccggcggagtcgggctcgacgaccggacagcttcagctggccgcgagccgaaggggcgacagggcagcagcaggcagggaatatgatgaaagagtcaccggatcacccggtcagaacatatgacacaaccgctaccggaaagccgggtttgcagcgccgcaggcgctgcttcccgcttttccggcaggcgcaggcctgccaggggtttttctcgcgggctgacaggcagcctccctgctgcccgtactccggtcagatgtcagacatcaggcgtccagtgcggcacgcatcgtccgcatggcctcctgttcttccctga

SEQ ID NO: 398570 - DNA, 411 bp, Salmonella enterica
atgtactgctcattaaaaaaggcgctttcagaactgctgtcgctggatgtggaagaaggggaacgcgttttcgttttcacgctgacccgtggcgaggtgcgacatatcgcgcaggactggaatctgtcagacgatgacctggaaaccgtcatgcagcggctctgtactgcctttgaatatggcgcggaggtgaaagtcattcacgacattgttgaagagctgatggaggagctgcgcgccgtgcggagcgtgaccgtccctgccgttaccctggaaaaagtcatggcgcttgccggaggcgaaatgaaacgtctgtatgccgtggcggaggaagggggcgggaacccgatggagtttatcagggaagaacaggaggccatgcggacgatgcgtgccgcactggacgcctga

SEQ ID NO: 398571 - DNA, 201 bp, Salmonella enterica
atggacagagaaatgctggcagagtggctgcgggatattgcccaacatatagaagaggaaagttcactgattcgtgatgtcagtgtggatgatgccctttcagatgaggggctggtcagaaagatcatcaccatcacgttcaatgctccaggtcgtgccccacagcctgaagaaaacttcagcgatatccacagacactaa

SEQ ID NO: 398572 - DNA, 852 bp, Salmonella enterica
atgtctgaaattccagtgcaatctcagttgacaccgctggttaacacagtggcccgcatcattgccatcatgaataacaagggtggcgcaggtaaaacctccacgatcaccaacctcgctatgagtttcgcacatgccgggcgtcgggtattgcttatcgacggagaccagcaggccaactcgactgaggtgatggctaacgggaaaaaatactacgcgcagtatggccacaccatctgcgatttatataacaacccgcgcttcagtatttttgatgcaataatcccggccttcagtggtgaagaggtgatcgataacctttttatcattccgtcagacccgtcgtttgaacgcgtcatggaaaactgcctgacccggcaccatcgagaaaaaatattgtcccgccatctgcagtcggtgatggataaattcgattatatcctcatcgactgttctccgggtctgaacctgtccaccacgaacgctgcctataccgcagaccatgtgcttattcccgtcgatggaggcagctttgcactgaccgggctggatgttgtactggactatctcgatgagatccgtgaaacccgctttacccggttcagtgtattccgaaatgagtacaatggatccaagaagaagatgaacacctatcttcatgagcaactggcttccaacgagcgaacccgtgataactacctggaaacccgtatccgggctgatgagaacatctcccaggcacaggttgcctgcgtcccgctctggtattacaacaaagggtctctcgccctgaacgattaccgtgcgctgatgcgtgaacttgaaactatcttatcgaacgaggctgcataa

SEQ ID NO: 398573 - DNA, 294 bp, Salmonella enterica
atggctaaaggccctctcgcgcgtcccgcaatggtcaaacctgaaaccgcacagggagaggcgaaacctcgcctttctaacgtcaaggtcaaccgcaacagaacgaccagcgaaaaccccaaaactatccgcatgacaccggcggaaaaagtgatgtgcagcgaactggttgatgaaattcaggatctcaccaccaaaaccatcaccgactcaactgtgctgcgtgcagcgctgtatctggcccgggaagccggtccggaaaaaatgctggaaatgatcaaggaacatttgtaa

SEQ ID NO: 398574 - DNA, 258 bp, Salmonella enterica
atggctaaatatcaactccgcaagatttgccctaattcgcgtggtgaaaaccgttattcaagctgcgatgaattttctacattctcagatttacgtgacgagattaacgctcgccgtgacatctggttcggaggtgggtttgatgtgctggattcagatgggaatatcatttttgataaacccgcagccagcttctgtatttatacgtttggtagaaacttcacgcttcgccaggcaacagaaaactacggtgaataa

SEQ ID NO: 398575 - DNA, 543 bp, Salmonella enterica
atgagctacgaaaactaccagggtgttattaaacaatttgagcgcgaggtaaagcgcccgtctaaattgaacactatcgatgatgtttacagttccccttctgatttcagggcagtacaggcgatatatactcgttgttatctgagtcttgaagccgccgcctgtctgtggggtatcgagcggtgtatacattctcgctcgtcaatgcttattgggtatgacggccgcttttcagtggctcagtgctgggcgaatttatctgacagcacaaatcgcgaaaataacatcaatgaaaaccggtttaagaaatggtctgcgatgaataacgattggtcagatttctatcgcaggacactggagtttctgaagttatgcaagttaaaggggctaaacttctcgcatgaatcgctctataacgttataaaaatgcgggataatacaatgaaaaaatacgaagatggctcttatttacgggttccaaagccagagcttttcaacatagcgatgtggatggaatttagcgaatcatcaaagtttttttga

SEQ ID NO: 398576 - DNA, 186 bp, Salmonella enterica
atgactttaaaagaatacatagataaatactacggtgggaatcaatcagaatttgggcgcgctgttggcgtaccgagagcgctggtgaatcgctggattaaaaacggtttcatcgtacacaataatgagcttttcagtccgcgaagagaacttccaccggtgaaccttgtagataatcagatctaa

SEQ ID NO: 398577 - DNA, 360 bp, Salmonella enterica
atggcgggattaaacatttttcggttcatgccgttatttttgtttttactggcgggaagttcatctgcagctggtaacgaggcgaacgaaaccgatatcatcaattatactaaagttcttaaaatcacgataaaaaatacaggtggaagtgcgtttaacgcttataaagggaaatcgtgcgttttaaaaatgcatattgcccgtgatggttctttgctgggattcagcactgaaaatggtgcacctgatttatgtaataagctgtcagatgttatgcataatataaaaaaacttccggctcctccttctgatgcaatttatgataagttcagggatacacatttgtcattcactccctga

SEQ ID NO: 398578 - DNA, 396 bp, Salmonella enterica
atgtctaacactaacgccaattttgagatgaccgggatcctgttagggcaagaagctcgtaaacgtaagactcctcaggagaagatcgccattatccagcagacgatggagccgggcatgagtgtttcccatgtcgctcgcctgcacggtattcagcccagcctgctgttcaagtggaagaagcaataccaggaaggcagtctcactgccgttgctgccggagaacaggtggttccggcttctgagctcgcagcagcactgaaacaggttcgggaactccagcgccttctgggcaagaagacgatggaagttgagatcctgaaagaagccgtggagtacggtcagtcgcgaaaatggatagcgcacgcgcccttattgccaaaggacggggaatag

SEQ ID NO: 398579 - DNA, 1125 bp, Salmonella enterica
atgctgaagtcgtctctggtgttgttcctgattctggcaccacagtcggcatgcctggcatggtcactaccgtcacatgaacaactggatagctggctggcccgggcgggaggcagtaccggctccggtgcctgttggaatatccttcccggaccgttttacacgcctgaactgggtccggggatcggtggggccgtagccggtcagtatcatccctcgtctgatgatacggtgagccagaactccacgttatcgttcagcggctatgtgagtgccactggagccgctggaatgaatctcaacaattatgcttttttcgcacaggatacctggcgtttttttcttgacggttcgttgagcaatactcccacttattattatggccaggggttttatgccggagaacacggcggtcataaacagaagtacacgtcacgggcgttaactcttcatcctgttatataccggaaactgaccgggcacacatatcttggactcggctgggcgctggacctgcagcatgcagcaaaaacggataaaagcggaccattacttattgaaaatacaccgcagggagcgtcggtattcagttccggggtcagtatggcactgaccctggatgatcgtgattttgtgcctaatccccgtacaggacaactggcagatatccattttacccggtatacaccggggacaggaagcgacgcgcgttttgatgaatacacattgcactacagccattatcacgccctcagtaataaaaccgtgctggcctgggaactgaatggcgattttagccggggagatgtcccgtggaatatgttgccgttactcggggacaaccaccggatgcggggttactacgaagggcgttatcgcgacagaaatgtcgtcagcgggcaggcggagcttcgtcacagactgacctggcggcacggtattgtggggtggctgggcgccggaaccatggcaccttcgcttcatgaaacaggtcacagacactggctgccttcagtcgggattggttaccgttttgagttcagtccgcgtatgaacgttcgtcttgattatggtgtgggcagaggcagcagcggtttttattttcagacaggagaggcattttga

SEQ ID NO: 398580 - DNA, 1008 bp, Salmonella enterica
atgaaaaaagcacagcttcttctgacctgtctgtccgttttatgtgctccggcagcatacgcaaaagcgttaccgggaaaagataccacaattatcagccctgttccttctaagcctgcagatcccctgacgactgatgacaattcattcctgcccttcctgggggaggtggctaagactcatggttacgatctgcctgagccttttggcattaatgttaattatatgaatatgcgccagaatattgatgttgacagcatcagattctcaggactcggccggccgggccacgcctttccgtcagacctgtttgatattcaggccagtcatacgcgggagcgcagcattacaaaaacggtcaaactggacgcctggttgtttccttttatgaatatttacgctcttgtggggaaaacccgcggaagttcgcattccactgtttctgtggatgccagcccggctaatgggcccatcagctcaattatccacggaatgaacgagtcaggcgctctgaaaaacctggatttcagtctccgttttcacggtaccacatatggtgcaggcacggtgctggctggcgggtatggtaactggtatggcctgatggatatcaactatacccggacagattttaacattcttgacgggcacaccgatgcattcacgctcaccccccgggtggggtatcgtttcaccacgccgggcgtcgacagtctttcattaccagccggtaaactgggcgtgtgggtgggtaccatgtaccagaatgttcagcagacttttcgtggcaaactgagtgacctgaatataccggcaagtttcgggggactgatgacgctggcagaccagaatgggaacggacgttttgaggttaaacaacacctgcattctccctggaatcttctggcaggggccagttacgaaatcacccgcaacgttaatgttacaacagaggtgggatttgctgaacgtaacagtgtgctcgtctctgctgaataccggttctga

SEQ ID NO: 398581 - DNA, 255 bp, Salmonella enterica
atgcgcaggcaacttcgtgatgaaggatttcccccggtaaacgccaaacgtgtttaccgtgtgatgagagaacataacttgttgctgttgcatgacaaaccacagcgtccacaacgtaagcataacggtaaaatcgcagtaccagatagcaatatgcgctggtgctcagattgcttcgggttcgggtgtgacaatggagaaaaactgcgggtcacgttcgcgctgggctgctgtgacagggaggccattgactga

SEQ ID NO: 398582 - DNA, 348 bp, Salmonella enterica
atggtgaggtcggtggagaaacgcttcggtaacaagcttccggacaaaccggtacagtggctgacggataatggttctgcgtataccgcgcacgatacacgcaagttcgcgagagagttgaatctggagctctgtacaacagcggtgagcaacccgcaaagtaatggcatggctgagaggttcgtgaaaacgatgaaggaagactacatcgcgttcatgccaaaatcgaatgtgcaaacggccctgcagaacctttccgcggcgttcaatcattacaatgaaaaccatcagcaagcgttctgggatatcactccccaagggaatatcggcgcctgtgagcatcgttaa

SEQ ID NO: 398583 - DNA, 132 bp, Salmonella enterica
atggcattgttgtacggaagtatccccggtctgcccggtaacgaagatggcctggaagctgatgacgccggggtgaaaacaccttttgtcgtcacgtttgccacctcctggcagaaaaaggagcacccgtga

SEQ ID NO: 398584 - DNA, 294 bp, Salmonella enterica
atgagcgttaaatttaccaggagggccagagagcatattcgcgctataaagctatattccttacgtcggtggggagttagcgtagcagaggcttacgctaactccttgcatgtgacaatgaccgatattcttgatcggcatccatcccccggacgtgatcgtagcgaggatcttcatgttggtgtgcggagtttccctgttcagacccatataatctattaccgcgaagttccggcaggtattgaggtgttggcggtattacaccaggcacaagatccatacaatcacctgtga

SEQ ID NO: 398585 - DNA, 813 bp, Salmonella enterica
ttgaaagccagacacataccagtattaatgtatcatcatataagtagtcgtccaggtctcgtaactatctcgtcaaatacatttcgcgagcagatgcgatggcttagaaataataactggaaaacacttactactgcagatatagaagaattttatcagggaaaacctttcccgcgtaaaagtgtaatggttacatttgatgatggttaccttgataactggttacaggcttatcctattttaaaagaatatgatattcatgcacatatatttttaataacaaacctgataggcgagggagttgttcgccagaagaatatgaatgaatattctcataaggaatgtgaaaactatatagctaagggagctgcggacaatgtgatgcttagatggtcagagattgatgaaatgcgacgggatgggttaactgaatttcatccacacacccatactcatacccgttgggatcagcagaaaatgacatatgaagaacaaatcattgcgctaaaagaagatattttattaagtaaacagtatatggaagaaaaaatgggatactgttcccgtcatttgtgttggccagaaggttattacaatgaagagtatattcgaatagcacaagcgttgggatttaattatctatacacaacagagagacgaatgaacagcaaagtaaatggtactttgcgtatcggaagaataagtactaaagaacgggaacattcaggctggttaaaacgaagacttttctattatacaacacctttattttcttctcttctggctctccataaaggtccaagactgacatag

SEQ ID NO: 398586 - DNA, 1110 bp, Salmonella enterica
atgtttatattatttaccgaatcatccccaaatcttggtggacaggaattacaggctattgcatggatggttgagttaaaaaaacagggatatcaaatattacttgcttgtagaccaggaagtaatatttccataaaagcaacctccgagaatattccggtaacttatatcccgttcaggaacagtactcatattccatcaatattaataatgacaaatattattcagcgttattcacccgacatcattatatgccatagcggtcatgacagtaatattgttggtatagcgaaaatattaaacagatacagatttaaacgtccatatgttattagactgaagacctaccttacaaaaaaaacaaagactttctcactgaattatatgaatgatactattatagttcctgggaagtttgtgaagaaccagcttgttgaagctggatgtattgaggaaaaaatccagattgtacatcctggatttgattttgataaaatggaaaaggaatctcaataccctttacctcaacatataagaaactggatagttaaacataatgagctattaattgttcaggttggaatgctacgaaaagaaaaagcgcatgattttatgctacgggttttggcacgactgaagaatgatggctgttcatttcgttatcttatagttggagaaggttcatcagaggatgagactgcaatcaggaatcaaataaaagagtcaggcttacaggatcaagtactaatggctggaagcatattccctgtgatgcccgtatatcgcattgcagatatagtcgtgatgccatcccgtaatgagtcatttggaatggctatagtagaagcctccttcttctctgtccctgttctggccagcaacacaggtgggatatcggaaataatacaacataatgataatggaacattgttaccagtggatgatgaggacgcctggtacaaaacacttaaacatattcagttacaccctgaatatttcaaagcaatggcaaaaaaagcaaaaaaagatgttgagtatcgtttttgtatccggagtgtcattaataaagttctgagtttaaaaatccctgacaatgataaaaatccataa

SEQ ID NO: 398587 - DNA, 264 bp, Salmonella enterica
atgaaattatgtggtgcccatattgtacctcttttccctgtttataattccacatctcatcaactgacaattattattcgccctcctatggaagaccttttaactattgataatgctgcaatagccagacgtatgaatgaagaaattgaattccttgtaggtcctcatccggaacaatatatttggattttgaaactgctcaaaacaaggagaaatgaagagactgaaccttataaacgtgaagaactttatccgttggaatga

SEQ ID NO: 398588 - DNA, 522 bp, Salmonella enterica
ttgaggttaacagatagtgtatggctgcagcattactacagtcatcatggagaggttgccaaaagacaggactgggctaccagcattactgcaaatgttccgtgggttgttgatttcaatacatccaaccctcagcgggatattgtgggcaatgccgctacagctactaccgcaacaaaactgaaaacacccagaacaatagccggggttgcatttgacgggactgcaaatattgacctggaatttcttgtatatggtcagttgttaagtgacgtaacggcctcacgcgttaaaaacgtatcatacaccaatgacacattaaaaccggtcgttgtgtatgtccgttttaataatgaaaataacactaaccgtaaaatttacgtaaataactatctgttgatagaaataaacaatattacagggtatgaccagcccggatcatgtacgttcatcgttcctgcagggggcgtatatcgggtggaaacaaccgggacgctagttggctgggtggagatgatataa

SEQ ID NO: 398589 - DNA, 384 bp, Salmonella enterica
atgcaaagcaacatcggtatgcgtttacgtgaagaacgtgaacgtttagggttaagccaaccggcaatgggggagataggtggtgttaagaagcttactcagcttaactacgaaaagggagaacgttcccctgatgcagcttacctctgtgcaatatcaaaatttggagcagatattcagttcatcgtcacgggagttagatcttctgtggcgctcaatgcagatgagcaagagctactgagcctttttagaaaatcacctatagcagttaaagctgcggcgcttgcggctttaactgctggtagttctgcttctggttctgtcaatgtatcaggcagcggcaaccgtgtagctggcagggattatcacgaaaagaaaaagtaa

SEQ ID NO: 398590 - DNA, 708 bp, Salmonella enterica
atgaaactcaccatcgaagatgtacaggtcgccattaaaggcgtaatgaaatacagcagtcaatgcatatctgaacaattactagccgtagttgcaggtaattacgccaaaggaaacaacattatttctttgcgtttacaatcactatatgaagatgaaaatttcgactccaccatcggcgcgataaaaaatttgtactacaccgagatggacggaagaacccagttgcgcggtgatctcattttcgataccgaggaattggatatacaaagcattctccacagcttggcgcacggctgcgtgtacctgtcaccgcattttatgaacgtcgggtcactgaatcattgcttcgcctgtctgagttcagtcaccctgagcaaggcccacgacaccacttttaacggtatcgaaccgctcgacatttccggtctgaatgaactgattaacgcgctttacaaagaaccggaaaccgaagagacaacaaaatacaccacaggccagatgacgtacacatcatcccattatattcatgcaggaaatatgaataacgaagacctcagaagatggcttaacaatgtcgtggaacatattggacttgaagagaaatgcctgagcagactggaaagtatcaacaataataaagccaatgcagaatcagacctaaaagagtgccagaattttttggataaagtctttcgttatacataa

SEQ ID NO: 398591 - DNA, 534 bp, Salmonella enterica
atgctacagatgaaatttaaaccccgctttattgaagcgttccgcagcggtcagaagattacctcactccgcatgatggagtttaaatgcttccggtcagacagagaggacaaagaggaatattttcacgacgacaccctgaccaaaaacataatcattcctgattacagcgctgacgcaaccatgtggtttggtaaaggggcgagatttacccacatatcggactttgtcggacttctgaaaaggcaaccctaccagactttgagcaatatcaaactggtcacagagatcgaaggcggcgaaacagtgccgtttgctaccgctgatattggttacatttccgttatcaagggcgacaagatagcagatgttgacgccattcatgacggcttcaaccctgaccgtgacccactaagcgaactcctggcattcatgcgggacgtttaccccaacaaagacccgctaaacgaaatgttctggctgtacaccttcaccaacattctgatgttgccgatgcagggaggtgcagcatga

SEQ ID NO: 398592 - DNA, 861 bp, Salmonella enterica
atgaccgccaccgcctactacaacgaaatcgatccctttgccgccacctggctgcaaaaccttatcgacgctggttacattgctcccggcgtcgttgacacgcgctcaattgaggaagttaccgccaatgaccttaaaggattcacgcagtgccattttttcgccgggatcggcgtctggtcttacgccctgcggtgcgccggatggcctgacagtcgccccgtctggacaggttcctgcccctgccagccattcagccagtcaggaaaacgccggggattcaacgacccccgccacctgtggcccacatggttttaccttgtatcgcagtgccgccctcacgttatctttggtgaacaggttgcaagcaaagacggcctcacagttatcgatctttgtgctgcgggcttcggtgcgccgcacatccggcagcgcctcttctgggtggccgacgccgacagccaacgcatggaaacacccgtcgaatgcggggagagagggaggattgaatttgcaaacggctgtagccttatcgggctggcccacaccgacaacgagcagctaccgctcaccctgcccgcaagaggccatgaagacatatcgcgacaatggaacaaaaattcagaagcgcttgcaggatctggcagcgatagcaacgccagcccggttaacagcttctggcgagatgctgactggttgttctgccgggatggaaagtggaggccagttaaacccggaattaagccgctggttaatggggctcccggacgcgtgggccagttgcgcgcctacggaaacgccatcgttgcgccggtcgcggaaacgttcataagagcatacatggaggcggtcacgccatga

SEQ ID NO: 398593 - DNA, 426 bp, Salmonella enterica
atgagtaattttattctggcgatgacaccggaacaatgggagaaactgaagagttgcccccggaattttccaatcgttgaaggctattttcagtcacaaccacagcccggcgacatactgctggtcaggcaacagctacgacataagccgttagggagtacaggtattattgatcttggcgagtgcgtcattgcatgggcggaccccgtcaccagtagccctcaccgctatcggctgaaagtgaccttcaacatgacaccggaacaggtgaaacagcgctacggttgcccgttcaccccactatcagacatgatacgcaggcacaggaaagaaaaagagcaagcaaagttggagaaagcacgtcgcatactggcaggaaaagcttatgttgcatcactatttttgagcaagaacaagcaggtctga

SEQ ID NO: 398594 - DNA, 1026 bp, Salmonella enterica
atgattacaggctattactcacattatcagcttaatgttgaacagtttaataatttgtttacaaataatgtggatgttaacactcttgatttactgggtaaatcagcagcagatggcaaccttgattgtattgatatgttgcataatcttgccttgcgccatgattatatagggaaaaaatccgagagtatcctttttgatttattcagcgggaaaactaggggaaaggtagggatagacgaggaaattcaacagactagtttgaaattatacgaaacagcgtgtgatgctaaagggaaagacaatacagacatgagcaaattatattctccttctaaactgctttacatggctggttcggctatgaaaaacataacgcaaaaacaggagttatccaatattttcaatggcatggatagggctcagtcacagttcgagcaatttgataatgttgatttatggagtaacggccgtatgctgatgactgatgagataaacaatgctatgaatggattaatttctaatactgataatttttcattaaatttccctataggccttattgagcctataaataaattaaatatgttatctgaacaaattgctgaaaaaagaaagtatagcaaacaccttgataagaaagaactttttccgattaatacgggtgggcactgggtattgtttgttttatataaaaacgaaaatgacaacaatccagaatgtgttgtgttcaattcttcttgcgagttaaataaagatgtaaaaaatcatcttatcgattctgcaaaaatagcaggggtaactaaagaaaatatcgaatttattaatggagatatgcaggaaaatgttccaaacggatgtggggtatttgtagttaaggtggcagcgttactctcaaatacccctgagagaaaaccagtagatatttttaatgattttattaaggatttttcaaaattatctgcagaagatcaaatgttatttaacatacagaaccgtcgtcaacagtatgaacataacatttag

SEQ ID NO: 398595 - DNA, 660 bp, Salmonella enterica
atgtttgaaaaactgaaaattcagcaccgtacaatgcgtgaacatttttccccaaatctcagtctgcgtgtgcatcgctccttaagctggttacagcgagccgaaatggctgaggatgacgatggtcgctttatatttctgtggattgcgtttaatgcagcgtatgcaaccgaaatagatgataattatcgcctgtcagagcaggtctctttcagaaactttctggagaaattgtgcgggctggatgaacacaaacagattgaacaactggtatggcaggagttttcaggcagcatccgaattttgctgaataccccctttgttttacaaagcttctgggatcaccacagcggaaaaataagcgaaacgcaatggaaagagcgattaaagcatgacaggaaaattgcatccatggcgttagccagcagtaatactccgcagttgctgggggtgatattcagtcgtctttataccctgcgtaatcagctcattcatgggggcgcgacctggaacagttctgtgaacagaaaacagttaaaggattgtaccagtctgctgggcaaactggttcctgtggttattgccctgatgatgagtcaccctgacacattgtggggaaatgcctgttatcccgttgtggaagctcctggtaatatctga

SEQ ID NO: 398596 - DNA, 600 bp, Salmonella enterica
atgcgtaataaaataatacttgccatggcggctgccggtatgatgtgtgccacttctgcttttgctggtacagatggtggtgacgggccctcgacgcagtcccccacattagccacagcccacatcaccgttaccggaaccatcaacaattcaccctgcgatatcgcagcgggagatgacaaccttactataacttttaatcagttttctaacagacaccttcaggaatcaggtaagcctgccgatgcaaagtacaacaaggacttcgccattcatctggagaactgttcatttgatagcgacgggaaagatggcttcctgatgtccatggtgaccgtgagcttctctcccggggggggcgtcgttgcccctgagaatggtgttttccctaactcaaaggatgcgggaatggcgcaaaatgtcggggttcagttcctggatgacaaagggcaggttatcaagcctagctaccagggcaaacagcagttaactacgggtaacaaccagataaacttaaccgcccagttagtcaatacgggcgggagtgtcactacggggccgatcaatatcccgctcacctataccctgacatacagctga

SEQ ID NO: 398597 - DNA, 747 bp, Salmonella enterica
atgctgaagagcagagcagtaatcagcgccgttgtgctctcactgaccgtggtgtggagtgacggcagtctggcggccatcaacgttgaccggacacgcatcatcatgaacagcagtgagaaaagcattgccatcacgctgaacaatgacagtaaacacacgccctttctggcgcagtcctgggtgacggatgcggacggggtgaaaacgaatgccctgctggccctgccgccgttacagcgtattgacagcggacagaagggccaggtacgcatcacgcaggtcagggcgctgaccgcccgccttccgcaggacagggaaaccctgttctggtttaacgtccggggcattccgccgaaggctgacggggatgccgttctgcagctgaccatgcagagccggctgaaactgttttaccgcccggtcgccattgtccggggcttcagtgaccagccggaaaaaaagctgacggctgagcgggaggcgggtcgtctgaccttaaaaaatccgacgccgtattacatcaccgtggcctggctgggggctgaccgcagtcatccgctgagcggattcagccagagtgtgatggtgccgccgttcgccagtctgccggtgaaggccgttctgccggctgaaacacggaaactgtgggtggggtatatcgatgactatggcgggctgcagatgaatgactacacctgcacagcccggctgtgcgccctgaaggccggagggtcagcatcatga

SEQ ID NO: 398598 - DNA, 1098 bp, Salmonella enterica
atgagcgggcagatgacttacctgaaaaccacactgatggtactggcgatgatgtccggggctgccgcgcttcccgtacaggcgaccattaccagttgtaaagttacggccccctccctgatggtacccgatattagcctgtcctccaccaggtgggttaaagaccaacctgttggtccgtcgtctcatgtcacgataaactttacctgtaaagtaggtatattgactgataataaccccgaccggtaccagcccactctggtcgtcgacccgggattcaggggcgcgattaatgccctgaaggctgtcaacctgggactgaacctggaaataactgacggtgaaggaaccgtgggaaaactgtcctgggaccagataaaaacgacgggggcgggaagcgctgtcctggtaccgtttggtaaacggatagatgcgggtacaactgtagacaagacggcaacacttaccggaacatttattgctacggagggcaagccgccgaatgttccggtaaatattcatgttggtccggtatcaccagcatttgaaatctggcccgttaacgatccttataatactggtcctgtcggacaaataaataccagcgcgtttaacgtccggctttttccgtctggtgcagggaagatttgtatctcaactttcggtcctgatgcctgtgatgttaatcatcctaacgccgctgtggattttggacatctgtatgccacctcagtggatacgttaaccagaaccacgcccttctgggtgaacgcaagtcagtcaataggaaccacatccgacggctttgatgtgccactgaatatagagtttgtgagcgaaggggagactctgacagccagtaaccaggcgattattctcggcaatggactggtactttcaatatccggccccgatggacagaaggtaacttttaatcagcctgccccaatgaatacatcccttcattttgaaccgggtggtgctacgtacactacttcacaaaaatataccgcaaaggtggaaccggaatcgaaacaggctgaaattaaaaccggtcggtttagtgccggattgacggtcaaagtgacatataactga

SEQ ID NO: 398599 - DNA, 513 bp, Salmonella enterica
atgtgccctgataacacacacgcaaaaaagcggtacctgacacccggtaacgatatgcattatcccggacagaccaaccatgatgcctgttttattccggaaagtgtccgccggtatgccggcgagcccctgtatatcatcgtggcgcactggtgtctgcagcagcaggactgggtgcagcgtaaccagatatcagaggcgtttcacatcacggccagacgggccagctacctgattgcctacctgcgaagcaaaacatcacgggtggtcagcgtctgccgccaccagaccctgcccaataaggcacgacggtatgagatttatgttatccgggttcttgacagtcccaccccgtccacgcgccgtgaaaaggccgggccgccgccggtctcacgtcgacgggtggggaatggagaccgggcacaggcaaatgaactgtggaaccggctgtgcagtaacagaaatgcgggaaggatactgaaaaaggagaaagacgaagatgacaggacataa

SEQ ID NO: 398600 - DNA, 771 bp, Salmonella enterica
atgacaggacataaccggatgccggtccggcaggtcatcgtgcatggtgactgctggccggtgacgaccgccgtggcccacctggtccgggtatttctgccggacagcgactgtgaaagcacatacaggctgccggcgctgttacagcagctgcgccggaaaccggaggccatactgatactgtgcctgcgtccccgggaacatctctttctgttctatgccctgaggcaggtgctgccggagcacccggtgatggtcatcagcgatgaactgcttttcagtgaccgggtggtactgaagctgtacgggggtgtcccggcactggcggagcaggcgctggaggagatacttatccgggtgcggcggggagagcagtggtccgggggggcacgtctgcgggtgacgggagagctggacgcctttctgttatcaccggcaccggtgacgggttttctggaagtgccaccggtatttaacagtccgaagcggctgatgaactgtatggaccatctgctgtaccgggagatgctggcatgcggagtgagcccggcccagttgcgtctgctacaggaggtttaccgcggacggggaaagctgtcagcgctttccggcaggctgaacgcgggggagaagcaaatctggcaggacaaataccggttactgttaaaactgggtatgaagaaccgcctgcatgagctcctgtccggtacccgtttcagtgaggatatgcagcgcagtccgtttatgatacccggtggcggctggttgtaa

SEQ ID NO: 398601 - DNA, 333 bp, Salmonella enterica
atgcgttcggatcaagatatatataatgatattggttcagtattgctatcgatcactcctgacgatgcggtaaaaatcattatgtgtgcagcgttagagccagaaagcgactgtggtgagtttacttatgattatgttgataggcagggtaaccaacattggatcactgaaacagcggatgccagtgaaagacttttagatcttttaattgaactaaggaatttctttgttgataactttaaatcacaagaaaagccattctggcatagctgtgaagtaacggtaaatgttgaaaccctcaagataaatatcgactttaagtacgatgactaa

SEQ ID NO: 398602 - DNA, 333 bp, Salmonella enterica
atgggcagggtgatggatcaggctttgggtcctgcttttgtaaaacagcagggcggtaaatatgaaggacaggggcaggggtcatacggtatggctcgtctgctggcagggaagaaaataatggcggatgcgtttgtttccatcacaccaggtccgatgcaaatcctgaaagatgccggtttgattgataacgccgttccggttgccagtaccagtatggtgatagcatacagtcctgaaagcaaatttgcgccccggctttcgcagaccagcggcagtaatgcaggcgggcggggatgtcagcctgaccagccgggacagtatcacccttga

SEQ ID NO: 398603 - DNA, 162 bp, Salmonella enterica
atgcagtttaaacatctgacagccgttctgcttgctgcaggtataaccatgggactgaatgggcaggccagtgcggatatccgggtgacctgtgcgggggtctatgggcagggtgatggatcaggctttgggtcctgcttttgtaaaacagcagggcggtaa

SEQ ID NO: 398604 - DNA, 486 bp, Salmonella enterica
atgaatagcgcatgcgcccttgttgccaaaggacaagaaataactcaggtaagcagcactatggacgtgtcgtgtgcacagttatctttacgaattaattgttcagccgactggcaggacggtcactgcaaccagcgagacgaggaagcggacgatgagatcctgtcgcgcatcttcggaatcatcagtgatatgcccagttatggctatcgccgggtatgggcaataatgcggaagcagcttcgcgatgaaggctttcctccggtgaatgccaggcaggtttaccgtgtgatgaaggagcatagtctgttattgttgcatgacaaaccacaccagcctcagcgcgaacataacggtaaaatcgcggtcgcggagagcaatcagcgctggtgttcaggcagcttcgggtgtgtcgacggcgaaaagctgcgagtgacgttcgcgctgacaccccctgaagccctgccgcagttgaaaaagggttaa

SEQ ID NO: 398605 - DNA, 1248 bp, Salmonella enterica
atggagctcgattcaaatactaaacattcctcattttggggaattatggttattgccggcaccgttattggcggcgggatgtttgctttaccggttgaccttgctggggcctggtttttttggggcgcatttattttaattatagcctggttttcaatgatgcattccgggctactattactggaggccaatcttaactatcccgtaggctcaagctttaataccataacaaaagatctcattggcaataagtggaacattattagcggtatcaccgtcgcctttgttctttatatcctcacctacgcctatatttctgcgaatggtgcaatcatcagcgaaacgattacaatcaattcctggatgtatgtaaatccgcgaattgttgggatttgcagcgcgatttttgttgccagcatactgtgggtgagttcattagccgccagtcgaattacttcactctttcttggcatcaaaatccttgcttttattatcgtatttggttcatttttctttaaggttgattactcaattcttagagacattgttgcatcagagagtcacaatacttatcttccctatattttcatggctgttccggtatgcctggcatcatttggctttcatggcaatattcccagcctgatcatttgctacggaaagagaaaagataaactcatcaaaagcgtcgtatttggctcgctgctggcacttgttatttatctgttctggctctattgcacgatgggtaatattcatcgtagcaactttaaggaaatcatcgcatcaggcgggaacgttgactctttagtcagatctttcttaggtaccaatccacgcggtattatagaatttttcttactgacgttctctaacctggctgttgcaagttcattcttcggtgtcacacttggcttattcgattatctggcagatttattcaaaatagataactcgtcatcaggaagatttaaaacgatattattaacattcctgccgccagccgtgctttatctgatatttccgaacggatttatctacgccattggcggcgcaggattgtgtgccaccatctgggcggttattgttcctgcattcctggcgctaaaatcaagagagcgcttccccgatcaaatatttaccgtttggggaggcaaagccattcctttggtcgtgattctctttggtatcgtagttattctttgctggttcggcaacaccttgaatctgctgccacgatttgcttaa

SEQ ID NO: 398606 - DNA, 306 bp, Salmonella enterica
atgttgaactcaggcctgatcgttttccggtatggccgggaacgcgtcagcgcgatacatcaggcagaacagtattcgaataagacttcgttgataaattcggctccgttatcaacatcaagaccgggactggcagagttgctacgtctgacgattccacgcgcgacttacacccaatcgcatatggacttcattatcgaagcctttgggcatgtaaaagaaaattccaaaaatattaagggactgacgtttacttatgaacctaaggtattacgtcacttcactgcgaaactgaaagaagtttaa

SEQ ID NO: 398607 - DNA, 336 bp, Salmonella enterica
atgctggcgcaggggcgcgttgacggcagttggctgaaacacctgaaacagttgcagaaaacgcaggtgctcatcctggacgatctgggtctggagccgctggccaacgcacaatgtaacgacctgctggagatcatcgaagaccgttacgggcaaagcagtaccatcgtggtgagccagttcccggtagacaagtggcacgggctgatggagaacccgacaacggccgatgcgatcctggacagactggtgcataactcgcacaggctggtactccagggtgagtcaatgaggaaacataaaccggcagtggaaagcgacgaaaaaacaggttaa

SEQ ID NO: 398608 - DNA, 903 bp, Salmonella enterica
atgaaagcaaatagagtatcaggacttatctatgcattaatagctgcaatgtgtaatggaactgtcggagttttaagtgtaaaactatttcaggcaggaatgtcagccaacgaagtggctttttataaatgtttaattggttttattatcatttttgtaataatattattgtccgggaaattaaagttgacttttaactttgttaaaggaaagtggcctgctggcataatatgttcattttttggtttttttatattatatcattttgaaactactgcctatattacattaaatgtatcatctgtagtttttacattgtttggtagtgcaacggtttttctttttttattatctgcattaatggaaaaacgcttctttaacctgagtgagactataactatagctatatccatagctggtctatacatgatatttatgtgtgataaaaaagaaaatatatcatttagttatgggctgttttttgcgagtgttgccggaattggatatggaacattcctttatttatcaaaaaaaatgaaatttggatctggcttaccacagatgtttactctccttctgtttggaagtttctatctgttcattccttatactcagggagtaaaactcattgatataaatatattatccatcttaattttaattggacttgctattttacctacaataggtggtttttggtgtacaactaaagcattaaccttaaccagtagtcagtctgtccagttaatagaattatcagaaccagtttttgctattttttttagtgctctgtttcttgggcagatagcaaacacaatacaatatataggtggtggtctgatatttttagcaatcatattctatgaatttaatctgttacataaaatacaaagactaatttaa

SEQ ID NO: 398609 - DNA, 240 bp, Salmonella enterica
atgaagaagacctgtatgcccgactcctgtatctgcgcgttcatcatgcgcgaacaaccagaagccgtactgaaacgactggagcaggcggtgctgtgcggtcaccgcatagtgatcccggccattacctacgccgggatacgtttcggcgctaccggaccaaaagccccgccacgacatgtcccgctggtcgacgccttctgcgcgcgccccgatgccatcctgccctgtcagcaatga

SEQ ID NO: 398610 - DNA, 279 bp, Salmonella enterica
atgaccggtggatgggaaattaatcaggatattgtaacctgcagtctgcctgaatgtgttgccacggtatttgccgaagcaacttcgaccatggtcggggcgcagtatttgccggtgctttatctgggaaaacaggttgtgagtggctgtaattacatgcttgtctgtaagcaggttctgtcaacagagcatgcggacacgcatatggtgaaagtggttatctataaaccagcatccacgggtaagcctgtatttgcatcggttgagagactactctga

SEQ ID NO: 398611 - DNA, 3603 bp, Salmonella enterica
atggcagtggaaaataagttcaaacttaattttatagccgcatcagtactgatggggttaagcttatctgcggtggcatcaccagtgtccaccacgaatacagacacaaagcccgcggttaccaaaacccttgcggaggcggtaaaggccgttaaaccagcagaggtcacattcgataaaggagatacggggaagaacccatccgggaaagataatttagacgaactccttaagtacatggctgatgcctcacattctcgcggtgatatcaccacatctgtcggttatgcacacaaacagttgcttgacacatatagcagtgcacaagaaggagatgcaaaggcagccgcgctgcagaaacttgttgcctttaacagagccaccgctgaacaaatggtgaagggtgataccgctgcgttgaacaaagccgtggagaatagtcagaaggaagtcagtaaggcccagaattcaatcagtcaggagctgaaggggctgtctgaagctgacagtaaagccagggctgcatatgacaaggcgatagctgattttctgaaactaccttctgagaaacagagtagtcaggacgaacaaaataatctcatgaaggcactggcagggggaaataacccgctgattcagacagccgggttcaatgatatacaccttactggtggtggcttcaaaacctatgatgaacttcttgagagcgccgggaagtctggcactaatgtcctgacaagtcataaggctcttcttgaggcgaaggacaatctgaataatgcgctgactgatgtcactgcccagcgtgagaaacttgccaaaagcatgacgtatctcgccaacagtatgccattctacactcctgaagagcaggacgctgccggcggtgcccgggcagtatatctggatgcgctaaagagcattagtaaagcatcaaccagtgcagacagccagagcaaagccggggatgccggaaaggtcacgcatattctcggtagtctgggcagtgatgagttaaaggaatttgacccgcttaccggtgaatataagtccgttattgttaacactgatgataagggcaatatcacgggcgtgaaggataacttcaccgcgaacgacctgtacaccggtacgcaggacaatccgttcaccaccactgttctggatatccgcgcactggagctgggtaacggtcccctggcagacaccaacaccatcaccgtgggtgaggccggaagcaaagccacaccggttgagatatgggcgaagactggcggagaaggagaagcagtcaaaccggcagtaaaactgaccggaaacctcagaacggccaccgctcaggtggatgaaaatggtcagccggtgaaaggtcagattgtccgtggcgctgaccagattcatctgcagaacgtcaacatccacaacagcttcacgctggctgacaaagcgaagatgatggcagatgatatggctgcgattaaccagcaggccacagataaacttgcagcgggtcagcctgctgacggtgcgcagggggtcgagacctggcggaaaaagcagactgctttagtgaacactcaatacgacaagtatgcactgaccggtctgcagattgacaccaaaacagtcaatcctgagtttgaacttaccaactctgatacggcagggacgtttgttaataatcccgcgactgtggcaccggatgacgccaacattctgctggataacctgaacattaccctgcagaacgacagtacaggggggacatcgacagcgattgccctgtccggaaccagtaaccacattctggccaacggcggtgtgtttgatgcgggtagtgtgacgggcacagaagcactgccagcacaggcaaatgcacttgccatcactggcgcaaataaccgcattgattttaatggttccgtactgaagggtgatattcgctcatcagccgcaggtagcaccgttaacctgataaacggcagcctgactggtgatgccattgctgattcagatgacctcagccttaatctggacggcagtacctggaccggtgcaacatattctacgggcactgtggatgtcagcctgagcaacaactccgtctggaatgttaaaggttatgattttgatgaggatggtctccttaagtcttcggtcaacagcctggcgctgaatggtaacaactcgcttaatctggttgaggctgacggacaggcgcaactgggcggacatggttttgcaggaatgaaatcaggtgtcaacctgacagtcgccaccgacctgaccagtgacggtaagggtgtgacgtccgttctggcagggacttactcgccggataatcttcacggcctgacaaataccggcagtgcggacaattatcattttggtaccctgcatgtggatggtctggcgaccggcggtaagtatgccctgtcactggaaagctccggtgctgagccgtacaccatcggtggccgtctggctgatggcccggacgcaaccagtgctcatgattttgtgtcatacatgacgtctgaaagccgcgtcacggacaaggatggaacccccgtgactcagatggtgaactctgacgccgacttcaccagcctgagcgcaccggctgaactgggtgtgtaccagtacgccgctgagaaggtaatggacggggtgaacaaccggacaaacatctactacagcagcaccggtaaactgtccaacagtgccgccacggcggtttcactggcggcggcgccggtggatgtggcgaacctggagtcagacactctggcgaaacacatgaacagcgtgcgtcatggtaaggattccggcgtgtgggtgtcttacttcggtggtgaaaaccgtaacaccacggcagtgggaccggagtataaactgaaaactaacggcgtcatgctgggcgttgacaccctgacggagaacaactggctggcgggtgtggcggtttcttctgcacgttcagacatgagcgtaatgaacagcagcggtgacctggacagctatggggcgcagttctacatgtcccgtcgttatgacagcggcgtgtttgtggacagtgcgctgcagtttaaccacttcagcaatacggcaaaagcccgcatgactgatggtcagcaggcgaaagcagacttcagcggtaacagctacggccttgaagctaaggtgggttacgcctggaacagcgaaggtttctttgcggagccgtatgtccgtgcagcagcgcgtgcctttgacggtgagcattatgccctgtccaacggtatgaccgtgaacagcaacgactataagtccatgctgggtgaagtgggtgccgacctgggttaccagtatgccatcagtgggggttatgtgaagccatacctgcacctcgctgcgctgaatgagtttgctgacggcaactctgtccgcgtgaacaacgtttcactggatgacagtgtgaagggggccgccttccaggccggtctgggtgctgaagtgaagatgacggataacctgggtggatatgcagcctttgattacacgaagggtgataacaccgagcgtccgtggcaggccactgtgggtgtgaactacacctggtaa

SEQ ID NO: 398612 - DNA, 681 bp, Salmonella enterica
atggccctgtggctggccactactgccgggctgctcaactcaacagcacttgttgcattcggcctctttcctgctcatatgacagggaacacgtcctggttgtcgagtgaagtatcaggatctgatatcagggatattattttctttggttctgtgctgatatcattttttttcggttcgaccgtaacacggataaccgcaatctggggaaaattgaggaaatatcgtaccgtattttgtcagatactgcttatggaaggcttactgcttaccgtcatctcgctgtatgaaatatttgaacattcactgtcctcaaaccgtacggttattcttattctctgtttcctgatgggaatgcataactctgtttcaacccagttatcaaacggtcgggtacgcaccacacacataacggggacgctgaccgataccggtatagcatttgccaccttatttactgcaatgttacggcgtgatgactccggtgataatgagattcaccggaatcagctggtaacacaattaattattatattctcatttttgtccggtggtattgccggagtaatactgtttcagttgtttggctttaaatctgtcaccggaatggggctgatgttgataagcattgctgtcagctcgattatctcggttaaaacacgtatcagcagcaggcgctaa

SEQ ID NO: 398613 - DNA, 531 bp, Salmonella enterica
atgaagaaaagaatcagtgtactggcatttgccggattatttgtcgccggagtggcttctgctgcttcaatgaaaattatgatgaacgaggcgttacctacggggacaggaaaggcactcggggagataacagtaaccgaaacaccttatggtttattgtttcagccacatctgtcaggtcttgttcccgggatacatggtttccatgtgcatactaacccaaattgtctgccgggtcttgaaaacggaaaagaggttccggcactacaggcaggcgggcatcttgatccggagaaaacaggcaggcatcttggtccttataatgataaagggcatctgggcgatttacccggactggtggtcaatgctgacggaaccgcgacgtacgaactgctggctccccgcctgaagtcactgtcggaactgaaggggcattcactgatgatccatgcaggcggggataattactctgacactccggcgaagctgggtggagggggcgctcgctttgcctgtggtgtcgtggaataa

SEQ ID NO: 398614 - DNA, 438 bp, Salmonella enterica
atgaacagaatgattaaatattcactggctgccgccatgatgtctgtatctgcattctcaatagctgcaaccggcggaaaccctgcagggacaatgaagaatccggtcagcgttcatgttctgaacctgaaaacgggtgtgccatccgaaggcgttactgtggtgcttgacaaaaaagaagggaataaatgggttaaactgaactctgctgttaccggtcatgatggtcgtattaatgccctctatccggacggaaaggagatccagccgggagattatcgtgtgacatttgaaaccggtaaatactacgcagcccataatgaagatacctttttcccggagatccctgtaattatacatgtgccggcagccggtgagcattatcatattccgttactgctgagccagtatggatattcaacgtatcgcggaagctaa

SEQ ID NO: 398615 - DNA, 162 bp, Salmonella enterica
atgaatgaactggtgagaaacaatcattacttcgccacggcaaaggaatttaaggcgaatatacaccacttcttcagtgataccttaccaacacttgccgggagcctgtcgtgtcgtattaacacttacttccagaagatgaaaaatgcaacttcaggttaa

SEQ ID NO: 398616 - DNA, 576 bp, Salmonella enterica
atgtatgaaccctgtaatgaaataacgccactcgttgaagtttaccagcgctggatcaacgaccagacccggcttgccgttcgctatggtatcagtacccgcaaaacgcacacatggcacaccctgacgaccacaggtatcacgctggcagaaggacgacaactgaccatagtggtcccgtcctgtctgctgtcggtatcaccgggggtggcgcaggccggaaatgagcgtgtgttttcagttgtggttgatatgaacagcctgcggacatacccacagttacccggcattctgttgagtgaatgcgcgcgcctgcagttagcggggttatttaattgtcttgagcgggttttcagccgtctgaagacaccggggcagcgggaatccctgacgctgctgtgctggtacgaactgataaatggctggcaggattgcaactggcaggacctggtaacgttaaatgaacaggaggtggctgcatggctggcctgtcaactggcgcggtatccgcttttgcaccgaatggtggatgaatatgtgttcttcgcctgcgcgggcttctggtctgataattag

SEQ ID NO: 398617 - DNA, 534 bp, Salmonella enterica
atgacacattgtcagtcatctcccgttgacactcacgctgagagttcgggaaccctttgtaaaatccttcagcaggccaccgaccagtatcctcgtctggcggcgtttctgctgacgctgccggtcccggagctgcattttcacgatgttgtttatcaacagataagggagctggccatcagtcgccggctgagcggcagacctgtaccacccaccgtgctgcgctggatgtgggaaaagaaaaacgtccccggtcagtcgtgcaggcatctgttgctgatgaaccaggataccttctgccatccccgttacgacgtcccggcgaaccgctgttctggcacgatggagaccctgctgcgggatgccacaggtgcgataaatgacgtccggccccaccatctgccggagataaccgtgttcagggtggacagaacccgcccggcacaggctgacgcgcagtacagccgtcttcgggaatgtgccctgtcgctggttcccgcagccactgccctgagtgaacgtatcagcccctga

SEQ ID NO: 398618 - DNA, 618 bp, Salmonella enterica
atgaacattaacactgccggtttcggtcctttaaacgagaaacatatcacccgcattcaggaaacacttgataaatctcttgaggaacacccacgaattttattgttacgtgttgacctccacctgccggatgagggacatgctgactctgccgttattacacgttttattgtctccctgaaagagcagataaaatcagatttacatcgaaaaaaaacgtctggcaaaaggacatttccatgttatctccggcatatctgggtgcgtgaatttagccagacgggaaagaaacattatcatgttgccctgctgatgaataaagataattacgcatatcccgggaactataaaccgactgatggagtgtatccgcataacctggccgttatgattatggaagcctgggtcagggcattaaatctggtaagggatgataattaccggcgatattattcactggtacatttcccccgccattgcagttttcacctgataaaatacagtgctgattttaaagaacagtaccagtcaacgatggagagattaagctattttgccaaagagtacagtaaggactattcagacggtcagcgtaattttgggtgcagtcagtattaa

SEQ ID NO: 398619 - DNA, 897 bp, Salmonella enterica
atgccagatattaccggacctcagcaggcaccccgcgatatgctgcgtgactgcctcagtctcttacccccgcaggccgctgaacgtattctcgcccacctgcagcagaccatcagccacgaacccgcgattggcattatgggtatcaccggcgcaggaaaaagctctctttgcaatgccctctttcagcagcccgtctgcctgacccacgatttaaccgcctgtacccgcgaaccccagcgcatcaccctgagcgtgggaggacaccgtatgacactcgtcgatttacccggcctgggtgaaacgccggagcacgatgatgaatacctggcgctctataaaacgctgctggctgaactggacctggttatctgggtgttacgtgctgacgaacgggcccgcaccctggacattgccacgcatcgtaccctgacggaatacggcgctgacccgtcacgttttctgttcgtcctgagccaggctgaccgggttccaccgccacccgacaacacacaacctcccggagagctcaccgccggacaacaactgtcgctggcggttatctgtgcgcagaccgcaggccagtttccgtcagccttcccgctgatggctgtctcagcacacaccggctacaacctgcctgcctttgttgaactgatgatgcatgccctgccaccacaggccggcagcgccgtctgtcgtcagttaaaaaccgaaaataaaacacaggaagcaaagagtactgcacgccgggcgtttggcgatatggccggtactgcattcgatacggtgtttaatcctgaggcgtattcccccggatgggccgtactgctgcgacggctgcgcaggaagctggttcgcctcgccacccggttatgggaccggatatttggctga

SEQ ID NO: 398620 - DNA, 480 bp, Salmonella enterica
atgagacaaccgttaccgcagttcacctcagaactgccggcagaagcccggcgtaccatccaccgcgccctgaccctgcttgataaccatctgagggagcccgggacagcgttcaccggcacacaggccgtccgggactggctgcgcctcagaatggccgggctggagcgggaggaatttatggtgctgtacctcaataaccagcaccgccttctcgcccatgaaactctcttcaccggtaccgttaaccgcacggaggtccatccccgggaagtcctgaagcgggccctccacttcaatgccgccgccgtgatactggcccataatcacccttccggtgacccggcccccagcccggaggaccggaccatcacggaacgtctggtacaggccctgaacctggtggacatccgcctgctggatcacctggtggttggcggcatggagattgtttcgttcgctgaacgcggctggctttaa

SEQ ID NO: 398621 - DNA, 474 bp, Salmonella enterica
atgaagctgtccatgaccgtggaagccggtacagtcaacgtccgggcccttaatgggggccggatcgtcgtggatatcgacggtattgaacccgccagcctgatcgacgtggtctgtgataacggatattcacttcgcgttgctgacgagcccggaacgcttccgcccgtcgcccgcgttaacggcattcagtgcagcaccgcacatatcacggaggaagacaatgctctgctgtttaccctttcacaccagtatgaagactttggcgattcggagtggattttgtataccggctccggctacttactccacctggcggcgtggtcatttccggtactgcggcttaaacggcgggggctgtcaaaagcctgtcgccggttagtggtgacgctgatacgccgttacgccacgggtattctccacctggatgcctccggcgaactcctgccaggctttgaggttttcgactggtga

SEQ ID NO: 398622 - DNA, 240 bp, Salmonella enterica
atgtcagaacacactaatgccgaccccgaagtcctgactgaccataccgatgtgatttgctccaccagcactgaacgtatcgttaccgggcgtaacgctgcacttgaacagatcagaaccgtgactgagctgattgcagaaatatcggcgctgaccagaagcatcggcggcaaaaccgccctggactggggcatgaagcaggattctcgctgtggttgctggcaccagacaccgcgatga

SEQ ID NO: 398623 - DNA, 600 bp, Salmonella enterica
atgaaagccatcacccgcaatctcgacagggagatatggcgggacctgatgaagaagtccggaatgctcagtctgatggatgctcaggcccgtgaccagtggtacaacagtctggaaaaggatgatattccggtcatcagtgaagcgaatattctcagtacctttgagcaactgcaccagagtaaggatgaggtgtttgaacgcggcgtaatcaatgtattcaagggattaagttgggactacaagtcaaattcaccgtgtaaattcggaccgaaactcattgtgaacgggctggttaaatacgaccggtggggatacagccttaactggggctggcagcgtgaccggttagcagacctggagcgcatgctgatgctgctggacgggaagctcgtccctgataatcgtgccgatgtgacccgacgcctgggcgatcacattcatgagaacagaggaagtaacagttacgaggacgggatgtttaaaatcaaatacttacagaagggaacggcgcacatcatctttaaaagaccggagctggtggacaaactgaacgacattattgtcagacactatccggggatgctggcggcacgatga

SEQ ID NO: 398624 - DNA, 429 bp, Salmonella enterica
atgaagaagcctgtctgtatgttctgcggtgccccggccaccctgctttgtgacgggatcatcggatgggatgccgatgaggatgaacacgggcacatgacaaaatgtcgtgccatgttcacctgcgatgcgcccgtgtgccggaactgcgctacatggcatggcaacatatttttcgatggaaagatccggatgatggatacacgcgacctttgccccctgtgccagaagttacacgaagccggcgaatacatccgcgttgcagaccaccggaaaaactccgccctgccgcaaccctgcctgactgaagagcaggcagacaggatacgcgccgcgcattgggcaggatttacaggacggcgcgccggagatgtaaaagttttacctggcggcggtcagcagtcctttaaattttatcctgatcattga

SEQ ID NO: 398625 - DNA, 207 bp, Salmonella enterica
atgtcgcaacgcgtagagaaaaaaatcgggaaacgttcgcaggccgccagtgcaaaacggcaggctatcttgatggccgcgctcgctgttttttcccagtatggcattcatggcgcgcgccttgagcaggtggctgaacgggcgggagtctcaaaaccaacctgctctattattatccctcgaaagaggcgttgtatgtcgcggtaa

SEQ ID NO: 398626 - DNA, 306 bp, Salmonella enterica
atgccgtgtacttcaggttgcccgcacccgaccggtcagcgtatcgctttctttctgaagcaccttcaggtcagcttccatctgtgcgatacggcgggataccttttcggaacgactgccgaagttcatccggcgcaacttgtccagttgcgcctgcagatagtcgatttcgcgctcccggttgctcagcttttcctgcagggcgtggatcaacgcttcctgttcagccaggcgctatttcagcagaaggatatcgtcagaaggggcgttgttcataagtccctattttaccaagcttatttgtaa

SEQ ID NO: 398627 - DNA, 483 bp, Salmonella enterica
atggtcatttcaaccacgataggcgctacctgtttgattttgttcctaagcccatttttgggctttggggactctttgccacgttctgacgggcaaggtatgatcattatggtcatacccccatgcgtacgcctgctgctggtggcctgtgtcatcattttgatgatgcagcctaggcgcttccctgtttcgttctggcgggcaaggtatggtcatttccaccacactcccggcaatttgcttgatggttgcttgattggttttgtagtatttgtatgttgtgcgatacaacatattacaacatacaagatcgatataattccccgctgttcttccgctggtggcctgtgtcgtggtggctggttgcaatgctgcggtaacgccgtacggttgcgcctgtgcgcgtttgtgtcctgctggtgggtaggtggctatgcaacaaaaaagccgctacggtgcggctgtgtggctgctactgattga

SEQ ID NO: 398628 - DNA, 486 bp, Salmonella enterica
atgaaaaaaatcatcgcaatcgctgctctcgccaccgccgtcagcacctgcgcacacgccgccaacaccttcgatagcactctgacaggcgtcccttcgcaacagaatcttacaacacacaccgtctctttcaacgtcaacaccgcctacatccctttgacgtttactgacgtgcaacagacgtcagccactgacctgacccagacaggggctgctaaccgggtgctggtgtcgtcccagttctccgcaaaagcagggcaccagtaccacgtaggtgccgtaacagtcaacggcgccaacggcaatcagaccctgactgccagcttcagcgctgatacgaccacaccatccaatccagccacaaagaactacgcccacatcacggatgaggcgaacgtgtacattctgctgacgcaggactcggtcgatgggctcgtcgctgggtccacgaacgccacctacaccgtgacagactacacagcttaa

SEQ ID NO: 398629 - DNA, 387 bp, Salmonella enterica
atgataatcacaggaaaaagcttattgcttcccggcgtaatgccgacagaacagcaggggagcagaaacgatgccggactcaccagtgtaaagaccgatggtataaccctgaaaggcgatggcgtaaccacgccactggcaatgaatatatccacatcaagtcctggtgtgggagattatgtcattgcatgggatatggggaatcctgattatcagttttttgggtacaaagtcttcggctcacagttaaggcaggccgcgcttgattttggtgatgacggcaaagcttatgccgttaaacatacttacttgacgtttttcgggacctttatcgggacgggttatttttataccaataatgttggtctttttcgtcgagtggcataa

SEQ ID NO: 398630 - DNA, 570 bp, Salmonella enterica
atgaatattatttccgccagaaatggagtctacattgaaaacggtaatatagattgtgaagtgcattttaaaggctttgatgattttattccgttcacttcttcccctgatgataccgaagagcatggacgccagctctacgccgaccttaaagccgggaaatacggccccgttactccctttaccgtgacaccagaaatgatccagtcagcaaaggatgcaaaacgcgccgagatcaatcagtggcgcgacgaacaggagagcggcagctacctgttcgaatatgacggtcataaatgggattacggcaaggccacgcaggacagaatgagtatttcactggtgatggcaaagcgtggcgatctgccgcctgattttgcctggacagacggcgacaataacatcgttccgatggataacgccggactgatagcgctggccgcagcgattgagcgggcgatgttcgaaaagggagtgcagataaaccagcgtcagttacagatgaaagcggaagtggaagccttaaccacgctggaggacatacgccgttatcgtgttgactggcagtaa

SEQ ID NO: 398631 - DNA, 324 bp, Salmonella enterica
atggtaggtatgagagtatcaacaatgcagcttaatgaaacttttgcaaaactttccgccagtggcttaggtaaaaatatacaaacggaaatacagcgcaggaaggatgaagttaaagaaaatgatggtacaaaaacagaaaatagtagcgctgaaaagaaacatacatgcgagtgcaatcaggaacctgctgatattaaaacggagatcaagaatgcaatagcgcaaaaggattatgaaaaagtggctcaattagctggggtaaaaagtccatttagtgcttttagttacaaagggttatcgctgtttaaagtgaatgcctga

SEQ ID NO: 398632 - DNA, 717 bp, Salmonella enterica
atgattcctgaaattgaacttagagatattcagccaaagggaagcagtgatgtcccgtcgtcttcgcacatccagactggattaccgattccaaaaacagtgcgggttcagttctttagccctgacgaatgggagtcgtttacagaggaatgggcaagttatctcaaaaatgaatatgttgcagccagacgctttgggggttctggtgatcttgggatagatattgctggtttctgttctgacaagggattcgaggcggtatgggataactatcaatgcaagcgctatggacatcctcttcggcctggtgatatctgggttgaaattggcaagattatttattactcatatcttggcaaatatacccctccacgaaagcatttttttgtttgctctcagggaatcggaaccagtcttgaacagttgttgaacaagcctactgagttgaaagaaaaatcgattgaaaactgggataattactgtctcaagggtatcacttctactgctgaaattccgttgactggtgcattaagagcttaccttgacgcatttgatttcactattttttcatcaaaatcgatagttgagcttatcgaaattcatgccagaacgggttttcactcggttcgctttggtggcgggttgccatatcggcctaatccatcttctccaccaactgaaccgccccggttttccgggagagtgttttgtctgtga

SEQ ID NO: 398633 - DNA, 267 bp, Salmonella enterica; identical to SEQ ID NO: 84309

SEQ ID NO: 398634 - DNA, 153 bp, Salmonella enterica; identical to SEQ ID NO: 380927

SEQ ID NO: 398635 - DNA, 573 bp, Salmonella enterica
atgcaattcgtattcacaccagaggaaagatattacgcaccgtcgccagcgctgaaagccctttcattcattccgggaggtgcggcgggtacgcttgccatatttacccggagggattttattgtgaacgccataacctgccccgatgctgaccgactgcccgttgaatgtctgccggaagatgcccgcgaactgattcggctgctgggctatgattccgcgttgcggctggtgcggacattcggcggcgtcagtctgtcaggacgaagcggggccgccagagaacgaagcggcggtgtataccgtttccttgcggacgttttaagccacgaagaaatatcccgccttaccacatggacgggaggcgcagagttttatattccgcgttgtgatgcagcgatacgggcgcaacgaaacgccagttttatccgtgattatcatcgccttcttgatggcggattttcgggacgttgcgcgatggcgcggttatgcccgcgctacggattcagcgaccggaggggatgggaaattctgaaacgctggcgcgaaaacaacgcgcgcagtcgcgggtaa

SEQ ID NO: 398636 - DNA, 2097 bp, Salmonella enterica
atgattgaaattttgggaatgaaatctcagaaccatactgtttctgatattctagaaagttctataagtcagattaatgatacatctgggtattactatagaggctttcctgtcatatttctaagtgaaggtaatgttacacttgatggtttactttgctcatcaaaacatggggttgtaattttccatttcactgaggaaagagaattagaccaagatgatattgatatcattgatgaaatgcacatgaaatttgttgctaaactttccgaagtaaaatcattaacaaaaaatagaattctaaatgtgccggtaaacagcattgttttttcaccgaattgcataaatattgatgagttcgattgtgatagtggcctaagtattagttccaatatagatgaaatattggctattatgaataatataacttgggatgatggttctcttctagagacgttgctatctcatgttcaatcgctttcaaaattgaaacctaagagaaagcgaagctatgtgagacaagttgattcaaaggggagcgtgctaaaaaaactggagaattcgcttgcaacacttgactctagtcaaacaacagcagttttggttaacattgataatgtccaaagaattcgtggtcttgctggctcaggaaaaaccattgttctcgctcgtaaaatcgcgcatatacactcacaaaaccctcactggaaaatagcggtaactttcaacagccgctctcttaaagaacaactaaaaaatttagtctcagcattcgctgatgataatggaatagattgggataatgtagatattattcatgcatggggaggggctagaacagaaggtttatattacaatgcatgcgttgcacataatatcccttattttgattataatggggctcgtagtctagctgaaattaatgagacaccatttcaagctgcctgtaagaacttcctagaaaataaaaaggaagataagaagttgtacgacttcattcttatagatgaagctcaagatttctcaattgaattccttcgaatttgctattctttattaggtgaaaagaaaagattagtttatgcatatgacgagttacaaaatcttggtgattcttcaatgccttctcctgagcagatatggggagtagacgaacatgggaatccagttgtaagtttcacaagtgaagaacaagatataacattagacatttgctatcgaaatcccggcccaaccttgactacagcccatgctttaggctttgggatttaccataaaccaataattcaaatgtttgattttgaaggattatggacagagattggttatgaaaaaaccgatggggaattagtagaaggtaaagaggttatattatctagaaccgctaagtctagcccatctttgttgagcgctcataactcaattgatgagatgattcaatttgttaaatttgacgataaacattctcaatcccattggatctctcaagaaataataaaaaacattaatgaagaagagatattgccgagtgatatcgttgtaatacatcctgatacaatgcgcatgagaaatgaagtgggctatttgcgcgatttgcttttccaaaatggaattaacacgtcgatagctgggattacaagttccccagatgaattcttctcagataatagtgtaacattcacttcaatttttcgtgcaaaaggaaatgaggcagccatggtctacatcatggatgctcattattgcaacgttgattatgagttagcgaagcgtagaaatattctttttacagcaatgacaagaaccaaagcatggcttcgtgtatgcggtgtcggtgcatcctttgatggtttgattaacgaatacaatgaggtcaaaaagaaagggttttcattgcaatttacatatccaacagaagcagaacgtgaaaaaatgcgacttgtaaacagggatatgacttctcaagagagaaaaagggttcatcaagctaaattaagtgctcataatcttagagtactcctggatggacaagtgagagtggaagatataccagaagaattacgacttgcattgattaagcaattgaagggtgagtga

SEQ ID NO: 398637 - DNA, 654 bp, Salmonella enterica
atgaactcaaatagcatttgctcagcaataagaaggatcacttcacatctgatatcagttggtattagtgatgcacaaaacttccctgtgataactcaggatagagaatactgctatgtcaattatagcggtttcgctgatgcatcaattgcgcttaaaaatattgagtatgtggatatttataattttcttgatgaaaggagacaatacaacatcaagttattagacggcggattgattcatcttctatttcaatttaatcaccaaggaaatcttattaaagaacgcttgtgctatttccctgcacctaactatgagtcatttcaaaatgatcctgacttatatttagatgaaagcaatttctatgcagacattgtccaaaagtcaattttacccgtacctataagggttgattatgctcctgatgatgctaatgatgtcattcacccggcggcacatttgacattaggtcagtttaaaaactgcagaatccccttgtcttcaccattatgcccggtaacatttgtaaaattcatcttgagctcattttataatactgcttatcacgacttcggttttgaaatggaaagaatagctcacccaaacacaattactgttcgagagagaggaatgttacatttctcaatcgagtag

SEQ ID NO: 398638 - DNA, 792 bp, Salmonella enterica
atgataaaaaagaaaaaaacaaaaaagagtggggtttgtcagctaacaggagattttggcccttttcagcgatcgcatatattaccaaaagccgtaacgaaattaagtgacaatggtgagcgatacagagaaacatctctcaatacaaggcctgtttggcgttctaatagttggtatgattataatttagtaactgctaaaggtgaaaaaatactcagtgaaatagacgatttggctatcagtgaacttagaaaacataaactaatatggagtggttttggtcctaaatggaaaaattctccgacaagttatcgtttggatgaaccagtaagaactttaagtggtttgaatactaaattagtaaggctcttttttattagtttgttgtggcgagctgctgcttcgcagagagaagaaatgtctgatatatatcttcctcagcaagagctggatgttcttaaattaatgatagtaagaaaggaatcaggtgaacctggttttcttccaatgtatatcaatcaaatatctaacataggagttcatcataatcggaccccagtttatgaaaggcaagtaataggtgatattgaagtagatacattcagattctactttgaagggttgatttgtcatattgttcactcatatgatggtgatattataaaagggttagaacctgtatttatagatgcatcttctgagttgcttgttataactcataaattcgaagattccagagcgttttctgatttgaaagaagtgatctctagttcgtttgatgaatgttcctaa

SEQ ID NO: 398639 - DNA, 684 bp, Salmonella enterica
atgcccgaccatgcgccaccaggcaccgtgcgtcgccccggactgctcggctggatagcattacttcccggcgtgctggctggcttttgcctcggcgcatggatgctggcgatagcgctggagtggttgggtgaggcgtttttctggcagaacacctgcgccagccacagtgaacaggtattgcaggcgacatggcactggtggcagggttccgctggcgcaccagtgtggttagtagaagacctcgtgagtgtcagcgatacgttgcagaaagggagcgcggcgttgattacctcgctcaacggtcaaagcggattgttctggacagagactgtcaccacggcgatccgctgcgcattgctgtcttcggaaaatatcaccctcacctttctgctgcgcctggcgattctgttgcaggcgctgccgctgtttgcgctcaccattactattggccttattgacgggctggtaagacgcgacttacggcgattcggcgcaggccatgagtccgggtttgtttatcaccacgccaagcgtatgatttcatccagcctgatagcgacgggactggtgtggctggcgatgccggtttttcttaagccatcatatatgttagtaccaagtgcagtgatcaccacactttcggtatcactggttttgggagcgtttaaaaaatatatctaa

SEQ ID NO: 398640 - DNA, 927 bp, Salmonella enterica
atgactgaaacaacttacccgctagatgtagccgcagaaatgctagagtgccagcaaaagaaaattatcaccgagtgggcgaaaaataccattagtgtagttatggattttggagataaaccaagaggtgcgcgggcaaaaatgctcatagatgcagatacacagtcagacatgagagagttttttaatcgttattcaagatatgagagaagtttttcttttttagaggagttaaccccagaacaaaaaaaaagaaatgccgatatagatgctgaggaacaaagagtattattgcgtgaatatggatattcaggattcgaaataggatggagttatagagaaaatacaaaatctaaaactcatgattcagacccagagaaattaataatagcaattgatgcggatatttttggattatggaaacttaattatagcgactttagccgtcaacaagttcagaattgtctcacgctcaccccataccccgaaggggttatatctggtgagataaaagcaattattgaatatgggtacgataacgcctataagccagtcaaaaaaaatctacgtctaaccacccgcgatatagaaataatgcgcacgttactttcaaggcgcaccaataagcaaatgccaccaccaccaagcgtagccatagagcaacaaaaacaacatggcggcgttgagcgattcgcccttgagcgtgaaaagattctagcggcggccctgtacgttgcgcaccactacccaaaagagatagggaaatcatttaagtctcacgccgaggctgtagaaaaacacagctatattttttggaagagtgaacccgcacccgatacaggcaggatagcgaagatgatttccgatgcagccagaccaccggaagaatggaaaattttagggggaaatgcaaagacaaaaaaatga

SEQ ID NO: 398641 - DNA, 765 bp, Salmonella enterica
atgaataccgaaacaaggcccgtaacagggccgggattcgctcaccctgaaaagagtcaaacacctgtttactcaggcgacattattgctactggagtaaataaaaacgcactcatcgtaccggaagtaattattgttggtagggaacctgtaaccacgtctcaggctatcgctcgttactttgagcgcgaccacgacaaaatagtaaaacgcattgaacatctggattgttcagccgaatttttaacccgcaactttcggcgggtaaaatttaaccataaagggcgcagccttgccgcctatgaagtaacgaaagatggttttacctttctggctatgggttttacaggtaaaaaggcggcggcattcaaagaggcatatatcgcgcaatttaactacatggcgaactggctgattgagcggattgaaactaaatccgagatgcggtctatgggcgatgccatgaaaggctatattgagcgcaccggagatactcagcacggacacgcctacaacaatgaatgtactttccttgcgcgtctggtgctgggtatgcatccgccagtatgggcgaagcgcaacggtattccgccaaaaaaagtacgcgaccacatgaacgccaaccaactggctttactgacctatctggaaaacagaaattgtgccttgctggatatagatactcccacgccagaacgtaaagaacgcctcaccgggttagcccaacgctggttagcccgccatatggaggccagccatgattaa

SEQ ID NO: 398642 - DNA, 474 bp, Salmonella enterica
atgattaagcaccccaccaccagccgcagggcgaacaaaatgattgaccgcaccactccgcccggttatcgttattttgcgctttataaaacgagcgccgggattggaaccccgatttgcaagaaggcgacaccagacgccgaaagcgtctttttttgtgtccgttatacgcgccattttatggcgtggtgtgccatacatccgcagggtttacgatgccgccttgccggactcctcacacaccacgccgcccacaatggcgcggtgtgcgtatcttattccgggtttattccgtttttcccggtaagtaacagcacatcgcgccgtcgtataatggtgacgttggcggggcagccgcaaggctggccggtttcctttttgcccggtagttccaaccccgtcaacgtcaccgcccctattgagattggaacctcaggcggtgactccttaaccagcaaaaaggaggccgcataa

SEQ ID NO: 398643 - DNA, 234 bp, Salmonella enterica
atggctactacccctaccccgtcacaccctcaaatcgtctatttgccgcttgtcgatgccgttgatacgggtgcgtcccgtgaatggcaattgatgcagcagacagagataaatctgctttaccgcgtaaaacgcgctcttgaccgtgctggcgtagagtggatcgatacgcgtacaggcgagacaagcccgttaaaaactgacaacgcggagggctgcgacaatgcgcaataa

SEQ ID NO: 398644 - DNA, 426 bp, Salmonella enterica
  misc_feature (335)..(344): n is a, c, g, or t
atgggatatttaaaattacctgagggtaaaaggattgcggttaatcttggtgtcgatgttgatgctcagtctttgtggcttggcggatttaatcgaccatcgccatcctttatgtcacgcggggagtttggtgcgcaagttggcgtgccgaggcttctgaaattgttcaaagaaaataatatcagaaccaccttttttattcccggacactctgtcgacaccttcccggaaatcagtaaagcgatttttgatgccgggcatgaaatcgctcaccatggctactatcatgaaaacccgacgctggtgaatcgtgacacagaacgccgacttatggnnnnnnnnnnctataatcccaatagggagaacgatatcccgcaggacgtatgccgaaatgtcttttataacaggcgaatgccagatccataa

SEQ ID NO: 398645 - DNA, 411 bp, Salmonella enterica
gtgactatttcagcgtggcggatacctatccgaaaggatagcggcaccgaagaggagaatgagcgctggtacaacgatcagttccgttatatctatatagagtggcatcagccagtggatttcgacacgctggtcctctatgccacacaggcacaatccaccgcgccgcagaatatccgtattgaggtatccgccgacggctacggcgactggacggttgtgaagccagatttcgatctggactggcagacggacgatccgggtattgccgaagggctgaaaatcacgctggatacgccattgcagcagaatcaacacacccgcatcgtcatcaataccgcaccggaaagctacgctttgagcgaaattgaaatcggcacgcagattaacgccaccactcgctttaaataa

SEQ ID NO: 398646 - DNA, 303 bp, Salmonella enterica
atggaccacacttcgctcgcgtcttgctcaagagatgtgatgctaagaaacaaagatttatctgaaggaaagcggtgccgggtattaaaaagtttcaaccaggcgcgggattgccagtcggcctgtgttgatcgtgtgccgaagcggaatactatttttagtacggagatacccacaatgcttagccccagtataaagggactcccgacgtttacgatgacgccgaccccgaaaagaacgagagcaaatgacagcacgttatccactctccgggtaaaggtgctgtacagcttttccagatag

SEQ ID NO: 398647 - DNA, 930 bp, Salmonella enterica
atgaaatacaattacaccacagattacaatcatcctcattattattcaggcaatatctttacctctaatcgttatggtcgttatcgcattcttggcaagttgctcaatcataatcgtcgtggttattatgtcattcagtttgaagagactggacacacaaccaaagcctattgttcagcaatcaaatctggaaaggttgccgaccgttcatatgacttcggcaatgaagatgaaagacgtgaagcgttaatgcgtcccgttattcatggtgttggctatatcggaattgggcagtatcgtacctatgtcccctacactcccgagacatatggacagagaacaaaggagtatgtgctctggcaaaatatgattgctcgttgctactacaccagaaatggaaagcaggttcataaagggtacaaaggtgtggttgtgtgtgaacgatggcattgctttcagaacttctgttcagaccttccagcaattcccggatatagcaaatggaaagacaatccggtgaagtatgagtttgataaagactattcccatcgtcgtcattattcaccagatacaatgtctttcattccaaccagtgataatgcaaaagaagctgggttgagaaatcaggcgatgaagatatctaaatcagattattactccatcaataaaaaccgaaaggtcattgtcgatgatgcgttagtcatactggaagattcagagatgcaattctcagtagtgatgaatggaaacactcacaccattatcactgatacaccctatggaacaacaatattcttcccattaacaaagaagataatgcgtcattgttccattattgatggtgacgttcatgtcttcatccagtatgtccagtggttgcaacgtcaatggacagaaagaaatccatttattgattgctatgaagtgtga

SEQ ID NO: 398648 - DNA, 1101 bp, Salmonella enterica
atgtatgagcgctggcattgcctgcagtcggatgcacgttgtcgttttttggttgcagagcggctagttaatgcgggggacacgacgttagccagaaaattagttgatgattacgataccagtagtgatcgggagatgtcatggagccaatggttaggaggaaatcgattccgtctcttccacgcgcgtaagctactcgatggagcagcaattcatcatgaagcatatgaagacttcatcagttcaattgtggctgggaaagagagcaccatgtcgttgctaacagatatggcagacattcttcctgtgatctgtgagtcgccagactggcccgccgtctggtctatcctggcagagcagatgtctttcactcgcgaacaccgtattggtgaacttttcgaatttggaaatgaaaatatgaccgacgaagagttacttgcggaattgctccatttttcattacgattgcctatcaccgaagctcgacgacattcagagaaaactgcactaattctggcggtacattcaacaggagggcaaatcgtatttgagaacaccataacacgactcctgaccggcacccttgatgaaccattccaggcattgcaaattttgcttttgctaaaacagaaccactttgctgctaaatttggtgatttagtctctggccttacgaatcatcgtgatgtagctgttgctgaagctgcgtgcttgttagcacaatattggcagctacctgtatcgattgattttcatccgttgccgttgacctatcgattggcactcgacggagaccctgatcatgaaaatgctctgttagaccctgtgagtggggcaatgcgtattgaagtcgacttaggatggacacaaatgcttcgtcccgttgcacggagacttgcagagttggctgattgtgaggaaatgaacatacgccagcgtgccgcaacgtttattcagcaatggggagggctggcagcctttggtcctggagcaacaaaaaaatcgaatctcagttacgcacactctcaatgcaaatcacctatcttaagccccatgcttacattggcatactggcacttcgtcatgtcgctggagagctga

SEQ ID NO: 398649 - DNA, 366 bp, Salmonella enterica
  misc_feature (109)..(123): n is a, c, g, or t
atggctaatattgttctggttagaattgatgaacgtcttttacatggacaaattcgaatcacatggggaaagtattctggtgcaaataccattattgtcgccaatgatnnnnnnnnnnnnnnncgtatactcattctgtgtaaaacaccagaagatgtcgccaaacttattgagggaggagtcaagtttaatgaggtcaacgtcggtaatatgcatcataatgccgagcggagacaaattgacaaaaatgtttccgttagcccggctgatattcaggccttcaaacgcattcagctaaaaggcgttgaatcgataatacagcatatgccagaaagctcacggaaaaacattttcgactgtatctga

SEQ ID NO: 398650 - DNA, 738 bp, Salmonella enterica
gtgttgagtatgattgatgacggacttttcgagcgatttgattgtgattacatttttaccttgcataattttcttgtgaaaatcaggataaaaatttttttaaaaggtgtttttctgtcctattctgatcgttttaaaattaaacctactggcagtggtgggtatgctttgtctcctaaaaatagcaaagatcctacactttcaacatgtcatttaattttagctttgcaaagtgttgtaacgagaaatactgttccgcaacagtctgtagtaattagtgtcggctccataatcgctgggaatgaggaaagttataatattatacaggagcaggttgaaatattactcagtgtagggattttaaatgaagatgttcgtgagcaaacaatcaagcgcattggtgagattattgagcactatagtaatatttttggtttgacagttaaattcgagtgctatgataaagctggtgtaacttacaacgatgaggaagctacctcattagcatggaaagttgcaggagatatcttcgggagtgaatattgtgcatttgagcattcacctagtacggcaagcgatgatttatcgtatatggtgagtgccagaaaaggttgttatgcgtatattaataatggtcataccgcttatgtgcataatggcaattatgtatttaatgctgacttacttagtattgcagcgacttattttgcaagacttgcgcaggaatatctacaatag

SEQ ID NO: 398651 - DNA, 654 bp, Salmonella enterica
atgcaattagattttacccttaatttccataacgacacctggtaccccactgtcgatatcagtggttttaaatccaccactggcgccagcgccgatattcaggagaaaatgatcctgacgtttagcgcgccgggtaaaattaccgccggagatatcaccatatcgacgaacccgtggtgtgaattaaaaacccatattgaaaccagtgaaatttccagcggcgtttttgatagtaaactgacgattaccgccgccgatggttccgccctgggtaatgccatttcaactattcatatgggcgttaatgcctcctccgataccgcgccaaaatgggaaaccttcagcgacgctttcaccgccgccgctgacgaagaggcggacgtggcaggtgagctggcggtcacctgcgccgccttcccggctggactggaaaacaccgttctggaactggttttagttcgcggtgaaaaaagcgaaacgctccagccaaaagcgggcatcacctggttcgatattgacgctggcgcgtacgcggttaccgctgcggagctgcgtaccgctgaaggtactattcgcgcagcggtgcaattaagcgcatcggagctgatcatcactaaaggccagcgcactcagcttgatatcacttttgcctag

SEQ ID NO: 398652 - DNA, 1155 bp, Salmonella enterica
atgaacgaaaccatcgaaaaactgattgccagtggaaaggaagggccatggtgggactttaaacaaacctaccaccaaaacaatgcagcccttgttcacgatatcctctgcatggcaaacgtcctgcatgacggtgaccggtatctgatttttggggtgactgatgaagggttgattaccggcgtgccggaagatggtaagcaacttaaccaggcaaatttaatcgatctgttaagaaaagtgagttttgcggagcaccattgtccggatattcagctgcaccacatcacactccagcataaggtgctggctattctacaaattcgtaacgtcagaatgaaaccttactatctaacacaggactatagcaaagaggggaaaactgtcagagccggtgtcgtttacacccggcaacaagatgccaatacgcccgtaaatggctgtgccagccctggagatgtcatggcaatgtggaaagagcgctttgacctggacctggtaccaacagaccgcatcgtcaaactacttcttgactatgacaactgggagtacgatggcttcaatgaggcctactatcgacttgacccggattattccatttatatcgataatagtgagagagaacacggaggacagtactggtggtcaacgactggtattgagcaaccatacctttacgaatacattctcaaatatcgcgggcgagagctcgaacgattaccagtcgtgcattacagaaatgaaggcttaaaatttccatttccagagatagacacactgtcttatcctggaaaaagtgatggatacgagacagattattatgccgacgtttttaattttgttaaaggtaccctccagtacaatcttctaagtcatatcagggcattttattcactgccaggccgcggctcagacatgtccatgccattgaaaacacagaccaagccaccgattatcaggctaccattcctgttgtttgagagcattgaggagaaagaaacccggctgaaatttatccagcaacagcttgccaattttacgccagagggcattcccaaagatgcatcgctgaaatcaaaccaagtactaagaatggctgttgagaaacaattctcctggtgggtcttcgacctttataagcatagtaaagaatag

SEQ ID NO: 398653 - DNA, 1299 bp, Salmonella enterica
atggcgctttcaagacaaaaactcaccttcgaacgaattcgcagatttaccttgccggaaggaaaaaaacaaacctttctttgggatacagatgtaacgaccttagcgtgtcgggctacgagtggagcaaaggcatttgtattccaaagcgtatatgcggggaaaacccttcgcatgacaattggcagtataaatgactggaagattgacgatgccagggccgaagccaggcggctgcaaacattaatcgatactggaatagatccgcgtatagctaaagcagaaaaaatagctgaagcggaatcactccaggctgagtctcgcaaaacaaaggtaaccttctcaaacgcctgggaagattatcttcacgaattaagaaccggtatcagcgcaaaaactaaacgtccttactctgtacgctatattgccgatcacgttaatttgtctagccgtggtggagaaaataaaaaaagagggcaaggtccaacctcagctggaccattggcaagcttactagacctgccgttatcggaactaacaccagtgaacgttgctgcatggctgagtacagaaagacaaaatagacccactgtcactgcacatgcctaccgtctgttgcgtgcatttatcaaatgggctaattaccagaaagaatatcagggaataattcatggcgatcttacgcaagatcttaacgtgagaaaaatggtgccagtatcttccagtaaagccgatgactgccttcagaaagagcaactgaagagctggttcactgaggtaagacggttaagcaatcctgtgatttcaacctatctccaggtccttctcctcactggggcacggcgagaagaaatagcatctctacgttggaccgatattgatttcaaatggtccagcatgcggatcaaggataaggttgagggcgaacgcattatcccactgacaccttatgtctctactattctggctgaactggccagaacatcaaaaagtgatgttagtaaagatagctgggtcttcaccagtaatagtaagagtgggaaaattgtcgaaccccgaaaggcacataacaaagcgttatcccgtgctgagttaccacatatcagccttcatggcttacgtcgcagttttggtacgttagccgaatgggtcgaagtaccaacagggattgttgctcagattatggggcataaacccagtgctcttgctgagaaacactaccgccgacgtccactcgatttgctaagaaagtggcacgagaaaatcgagaactggatactggaacaggtggatagttag

SEQ ID NO: 398654 - DNA, 327 bp, Salmonella enterica
atgaaaacgactaattattacaacgatattttttgccgacgcttgaaacaggctcggttagccagtgggctttctcaaaaacgtttggggattgcggcaggtatagatgagtttgttgcgagtacacgcatcaaccggtatgaaaagggagtacatgaacccaatactgagattgtgcagaagttatcagaggttttacgtgttccgttggcttatttctatgccgaagatgatgatttagctgatttaatgctgatattttggtcattttcaagtaaacaacgggaggagcttatggattatgtgaggcaccgcatagttagctaa

SEQ ID NO: 398655 - DNA, 1425 bp, Salmonella enterica
atgtctgaattcgatttatttgcgcaggaactgctcgaaaaagcagaagctgaagaaaaacaacaacaagagcgcgaccggaagctgattgatcgggtacttgaaatttacgaccagaagtatgtcgcagaactgctaagaaaaataggtaaaaatgagtggagccgcgaaacccttaaccgctggataaatggcaagtgtgagccaaaatcgcttaccatggctgaagaagcgctgttacggaaaatgctgccggagcaacccgctcatcatcctgactatgatttccgctttattgacctctttgccggtattggtggtatccgtaaaggattcgaggccatcggcgggcaatgcgtttttaccagcgaatggaataaagaagcggtacgtacctacaaagcaaactggtacaacgatgaagacgcacacacattcaatctggatatcagggaagtcacattgagtggagaagaaggcatctctgaagagaaggcctacgctcatatcgatcaacatatcccggatcatgatgtcctgctggccggttttccctgccagccattcagtctggctggggtaagtaagaaaaactcgctcggacgcgcacatgggttcgaatgtgaagcgcaagggactctatttttcgatgttgcccgcataatcaaggcgaagcagccagccatttttgtgctggaaaacgttaagaaccttaagagtcatgataagggtaaaacgtttaaagtcattatggatacccttgatgaattgggctatgaagttgctgatgccagtatcacagggaaagatgatcctaaaattattgatggtaaaaatttcctgccacagcatcgtgagcgtattgttctggtcggattccgccgcgaccttaatatccatcagggattcacattaaagaatattcataaattctatcctgagaaaagaccaacatttggtcagcttctggaccctgcggttgacagtaaatatatcctgagccctaagttatgggaatatctctataactatgctaaaaagcatgctgccaaaggtaatgggttcggttttggtctggtcgatccgaataatgaaaacagcgttgcgagaacattatccgctcgttaccataaagatggttctgaaattctcatcgacagaggatgggataaagaactcggcgaaatcgatttctctaatcctgagaatcaggaacaaaggccaagaagactgacgcctcatgaatgcgccagactgatgggttttgaacaacccggtggcaagccattccggatccccgtttccgatactcaggcctatcgccagtttgggaactcagtggttgttcccgtttttgaagccgtggcgaaactgcttcagccttatattatgaaagtcgctgcaagcaaggcgaccaaaaaataa

SEQ ID NO: 398656 - DNA, 237 bp, Salmonella enterica
atgaagcgtaataagatattaattgtaggtgctggcctttcaggcgcagtaattgcacgccagttagctgagcagggacatatagtcaatattattgatcaacgttcacacatcggtggtaacgcttatgatgcccgcgatgagcaaacgggtatcatggtgcacgtttatggtcctcatatttttcatactgataatgaaactgaatggagttatatgagtaacatacgtaaataa

SEQ ID NO: 398657 - DNA, 465 bp, Salmonella enterica
  misc_feature (12)..(21): n is a, c, g, or t
atggcctatccnnnnnnnnnngtgatattagaacagctttctaaacaggttgataattatataaatattagtaataagcattacatccaaatttctgacaacatggataatgtggcagaacatttatcgaaaggtaatgccttaatttctgaaaataacgtgatgttagctcaattaaaccatacacaagactctatagataaaaagaacgatacagtaattgcatcacttgatagatgtcatcaggaatctgtttcccaaagaaaaaccatagatagtattgctatcgaaaacgtaaaggttactcaccttgtcacagagatgaaagctgccatagatgaggatagtaataatattcattcagcgttatccaacttatctgctgcagatgaaaaaattattgatagaacaaaagctgccgttaataaaaaatgtttaatcttcattttttacctcatcatgtaa

SEQ ID NO: 398658 - DNA, 318 bp, Salmonella enterica
  misc_feature (257)..(265): n is a, c, g, or t
atgtctgttattcgtagattagctgcggttttacgtcaaagtgactctggtatcagcgactttcttgtgaccgccccgagaaagtacaaagtttacaaaatccctaagcgtacgacggggtttagagtcattgcccagcctgccaaagggctaaaagatatccaacgagcatttgttcagctctataacttccctgttcatgatgcttcaatggcctatatgaaagggaagggaattcgtgataatgctgcagcacnnnnnnnnnctcaattacaccagcaattttttggcggtgcattgaaatgtcatctgcgctga

SEQ ID NO: 398659 - DNA, 489 bp, Salmonella enterica
atgacacaaacagatattatagcgaccgtggcatgtgccatatcaggggtcgccgcgctattttcaggaatagcattatgtcaatcagcaaaagcaaaccgcagagcaaatcaggtatcagagcgaggcttgcgtattgatttagttgattatcgtatgaatatacggaatgcgttcacgttaattatggatgagttcgaggcgcagagatacgggccagcagataactatattattcaggcaaaaatcaccttccgtgatgcgggtatattttttggtaatgacgtaagtgaatttcttaccgagttaatgagacaaattagcacctacagtgagatatttaaaactaggacaatgggccgtcttatttttgaccctcaaggagatgttagagaggaagagcaacgattagaacaaataaggctatgggtgatagcacagcgtgggcccggcaatgacatgttcgacagaatcatgagtgtttcatga

SEQ ID NO: 398660 - DNA, 597 bp, Salmonella enterica
atgatcgacgaacgggccagtgtccagcaatctattgatttgttctcaagattggaccggctggaaagcaggaaagtgaaattacaaagtgatactccggtaaaaaaagaaaaaagtgcggtgcaaaacggcattccagagtctgttgcccatagtctgtcgttaaaaatctcctctatattaaaagactggcatttccccggagcatgccaggtattttttgacaaagatacttcggattttgtaattgatggaaaacctcgcggtagccggggaaaggggctacgagcaattacccatgcggcagtcagtgtcggactacttgagttttgccaagaaaatgggctatcgcatccgggattcctagttctggattcccctctactggcttactacaaaccagaaggtgaagatgatgtagctttgcaaggtactgacttgaaagagaaattctatgattatcttgtgaagcaccataatgaagatagtcagatccttattatagaaaatccgcatccaccgcaaagcatgaataaacagattactatgacggtattcactggtaatcctagggttggccgtttcggattgctttga

SEQ ID NO: 398661 - DNA, 957 bp, Salmonella enterica
atgtcagtcacaagaagaaacttgctcaaaggactcgcagcttcaagcgcattaggcgcaacagcagcagctgccggtttaagtgttacacacactaccgatacagttgccacaactaaaaaaataaccaagaagcctaatttgttaatcgtctttcctgatgaaatgcgggcacagtcgctgggctttatgggtcaggatcaatctattacaccctttattgatcgatttgcgagtcagagtgtcgtattgaggcaagcggtttcgaactacccgctatgtacacctttccgcggtatgttaatgaccggccaatacccatatcgcaatgggttacaaggcaactgtcatactggcgcaaacggtaattttggagggaaagattttggtattgagctcaaaaaagaagccataacctggtctgacattcttaagaaacaaggggttagcatggggtacattggtaaatggcaccttgatgcgccagaagcacctttcgtgccaggctacaataacccaatagaaggacgttactggaatgactggacaccaccagaaaaacgccacggtttcgatttctggtacagctatggcacttacgacttgcacctcaacccaatttattggagcaatgatacgcctcgtgataagccgttgaaaataaaccaatggagcccagaacatgaagcagatatggccatcaaatatctacgcaatgaagggggcaaatatcgtaataacaacgaaccttttgcgctggtcgtttcaatgaatccgccacattcaccgtacgatcaagtaccacaaaaatatcttgatcgctttaaaaatcagacatcccgcactttgaataaacgccctaacgtagtatgggacaaaacgtatcaggaaggctatggacctgactatttcaaagaatatatggcaatgattaatggtgtccagtcattccagtaa

SEQ ID NO: 398662 - DNA, 957 bp, Salmonella enterica; identical to SEQ ID NO: 398661

SEQ ID NO: 398663 - DNA, 129 bp, Salmonella enterica
atgaataagtatatcctttcacgtcttattggttatacgctcgataaaaacattgttaataacgaaatgaataacgacagagtaaaggcggcaaatgaaaaacccgttttatttaaagatacagaataa

SEQ ID NO: 398664 - DNA, 612 bp, Salmonella enterica
atgaaaatcacgatatccgggacgggttatgttggcttgtctaatggtttgcttattgcacaacaccatgatgtggtggcgttagacattgttccttcccgtgttgaactattaaataatcggatatctccgatagttgataaagaaattcagcaatttttaaaagaagataacatcagattcagggcaacgctggataagtttgatgcgtaccagaatgcggattacgtcattattgctacacctacggattacgatccaaaaaccaactattttaatacgtccagtgtggaattggtcattcaggatgtgataagcatcaaccccgcagccgttatggttattaagtctacggtgccggtaggcttcactgcggcaatgcgtcagaagtttgcgacagaaaatatcattttctccccagagtttttacgtgaatacctgggctttgccataaaaaactgcaccttactcagttggggggccaacttttggggtgcagtcaaggagcgctccgggtctagatttactgctgggctaaatcagtttaatccggcaatgccgtatcaaccccgacatcttcgcagacatattggaatacataaatgcgaataa

SEQ ID NO: 398665 - DNA, 771 bp, Salmonella enterica
gtgcagggcgataccgttagcgatagcggtcataccgaattcgcgcacgccgtagtgaatgtagttacccgccgcgtcttcattgatagccttagaaccggaccacagggtcaggttagagggcgccaggtctgcggagccgccgaggaattccggcaacagcggaccgaaggcttcgatggcattctgggacgctttacggctggcgattttcgccgggttagcctgcagtttagcgatgaactcgttcgctttcgcatcgaagttagccggcatgtcgcctttcatacgacgggtgaattcagcagcttcctgcgggaaggctttcgcataagcagcgaatttctcattccaggccgactctttcgcctggccggcttctttcgcatcccactgggcgtagatttcagacgggatttcgaacggcgcgtatttccagcccaactgttcacgggtcagtgcgatttccgcgtcgcccagcggcgcaccgtgggaatcgtgggtaccctgtttgttcggcgaaccgaaaccgataatggttttacacatcagcaaggacggtttgtcagtcacggcgcgagcttcttccgtggcgcgtttaatggcgtctgcatcatgaccgtcaacgccacggataacgtgccagccataggcttcaaaacgtttcgcggtgtcatcggtgaaccagccttcaacgtgaccatcgatagaaataccgttgtcatcatagaacgcaatcagtttgcccagcttcagagtaccggccagtga

SEQ ID NO: 398666 - DNA, 210 bp, Salmonella enterica
gtgagaaatgccttccatcatgcagccgtcgcccataaagacgtaggtgaagtggtcaacgatgtcgtggccaggacggttaaactgcgccgccaaagttttctcggcaatcgccatcccgacggcgttggcaataccctgacccagcggaccagtggtggtttcaacacccgcggtgtagcctacttccgggtgacccggggtttttga

SEQ ID NO: 398667 - DNA, 465 bp, Salmonella enterica
atggccccagtcgcgcagcgagtccatgttgccgagatacagacaggactccagtccctgcgcgatattggcgatggcgcgggtgatcttacgggtgacgaaggtttcgccgcgacgcggagattcgtggttaaacagaatgccgttacaggcgtaaataccgtaggattcacggtagttgacagtgatccagtaggcgtacagtttcgccaccgcatagggggaacgcgggtagaacggcgtggtctctttctgcgggatctcctgcaccaggccgtacagttcagaggtggaagcctggtagaaacgcgttttcttttcaagaccgaggaagcggatcgcctccagcaggcgcagcgtgcccatcgcatccacatcggcggtatattccggcgactcaaacgacaccgccacgtggctcatcgcgcccaggttgtagacctcatccggctgtacttcctgtaa

SEQ ID NO: 398668 - DNA, 144 bp, Salmonella enterica
atgccgggggtaatgctgctatttggatatattttgtttcatttttgtgttggttttatacttgctatattaaagttttttgctgtgtatgataagaaaagagtagtgttgttatgtgatggtctgccattgccagccggatga

SEQ ID NO: 398669 - DNA, 294 bp, Salmonella enterica
atgggattaggtggcagactctacaaaaattctttggtgttaattggtgccgagacaattcgtgaactggaatcaatccgcccagacatttattttatgggcgttgcacatgttgatagtgaagtcggtgtaacgcttcctggtctggatgaatgttataccaaacaaaaaatggccgaggtctcaaatgaggttgccattcttgttacggaagaaaaactcgagaccaggtctaatttcgtcgtgtcctctctcaaggatataaattatatattcacgagcaaggacgcataa

SEQ ID NO: 398670 - DNA, 384 bp, Salmonella enterica
atgaatctcagcgtcggcttaatcagcgggagttaccttgcagaggtgtttagaggggctcttaaattagttgagccatttgaaattacggcagcgaaagtagccggattgagtcggttacagattataataaacattgaactaccacagatgctgcgcttttccgtacctggcattatcaatgaattttcttctgtattaaaagcgacgccctttgcttataccgtgggtatttctgagataacgaagcaggcaatgtctttgacagccatcactctgaacgggttacagatatatactcttgctgcgctcttatatttcattatttataaaatttttgttcttctggctggattctttgcgaaaaagtatcgcattagttga

SEQ ID NO: 398671 - DNA, 384 bp, Salmonella enterica; identical to SEQ ID NO: 398670

SEQ ID NO: 398672 - DNA, 195 bp, Salmonella enterica
atggctacgaccctcaccccgtcacacccgcagtttgtctttgtgtttgccgctgttcgtcgcgcagaccgtaccccccgtatttgtatgctccgcaccgttgccggtgatgagcacgccgcacgcctttccctcgttcgcgattacgtcctctcgttcgctggccgtctgccggttgcggaggtgcgcgcatga

SEQ ID NO: 398673 - DNA, 174 bp, Salmonella enterica
gtggcagctatgtcagaacttgttcgcgatctgtcacggcttggatggagtgacgaacgtatagcgaaagaattagggatggataaagatgaagtgcttagacttaaacaaatcagtggactggcagaaatgtttggtgatgaatcgttttcggaagcatggacagtggagtaa

SEQ ID NO: 398674 - DNA, 243 bp, Salmonella enterica
atgaaaggtaaggatcaatggtacataccttttctgtataaatctaccaatgacaaattcgattgttcgttcattgaacaattcagaaacaaggatggatggctgagtggtcttatgaataagtatatcctttcacgtcttattggttatacgctcgataaaaacattgttaataacgaaatgaataacgacagagtaaaggcggcaaatgaaaaacccgttttatttaaagatacagaataa

SEQ ID NO: 398675 - DNA, 129 bp, Salmonella enterica; identical to SEQ ID NO: 398663

SEQ ID NO: 398676 - DNA, 201 bp, Salmonella enterica
atgtattatgggacagagtacattacctggccggcacaagaacctaactattactggaattatgagaggattgagattgagatccccggaggcagtccagcccgggcgattcttgataaaggagagataactaaaagcctcgacaacactgaaagtaccggaccctacattgacgtatctgatatcaaagcctgctattaa

SEQ ID NO: 398677 - DNA, 354 bp, Salmonella enterica
atgctcaatgatgtaccagtccggaaatccctgggcgcggtagagttcgcgcggttgcagcatccgcattccgatatctacgatgcggtaaaccactccgccgacagtgaccagaccagtgcagttttctccgcaatatttccgcaggaacgccagtacctgttgtgcacgttcttcgtcgtactcatcgacagccaggctggtcttgatattacctacatgcaggcctcctgccgtgaccgtcggcatcggctcgtcaacacgttgaccatcccggcaggtgccgcgcaatttgaccaggtgggatgccagaattgcatgatgatttcccgttgttactgtgtgagcaggtga

SEQ ID NO: 398678 - DNA, 228 bp, Salmonella enterica
atgagagttcggcagccttttgggctcattattaaatcctgttattttattattagtaatgtaaacatgatttatatcatgtttgctatttataaatatccaattcactggatatgttttatttatactaattttcatggagttaaattgtattatcgtcaggttttcctaccttttcaaccttatcaatatgattttttagaaattgtattttttgatctgctatag

SEQ ID NO: 398679 - DNA, 258 bp, Salmonella enterica
atgataaaagaaaagttgaaaacccaaaacggaaagcggtttctgttctctgttgcgatggtgtttatcattgcagtaagtgttatgacacgggctacaataggcggtgttatatggcagtataatattgaactgaaagactggacgctttctatgtttattattcagtcagcaatgatatttgtttacagcgttgtctttactgttttgttttcgataccgctcgggatttttttcctaagtgatgataagaattga

SEQ ID NO: 398680 - DNA, 174 bp, Salmonella enterica
atgctgaatgcgcggaaaagcccggagcagacaatgagcgacagtatgttgcgccgctatatccgtgattacttacgttctcatgccggcgatacggtggattttgcctggcaagggggtgaacctacgctggctggattagatttttatcgttcacgactgttagtgtattaa

SEQ ID NO: 398681 - DNA, 159 bp, Salmonella enterica
atgcagcgcccttttaacttgatgggaaagtttttacttatcaatggaatacgttttttattactggtttatctgaggacaggatatggcgcactggaaccgccacagccgtatcgccacatggatgaaaagatatggatgaaaagatggggaacatga

SEQ ID NO: 398682 - DNA, 252 bp, Salmonella enterica
atgcggcttgaagccgaaaaggcctcagggcaggcgatggtgtctgataatccggatgtaggctttgtggttgcgaatagcaacggcacgccgcttatgcccaataatttgtcaagtaaaattccgtttcgtcttgatgataacgccgctgctcacgtaggtatccgcgcatggcctatcagcgtgacggggaataaaccggtcgaagggccgtttactgcgcgcggctatctacgagtagattatgattaa

SEQ ID NO: 398683 - DNA, 1287 bp, Salmonella enterica
atgaagatagcgatgataaaaaccacactggcttcactggcgctgctgcctgggctaacgatagccgcgccggcggttgccgataaagctgataatgcttttatgatgatttgcgccgcgctggtgttgtttatgacgataccgggtatcgcgctgttttatggcggattaatccgcgctaaaaacgtgctgtcgatgttaacgcaagtgaccgtcacctttgcgctggtctgtattttatgggtggtatacggctattcgctggcttttggcgaagggaatcatttcttcggcaatatcgacggggcgatgttgaagaacattgcgctgacggcggtaatgggcacgatttatcagtatattcatgtcgcgtttcagggaactttcgcctgtattactgtcgggctgattgtcggcgcgctggcggagcgtattcgtttttcggcagtactgatttttgtcgtggtgtggttcacgctctcttatattccaatttcgcacatggtgtggggtggcggcctgctggctgctcacggcgcgctggattttgccggtggtacggtggtgcatattaacgccgctatcgccgggctggtgggggcgtatttaattggcaaacgcgtcggttttgggaaagaagcgtttaagccccataacctgccgatggtttttaccggtactgcgatcctttatattggctggtttggatttaacgcgggctccgccggcagcgcaaacgagatagccgcgctggcctttgtgaacaccgtggtggcgaccgccgccgcgattctggggtggattatcggcgagtggacgctacgcggtaagccttctctgctgggggcttgttccggcgcgattgccggtctggtcggcgtgacgccagcctgtggctatgttggcgttggcggcgcgctggttatcggcgttattgcgggtctggcggggctgtggggagtcaccatgcttaaacgtctgttacgggtagatgacccgtgcgacgtatttggcgttcacggcgtttgcgggatagtcggctgtatcctgactggcatttttgccgccagttcgctgggcggtgttggctttgccgacggcgtcacgatggggcatcaggttatgatacaactggaaagtattgctattacggtagtctggtctggcgttgtcgcgtttgttggctacaaactggcggatatccttgttggactacgtgtgccggaagagcaggagcgggaggggctggatgtgaacagccacggtgagaacgcgtataacgcgtga

SEQ ID NO: 398684 - DNA, 477 bp, Salmonella enterica
atgaatgggctgggacaaatcattttgcgcttgcacacttcccctgccagtgatccccattcacgcacgaataattacgtggctaaccatcacaccgaccggatcgcacccggtgctatgtcgcataaagcgcaggggtctaaacaggtttcatgtgctgttccgactttgctgattgttaaagagcggcttagtgctatttctgcgaatcatccggtcattcatacgccaccggcggctacttcgtgggcgtcctgcctgttcgctgtttctgttgggtacattgtgtaccttttgggtacattgtcaagtgtaaaaaaacctgccgaagcaggtttaaccattttatattatggtctttttttatatcttcttggttttccagaaaaaatcacagtacctatgattgagcagttgccatttattttgacatatggctccggccaattagggttcaatgcctttaagaaccgctga

SEQ ID NO: 398685 - DNA, 192 bp, Salmonella enterica
atgtctaaattcacatcaaaagaagttgcactggcgtttatgcaagctaatggtacaggaatgaaagccgaagattttttagttcaacttattgataaagaaaaagaatttgaagagcttctgtcaaaagatgacctcaaaggatttttgaaggctagaaaggcggaagcatttaaaaagcttgtctcctga

SEQ ID NO: 398686 - DNA, 240 bp, Salmonella enterica
atgcccgtcgattttctgaccactgagcaggaactgaattatggtcgctacgttgcagaacctaatgacgtgcagttggcgcgctattttcatcttgatgaacgggatcttgctttcattaaccagcggcggggaaggcataaccgactgggaatagcgcttcagcttaccagcgcccgttttctgggcacctttctgacggatttaacccgggttctgccgggtgttcaaaatttgtag

SEQ ID NO: 398687 - DNA, 240 bp, Salmonella enterica
gtgctctacaacagcgatacccacagtagctggaatctggccgggatccagaatacgcaggatgacgtgattattaatctggtgatggggtcgatgtttctggtactgccgacgttctggctgggagcgatgacgtgggctggagtcagcagggttggcgtggcggtgaatggggcgctggcgggtggggttaaggtggcgcaggatagtggggggaagactggaggaaggttgttgtaa

SEQ ID NO: 398688 - DNA, 312 bp, Salmonella enterica
atgcaagccatcacaacatttatcgccagcctgtttataatcagctccgctctcgcagcccccctcaccgagcgcgaagagctaactctgaccctcaaccagcttaaccaaatcgaagcctcgctccaccgtgcccagcaaagcgccagaaccggcatcaatgagcgctactatttcgattacccacgcatccacagcgatatcaccatcctgcgtaacgggattaaacactaccttactcccgctcgcgcccagccgcgtgatgtgatgacgatggtcgggcaataccgtgaagagaaaatcacgccatga

SEQ ID NO: 398689 - DNA, 1074 bp, Salmonella enterica
atgttcacactttatatgaaatgggatgcccgtcgcgaactggcgcccgaagatattcagttcattctctcacccgatgaagccatgaaaatggccgctatcttttacgaactcgattatcttgtttaccctcagcgcattattcctcatcatgttcccgacaggaaaaaaggcgtttaccatcgttttggcacgcagccttacaagcgtaaacatcacactcagtacgataaactttatgatgatgttaaatggcagcttgagcatggctggatgataggagtggacaccagtgagcgctgggatcatattcgcaatcctttctattttgatgagagtagtaacctgacttatgactgctttatggatcattatggtggagtgtttgagcgagaggtcagggatatttacgaatacagtttgaatgcgtatcaggggcgaaaaccagcaccgaccgtcaggcaacattatgctgatgctccagtgcaacatgcgcagtcaacaaagaccatcaacagcaaagctgccgggcgacttctggctgctggtggaatttataatggtaatatcgaagggtttcgtcagactgctgagcagcttggtggtgatgcgcctgttggttataaccaaataatgaatactcagactaagggattgttgattgccggaacatctattatggcaggtctggggattggtcgattaaatacggttagtgagctttcaaaaatagatgacctccatgttctggggaaagtggagggtgaatattcgataataaaaccagggccgctacctaacgatttagcggaaactttttctggcggcgtttacaaggaaataacgctatcagccgatacaaaattctatagaggcggtgtgtctaatagaccattgggccaattttttgggtacgaacaaccacagggagtactccaaacgcgtgttgataaagccctgttgcctaaatggcctaatggtagcgcttcaccccttgatagttatcatgagatacaaattcccgccgggactaaagtctatgttggtgaagttgggtaccaaacagatctttaa

SEQ ID NO: 398690 - DNA, 282 bp, Salmonella enterica
atgaaaagcgagataaaaaaaactgttatagacatcgttagtatactctcaaataacgatgagcattcatgggcaagaacattcgaaaaattaggctcggaacttgatgttgattatgagcaagcccttgatgcattgaaaggtttgtatggtgggatgggaacatttaacgatattattttacataaagatggcatgccattaatgaaagaaaatgatgagttggataacttacggcatattctttacaatcaactcaaaagtgaaattaatgcactttga

SEQ ID NO: 398691 - DNA, 681 bp, Salmonella enterica
atgcccgaccatgctccacaacctgtgcgccgtcccggactgctcggctggatcacattgctgcccggcgcactggttggcttttgcttcggcgcatggatgctggcaatagcgctggagtggctgggcgatgcgtttttcgggcggaacacctgcgccagccacagtgaacaggtattgcaggcaacatggcagtggtggcgggactttgctggcgcaccggtgtggttgttgcaatctctgacgcttgtcagcgataagttgcagcaagggattgcggcgctggttcattcgctcaacggtcaaagtgggttgttctggacagatacggtcactaccgtgatccgctgctcgttactgtctgcgggcaatgtcaccctcacttttctgctgcggctgtcgattctgttgcaagcactgccgctgtttgtgctcaccattaccattggtcttattgacgggctggtaagacgcgacttacggcgattcggcgcaggccatgagtccgggtttgtttatcaccatgccaagcgtatgattagttccagtctggcggcaacggggctgatattgctgtcgatgccgtatgttgttgagccagagtatgtcctgataccaggagctattctgattgggttagcagcatcagtggctgttggagcatttaagaaatatttctaa

SEQ ID NO: 398692 - DNA, 345 bp, Salmonella enterica
ttgctgccggaaaaccagcaggcgcttaaattcattccctgtaccggacacagtcggatctatttgttgcaaatggatgatgtcgcctttgtcagtagccggatgagcggcgtttatgtgaccagcagtgaagggaaagaggggtttaccgagctgacgttgcgcacgctggaaagccggacgccgctactgcgttgtcatcgtcagtttttggtgaatatggcccatttgcaggaaattcggctggaggataatgggcaggcagagctggttttacgcaacggtctgacggttccggtaagccgccgttatctgaaaagtttaaaagaggcgattggcctgtaa

SEQ ID NO: 398693 - DNA, 585 bp, Salmonella enterica
atgagcaacatcgacaaacgggcgctgctcgtcagcaaagcaaaagcatctgtattcactatgggatacatctctcaatttgaagcgagtgatattgattctgacgatatcgatttgcggtttgaagtcgatggcactgaaaccggcacaacagtttctatcgttgatgagtgtggccacgccgcacagataattacggcgctgctggatgagaatcttcagctccaacgggaaaaagacgcaatagaggccgtagtgctggcgctgcgtgatgatatgcgacaggcacgggagcaactggaagccgcagaacgcagcatagcagaacaaagcgcgattgtagctgctgctgaaaaactggttcgctgcaaaggtcgttaccacagtgaactgaattaccgggcgctggcaaaactttttggcgtgaatacaccagacctgcctcctatggacggggagtcccgcactgtgatgatgccggagccgttcaagatggctaaatcctcaagcggcttaatgtactactacgcagataaagtcgataaagcgctggccgccgctggcatcaaggttaagggggagtga

SEQ ID NO: 398694 - DNA, 144 bp, Salmonella enterica
atgtcagaaacaaagaacaccacaccattcagccagcaactggcttatatcaataaaggtacgctggatctggagttgctagcggaatatcaaaaaggtgttgattttctgactgacgcactgaaacaggagcgtgcagcatga

SEQ ID NO: 398695 - DNA, 1074 bp, Salmonella enterica
atggcaaatgcacaatatgagaaaggaaaaatcatacttgaacacactaaatcccaggtcaagaaagctggggagtgcatacgaaaaggaaatggtgatatcgataaatcaatcgagataatccagcagtatagagcagctcacctttacccactgatgatcattaaaaatctagtgtggaagcatgcacaaaaaataaacaaaaatgctatcattgcacgtagattgaaacgtcttcctaccatcattgataagctacgtcgtaaaacgcttgatggaaaaactcccaattctatagctgttacccgaatgagtgacattggtggttgccgagtcatagtcgataacaggtatgagttacttttattagactcatcactagataaaagtcgaaccacacataaatctaaggttaaagattatataaaatatccaaaaccgactggttaccgaggcattcataggatttatagttgttatgcaaaagatgaaacccatcaatggaaagggtttgatatagaagtacaacttagaacaaaactccagcatttgtgggctaccaccgttgaggttgtggatttatgtgagggccgcgcccttaaaaccaatccttttgaatcaaatccatcctggattgaatttttccaactgatgagtgaatttatcgctgatgaggaaggatttatattcatagccccaacagataaaaacagaataaaagaaagactaattagccttaaccagaaattaaatgcgattgataaactacgttcgttcaatagactattttcagataaaaaactaaacctttcggatagaaaaggtggttttgttatcattgcactgaagaacaatcatatttattttcaggttttcgcgcacagtcaaaaacatttagccatagcatcttactctgacgttgaaaaggatgaagaagctaatggtttatttgttgaaatggatgacttaaaaaaattatcatatgcttatccgaactacctgattgacactaagtattttattgacaaatttgatacttatacgaactccagttactgggctaagtcccgataa

SEQ ID NO: 398696 - DNA, 570 bp, Salmonella enterica
atgaaaaaagttattatggcggaggcaaaaaaatcagaaaaaggtctgaaaccttattctgatacccgtgggttcggagtagaaaccacgctccagctttcaaaccgctggcgtttatactcagacgttaaactgggtaaaaatgaatataaaaaaaagacttaccttaacggataccgctactcacttaatgaaactctgatttatttcccagattcacgccagtatatttctgcaggtcttggatacagtatgctcagaactgaagaaaaagacagttctttcaataaggcagcattccggaccggatggatgtacgaatgggatggaggtgtatcaacgctattacaggctgcttatggtcataaaaaatacctggccggagacttctggggaataaagcaaattaatcatgaatacaatacttctgtcacggtatggcaccgcgatatttatttttttggcataacaccaaaaatcacatggagttatcagcgaactgacagtaatcatccttttcacgacacggagaggaatcgtcttttgctgagtttcagcaaatacttctga

SEQ ID NO: 398697 - DNA, 450 bp, Salmonella enterica
gtggcggcgggtattttccttaatatcgggaccgcgctcttttgggtgctgcaggtgatcatggtggcggatacggtcgattatggggaatttaagctcaatattcgctgcgagagtatcgcttattccgtacagacgatggtcgtgaagggcggctcggcgtttgcggcgttctttatcgctctggtgctggggctgattggctacacgccgaatgtggcgcagtctgcgcaaaccttgcaggggatgcagtttattatgattgtcctgccgatactgtttttcatgatgacgttggttctctacttccggtactaccgtttgaatggcgatatgctgcgcaagattcagatccatctgctggataaataccggaaagcgccgtcattcgtcgaacagtcggataacccgacgatttctacggtagcgactggcgatgtaaaggcgtaa

SEQ ID NO: 398698 - DNA, 324 bp, Salmonella enterica
atgaaaaaaagaaatttcagcgcggaattcaaacgtgaatccgctcaactggttgttgaccagaactacacggtggcagatgccgccaaagctatggatgccggcctttccacaatgacaagatgggtcaaacaactgcgtgatgagcggcagggaaaaacgccagaagcctctccgatgacaccagaacaaatcgaaattcgtgagctgaggaaaaagctacaacgcattgaaatggagaatgaaatattaaaaaactgtccatgggggaaaccccgtcctgagtctcagaaactccccggaaaagttggcaggctaatttag

SEQ ID NO: 398699 - DNA, 228 bp, Salmonella enterica; identical to SEQ ID NO: 380158

SEQ ID NO: 398700 - DNA, 321 bp, Salmonella enterica
atgcggccatttttatcgcgggcctccgccgctgaaaattatccctggcgtcctggtatggcgagagtttccgccgcggccgcgttatcggaaaacaccagcgccgcttcaaggctatgggctatcgtggcggcggttaagccgagatttttttgcgcatactgtttgagcgtaagaacagacgcaacgcaaattaatagccagatcaatgtcatcgtgatcagcacgctgattatactaatccgccgtagtgttcgtttaaatgttggtctggatagagaaaattccttattcatgcttttgatttcgtgcaagcattaa

SEQ ID NO: 398701 - DNA, 270 bp, Salmonella enterica
atgacttctgataacagtcccgatctggcatatgtatggatctggttgcctggtgcaactcaaccgattgttgcaggtgcgctaactcgtgatggcaacaggttcatcttcaactacgggcgcagttacctggaacgggaggatgctatccctgtctatgagccggaacttccgttggttcggggggcgatttttcccgccccaggcctacagcaggcgagtgcattacgtgatgctgccccggatgcttggggcgtcgtgttattctga

SEQ ID NO: 398702 - DNA, 639 bp, Salmonella enterica
atggcaataattaccggcccctggaagcggctctgctatggcaaagacggtcatttatcccgacagggctataccctctgtgttatgaataagttacgggacagtctgaggcgacgtgatatttacgtcgcacggagcgaacgttggggagatccacgggctaaacttctccagggtcaggactggcataccagcagagtgcaggtgtatcgctccctcgggcatcctctcaacgccggagaggccgtcaatgcgctgacccggcagctcgacacggtttaccgacaggtcgctaaaaattttgctgataatcaggccgtttcgctggatttcacaggtaaacgcacgaagctgaccattgctcatctgaacggactggatgagccgccgacgctgaagttactctcaaaacatatatctgacttgctgccggttgtcgatctgaccgaactccttcttgaaattaacgcgcatatagggtttgcagatgaatttacccacgcaagcgaagcgggtgcgcgtatggatgacctgaccgtcagtatctgtgcagtattgctggctgaagcctgtaatattggtatggagccctttattcgacccaatattccggcgctgacccgttatcgtctgagctga

SEQ ID NO: 398703 - DNA, 366 bp, Salmonella enterica
atgttggctgacgtaaaaataccacctaagtacagagatcaaatatatttagacgaagctgtcaaactggatgttcaatcaattatccagccaaaaatgaagtcatatagtgcgacaatcgataatattagccctgactcctatgaaggagacagcaggtactccataatgctatgctttccggtaattatttcattcgacataaatgaagatgattcgcggtggttaaaaccaggcatgacagttgatgccagtataattaccggaaagcatagcattatggagtacctgctgtctccactgatgaaaggcgtggataaagctttttcagaacctgttaatactaaaagattaaatttttcttag

SEQ ID NO: 398704 - DNA, 609 bp, Salmonella enterica
atgcttgtactgatgcaggcacataatataccactgaaggtggagaatgcacttttaaccccggatggatttatgaacctgtgtggagtagacctgtcgtataaagatctacagggtgaggatttgtcaggaatggatgcttctggtgcaaatttcacagggacaaaactttgtggagcaacattggatagtgtatttttatgtaatgcaactttctgtggcgcaaacctatccagtgcaactataagtttcgcaaacatgaccgacgcaaacctgaatgacacagacctgactcacgcacgggtgaaacaggcaaccctgacgggcgcaaccatgattggcgcaaacctgactaacgcagtgctggagtatacccccctgcatggagctaacatgtcccgtgcaaccttaaccaatacaactttaactggcatcaatataaaagatgcaagagatactgctccttctgcctctgctgcttttgttgataatgatgagaatccttttacaattttcagaaaacaactggaagctactaactcgagaggcgttcaagattctcctgatatccagtattctcctccaacctaccagtcgggttgggtgtga

SEQ ID NO: 398705 - DNA, 2268 bp, Salmonella enterica
atgcggggtattggagctgttatccatcttcacccaccggcaggtagtagcgcaccgcccctcaacttcagcgggatgtggaacaatctcagggactggttcgccctgcccgctcaggatgaggccgcacaatgctttcgcgcgttttatcagccggatgaaggaacgtcgtcgtcggacagactgatgtgtttttttaagctaaaggcgctggcgtctccgggacggcaggctaacttcaccgcggagcgaagaatcgataccggtgaaaccatctgcgtgattgcctccggtaaaaacaacgatttccccaccgtcacacttcacctgagcgaccaggaatggcatacggcacaatctcaggaagaaacgattgacagcacactattgccgctaaacgctgataacccggtagctaccacaacagaagagagcgccgaaaaaagccgaaaaggaacccgcattacaaatgcacagattcaggcatggcgggacctgccgccggagacgaaacgagaggcaggaggctggaaaatatgggcgcatacacagggaatatccatcagcggtgccagacattatctgacaaacaccggactgacccctcaaggtatggtgcggatgcaacaacccgaagagaaggggtcctctattacaaatgcacagattcaggcatggcgggacctgccgccggagacgaaacgcgagacaggcggctggaaaacatgggcgcagttacagggaatagcctccggaagtgcaggaaactttctgaccaacagcggactgactctcgttggtacagagcgcctgaaaccgccaggggaaagaagtacccccattacaaatatgcagattcagacatggcgggacctgccgccggagacgaagcgcgaggcaggcggctggatgaagtgggcgcagttacaggggataaacatcaaaagtgccagaacctttctgacaaacagcgggctgactctcgttggtacagagcgcctgaaaccgccagaggaaagaggtacccccattacaaatacgcagattcagacatggcgagacctgccgcaggaggcaaaacgcgaggcaggcggctggatgaagtgggcacaggcacaaggggtagacatcagttgtgccagatcctatctgacaaacacgggactgaagcccaaagggatagtacgactgcaaccccccggagaaagaggctccccgatcacacaggcgcaacttctggcatggtttaacatgtcaccggaggagcgccacacatcaggaggatgggcagcatgggcgcagacacaggggatatcctacagaagcgccagaaagtatctggcactggcagactacgaaatgtccccccgtcacacatcgcgatcatcgccgtccgcaaccgtcacaagtgccagtccacaagtatcgtcatcctcagacactggcgatgagataaccgtcatcgtgagtccccccccgcagaaccacggggaaaaacgctcacttccccggaccaacgaagacaactccgccccgccggcaaaacagatcaaggaagaggaagacgccgtgacctggcggacacaccagataaacaatgacctgcccatcctgcagcactggcgtgatccgacgatatcggttatggcgcaggcagaaggccggattgaaaccctgcgggtcacacggtggggaccgcttttcagcacgttatcccggcagaccaaagccaggattaatcaggtgatcggctggtttctgcaaaatgaaggaaaccatgatgtgcgaatgaatgagatgatgtccgtcgctatcccccttgatgacagcgatggttacagggggcgaacagtctacgcaagaaccgatctggcggcgtttaccgtactgggtccctactccggtcgcctgctggacagtgaaaaggtacggtgtgaatatgagaaagaatatgggaaggatgccagtaattattattttgccacgcgaagccaggagcgcctggtgtccggcttcccgcagggtaatctccttagcctgattaacaacccggtatttatccatcggacggcggaaggagaagcaagacagaacgtcagcgcggtgcttgtcgggaagaatattcactttttcctcaccacccgcgacatcagcgccggggaagaactctggtttgattacggaccggactacatgcattttgagtcaggtgaagcgctacgctcagtgcaggttaaggaagagtcgccctcttcggatgaagggtaa

SEQ ID NO: 398706 - DNA, 198 bp, Salmonella enterica
atgaaggctggcgtttacattcccatctctgcttgtatcaaatgtgtgttgaaaaaaatccccaacaaacgtgatatttatatttgcagaacttatagttttaagaaagttaaaatcatgaccagcaaagtcctggacttcatctacaaagaaaaaatcaaaatatttctccatacgtgctacaacagcactcattag

SEQ ID NO: 398707 - DNA, 150 bp, Salmonella enterica
atgatgtttgtgttgttctcaatcctgcaaatgtcaaagcttggaaaagtggaagtttccgagatatcaatccagaaacacgaaataaactctatgttgcctgttcgagagctcggggggatattatttttattcctgaatccttactga

SEQ ID NO: 398708 - DNA, 228 bp, Salmonella enterica; identical to SEQ ID NO: 390992

SEQ ID NO: 398709 - DNA, 417 bp, Salmonella enterica
atgcgtcaggaccgggcgctgctgacggcgtgctgcactgacatgtctgcgggggcgttttctgcgcaggttcaggccttcaagacaataaatccggtgggttttcttgtggttaacaggccatccctcccggcgcaactgaatatgaatacgcgggcaaccgtagcgtatccgggtttccgctatttcccggatacgcagggttatcgcccgatcgtcacgccggctctgccagtggtaaacggttctgctctgcatcagcaacccgcatccccgccggacgctgatacagtaagcctcccgcaaaaatgtaaccgcctggcgcttctgagccggcctcagaacttttgcttcagtacctcctgcagcatctccttgtccagactcagctcagcgaccagcttcttcagccgctga

SEQ ID NO: 398710 - DNA, 558 bp, Salmonella enterica
ttgccccgtccgcgcaaacagccccagtttctccccggccagcgcggtcagattgcccatcacgccagcactgaaattgcctccggcattcatggcaacgtttttcgtggccgtcatctgcagatgctccccgctggtcagcgccatcccttccggggcggacatcagcagcgcctcactgagcggcttcagcctctgctcaaacatccgtatctggctgtccacatccgccttcagcgcctgcgcctgctctgccgcgatttccagctgctgcaactgctggttgagcctgtcgatttcctccagcgcggcgctcatatccagcacctcgccctgtgccttcgcctgcgcgtcggcgctgacaaacagcccctttccggctcgcagtgttccccactcgtcggtgcgcagctctgcgcctctgccgcgagtctctcccttgctgttcaccaggtgcccgctgttgagctgcgtcttgccgtattccgtggcgagcttgacgtgctcctcaccgcgcttgtcttccatccgcagcttattgttcgcgggcgtgcgtaa

SEQ ID NO: 398711 - DNA, 567 bp, Salmonella enterica
atgcagacgggaatcacgggcgccacggaaggtcaccagcgtgaggaacacgccttcttgcagggccgtaatgacgtcgccctgcggctccagcacctgcccgggagtgaggtgtgcagcattgctgaacaggtgaatgcgggccgacctgttgagctcccgctcgtgatggatacgcgcatagaacgcgccggtttcggtttccggctccgggctggcgtcatcgcccgcttcacgataaggtgccgcgtagcggtaatgctccccggtggtgaccgcatcactgcgcacactcaccgccgcatccatcggcgtggtggcggtccggtagttgtaatcccgcgtgacgacagtgccggtggctatgttgtgccaggtccgcacatcccagaccgactctgccgcgccgtcgaacaggcccgacggctcgcggtacggcagacgcacatcaaaccggtagttaagctggctgtcggccagtatgtacgtatccagaccgcgcacgtcgtccatcaccgtacgccagtaaatccccacctcggacagaatgcgctggatgaactgtaa

SEQ ID NO: 398712 - DNA, 414 bp, Salmonella enterica
gtgtttgcgcagtacctgctccaccacctccggcaccgactggctctgaaatacggcgcactggcgggtgtgctccagcagcgccagccgggaactgagcgtgagccggtagagagactgatcccgggtagtggaaagccactccaggcgggtgacaacaccgtgaacgtttttgccgctgcgcatacgaaaggaggcatatttcatcagcatatcttccgggggaatgttgccctgcggagtagtgaactcaatatcccacttaaacggctcgctcagcgcttccctgccacgaaagcgcaaaacatccggcttcactgtactgtcattaatatccagaaagtaacgggtctgtccgtcaaaaagcgccagccagttatccatcacgtcactcctttaccggcacaaggctga

SEQ ID NO: 398713 - DNA, 768 bp, Salmonella enterica; identical to SEQ ID NO: 375314

SEQ ID NO: 398714 - DNA, 303 bp, Salmonella enterica; identical to SEQ ID NO: 395085

SEQ ID NO: 398715 - DNA, 528 bp, Salmonella enterica
atggatcgccaggcattcccgactaaaattatccactacagccagcgcccggaagcgccgtccattaaacagactatccgatacgaaatccatactccagcactgatcgacatgcgtcaggaccgggcgctgctgacggcgtgctgcactgacatgtctgtgggggcgttttctgcgcaggttcaggccttcaagacaataaatccggtgggttttcttgtggttaacaggccatccctcccggcgcaactgaatatgaatacgcgggcaaccgtagcgtatccgggtttccgctatttcccggatacgcagggttatcgcccgatcgtcacgccggctctgccagtggtaaacggttctgctctgcatcagcaacccgcatccccgccggacgctgatacggtaagcctcccgcaaaaatgtaaccgcctggcgcttctgagccggcctcagaacttttgcttcagtacctcctgcagcatctccttgtccagactcagatcagccaccagtttcttcagccgctga

SEQ ID NO: 398716 - DNA, 318 bp, Salmonella enterica
gtggtactaaaaaccggagggactacaatcgggctggcgaataacaatattatccctgcagaagatctggatcgcagctatatcgtctatccgcagattaatcaggaaaaatgcgtcggttgcggacgttgctatatctcatgttatgacggcggccatcaggcgatggagtgggatgaatacagccgcaccccgcactgcaacactgaaaaatgcgtcggctgtctactgtgcggccatgtctgcccggtagcctgtattgatttaggcgaggtcagatttaaaaaaggtgaaaaagagcacgcgttgacgctgtag

SEQ ID NO: 398717 - DNA, 189 bp, Salmonella enterica; identical to SEQ ID NO: 375319

SEQ ID NO: 398718 - DNA, 198 bp, Salmonella enterica
atgtttgcaaaacctcacgtatcgcctccattacatgcgccaaagggcttcccctttgaaaccctgccctacttcaccggcgggacaagatatgtttttatagcaccgtcattcaccttcacgcataacgatataactcaacgcgcagtgacggccaaacagcagattacctccttctggctggcggtgaggtgttga

SEQ ID NO: 398719 - DNA, 195 bp, Salmonella enterica
atggttcagccattaccgacgacgagcgaagcgcaaaaggaacgtaccacccaagagcctgagcagcagtatttgccgccgccaaccttttacactcgcgggacatacgtgaaaccttctgtcacgaaatacccggacactacggactcaataactttgctccaggggataaaaaagctcttcagtaagcgctga

SEQ ID NO: 398720 - DNA, 261 bp, Salmonella enterica
atgaaaaacagctatgttcgggcgcggattgatgaaaacattaaaaatgatgcgactattgtgctgaatcagttcggactcacgatatcggatgtgattcgtataatgatcactcgcatcgccgaggaaaagcgcctgccttttgaattgcatgtgcctaatcaggatacccgagcagcgataattgagctggaatccggacacggtaagaagtgtgattccattgaggcgttaatggcaagtcttaacgccgatgattaa

SEQ ID NO: 398721 - DNA, 246 bp, Salmonella enterica
atgttccctggattggtaaatgaccagacgatagcaactaaccaccctaaacaactccagccaagaacaatgttcagtatccatattgctgtagcatttttatgctttcgtgaactggctataattcccggaaggagatatatggggatgatgaatgctaagaccatgatttcccataccgacatcagtttatcctctaattacaaagaaaatgccaccctgctactgtgggctgagttgttgtag

SEQ ID NO: 398722 - DNA, 1110 bp, Salmonella enterica
atgagtaactggggcatcggactgggggcgtttgcgcagggactgaataacggaatggatctcggcgcaaaaatacgtacggcttatgaagataacgtgcaacgtaatgaaattgaaaatgctcaacaggaagctgaacaggatcgcgataatgccgctcagaatctggtgaaggtgtcagatcaggctggcccaacccaaccgaaacagaaaaacggaggtatgggtagttttatatccaacatgttcgacggcgacagcaatagccagaaccagatgcctaaaacgtattcgtatggcggaaaatactattcctcaatggacgaggcaaagaaagccgcagaaagcgatttgccacctgttgactcttacatggataaatatacggatcagattaagcagaacattatcaagcgcaccggcaatgaagaactcgcagaaaaatggagcgatttcgcgcagcaggcaaagagcaagcgtatgttctcaactgctgcaaatgcctaccgtaagtttggcgcaggcaattacgacggcggaatccaggaccttggcgacatcatgaagaatggtgattttggtgtcgagattgttggccataaaccggtgactgatgcgaacggaaatatcaccggcttcactgtgcaaatgcggaataccgacaacggcaaagagtacgatcaaaccatgacgccggatgcgttgctggagtttacaaagacgttcgccacaccatcacagcttttcagtcagctttatcagcgccaggcagcggctgatcaggccaaatttgaaatggcgaagcaggggcaaaaaaatgcctgggaagatcgcaaactcgataaagggcagggcaacaaactggagcagataacgactgaagcgaaggtaaaacagaaattcggcgacgggttaagtggttttaaacgtccaacagcaccggttgaagcggtgcgtcagtctgttcgggatatcctgaaacaaagcgccggttggaatggtcaacccactatttcggatgatgaagcactcaaacgggctattgcattaaatgcgaagatttacaacaccacccctgagaaacttctacaacaactcagcccacagtag

SEQ ID NO: 398723 - DNA, 1281 bp, Salmonella enterica
atgtgcgaagcaattatttcaacaattctgatattggtgctgttctggcattttttgattccgtttaatgcggcacagtttgccactccagaaggttttatattgccggtaccggaagaggaaccgaaagcatgggaagaaacggcccttttcaaaaaaggcggaggtgtggatatacctgaccctgatcctggaattcatgatgctgcctataaactgggagatctgggcgacgaagcgttggaattcttcaagcaggcctatgcagaagggacatctcgtcaggatgtgattgatgaagcggcaaaacacgtcgtcggtaacatgatgggaatgtctgatgatgcgaaatcgcacagtgaagagctgtggaaccggtacgagaataagtacgtaccggtggaagatcgcgtcatagacgacgcaatgaactgggatagtgcagataaccaggcggcatccgcagcgcaggccaaagccgatgtaaatacctcgacagcacaacagcaggctgcaacagagcgacagcaggaggctatgggggtagatcctaccagtggccggtatcaatccctcgacagtcaggctgatacgcaggctgcgttaaacgcagcagatgcggagaacgccgcccgaacacaacggcaacaggaagcggtacaaatgcgcgagggtgtagcccagcagggattgcaggaagccgggttagggaatcagacagcaagtcttgccggttcgctcggtagtggcggtattaacaccggtctggctgcgaatcagggcttctaccagaatgctggcctgatgggtactggctatgggctggatatgaagggccagcagggtaaaggtagtctcctgctgtcagaatatcaggcgcaattagcggccgcaggtgctgaagaacaggccaatgctgcaaatatggggggaatgatgagcggtatcggctcgctggccggtgcttatcttaataattttgcaggaaacgatccgctaactaagagcatcacctcatcgaaaagcgttaaagaaaataagaaacctgtaaacggcgcgctaaacgcacttaatggcctgaatattcagtcgtggaagtataaagacggtgtggaggatagcggccagcatattggcccttatgcagaagactggcagcgtgtgacagggctggggaacggccagagtatccccgtcgtggatgctgtcggcgtcacaatgaaagccgtacaggaactcaacgacaaggttgaccagatgaaggggaataacgatgagtaa

SEQ ID NO: 398724 - DNA, 2760 bp, Salmonella enterica
atgcgtaatattgacctcatccatgaagtcaccgccgccgctgccggtcaatggcattctgtcctggctggtctgaacattgatgtgcctgattcaccccataagcatgttgcctgtcctgcatgtggtggccgcgatcgcttccggttcgacgacaacgggcgcggggcgcatttctgtaacggctgcggcaccggtgacggcttagacctgatccagaaggtaaaccagtgtacgcctgtggatgctgcaaaaatggcggctgatgtactgggaattgatttccgggaatcagtagccagcgatactggcgccagccagagacgggaacagttggccgcagaacgccagcaacgggcgcaggcacagcagcaacgcaccgccgaatcgctggcagaacgccgcgctacgtttgcagccagatatgcaggactagcagcgaaggccgcgcccggtgaaagcccgtatctggcggataaaaggctaaccggcttcacattcccgatcctgccgggcggtaagctactactgatgctggtggatgagtccggcgcagtcgctgccgcgcagaccatctctggacagggtgaaaagcgattaataaccggttcagcaaagaaaggcgcatatcacatcatcaacccgtctgaatcgccgcaagttgtcgtgatcggtgaagggctggcgaccgtcttatctgtccatctgatgcgcccggaggctcaggcggtggtagctatcgacgcgggaaatctgttgccggttgcgcaggtgattcgtaaatatcacccgcagtcgcagatcattattgctgccgacaacgatattaagccgggggaaataaatactggcaaagtcgctgctgagaaagccgctactgccgtggctgggtgggtggcactgccaccgactgaccataaagccgactggaacgactactaccagcaaaacggcctggaagccgccacaatcgcatttaacgattcgatgtaccagctacaggggaacacattgaaaccacaattaaaggccatcgatggcggcaagactaaacagccagagcaggaaccactgaaaccccgtattgagagccgggaagatggcgttttctgggtgacgccgaaggtggataaagacagcggcgagatcatcaaccatgaaagctggctgtcctcacctgtagaggtgattggctccggtcgggatgataaggatcagtacctgattatccgctggcgggcttttggttcagatacaccgacaatcgccgcaatccccctggcggatattggcgaacgtgaaggctggcgcaccctgaaagcgggcgggatcaacgtcaccaccaaaagcagcctgcgggcaattctggctgactggttacagcgcagcggtgaacgtgagttatggcgggtggttcatgcgaccggctggcagtccggggtatacatcatgcctgacggggagatcatcggcacaccctcgaccccggtgctgttcagcggccgcagctctgccgccgccggttataccactcggggtacgacggatagctggcgcaacagcgtggcacgactggcaaacggaaattactccatgatgaccgccatcgcagcggcactggccgcgccgttaatcgcattgtccggcgcggacggattcggcattcacttctatgagcagtcgagcgcgggcaagaccaccactgcgaacgtggctagcagtctgtatggaaacccggatctcttgcgcctgacgtggtacggaacagcgctgggactggcaaacgaggccgctgctcataatgacgggttgatgccactggatgaagtcggccagggtgctgacgtcatgagtgtatcgcagtctgcctatgcactgtttaatggcgtgggtaagctgcaaggggcaaaagaaggcggcaaccgggatttgaagcgctggcgcaccgtagcgatcagcaccggagaaatggacttagaaaccttcattactgctgctggtcgcaagaccaaagccggacagcttgtgcggctgctgaatattccgctgagtaaggcgatctgcttccatgaataccagaacggtaaacagcacgccgatgcgctgaaagatgcatatcagcagcaccacggcaccgccgggcgtgaatggattaaatggctggtggatcaccagcaacaggccattgatacagtgcgcgagtgcgaagcgcgctggcgaagtcttattcctgctgactatggcgaacaggttcaccgggtagcagcgcgctttgctgtactggaggcggctttgctactgagtgaagttgtcaccggatgggacgctcagacctgccgggatgcgatacagcacagctataatgcctggctacgggagttcgggacgggaaataaagaacatcagcagattattgagcagacagaagcctttttaaacgcctacggcctgagtcgctttgcgcccttcccgtactcacctgccgatttgccaatccgggatctggccggatatcgccagcggggagaacacgacgaaagcccgatgattttctacaccttcccggccacctttgagaaggagatcgccgcagggttcaacgcgaagcagtttgcggaggtgctgaaaaatgccggaatgctaatcccaccgaatagcgggcgcgggtatcagcgtaaatctccacggattcaggggaggcagattaacgtctatgtcctcaaataccttcaggaggacgacggccagccagaagaataa

SEQ ID NO: 398725 - DNA, 258 bp, Salmonella enterica
atgagtaaatcaaaactatccctgccagaagcccgtgaccaagttgaacaggttcaggcactcctttcgctctggatggaaaaagaaggtattgatgacagctcctatctcttgttaggggcgatgcagcgtttattaaacggtgtacctgatgtcatccagactgccagcgatgatattgagcgatataaattccggggaaatgatgagttaccggactcatcttctgtaaaagggcggaagaggaagaatgcgtaa

SEQ ID NO: 398726 - DNA, 747 bp, Salmonella enterica
atgatgactttcgtgaccagtacacgcgagggctttcccctggctggcctgttgcatatctgtgctatcggtcagatacccggcaaaaaggacttgccgatagaaccccacccggattatggttattgcgcaccagcaaaatctggtgccgggcgtaggaacctgtgtaactcaatggcgatacagacgcctatagcgtctttttttgtatcgtgctttcgtacacccatagatagcggtaatatccgcgccgaatctatggtggcgttggcggggcagctttcgggctggccggtgtccattgaggccggtattcctacccccgtcaacgtcaccaccaatcaagagcgtaggaactctggtggtgaatccataaactcaatggaggctgccacatggctactaccccaaccctgtcacaaccgacaaaagttattcttccctacattcaccctgttcctgaagaaaccaaaactcgcctcgacccgtttattctggctctacaccagcaacgttgtgaaatgctccacagctttaagatggcactggaagccgctggcgttgagtacatggaggcaaagcatgactaactatctgtttctggccgttgtccgcgctaacacgcaggacaaaccgtaccgcgaagaagtgatcgccaccagcgagcgcgaggctcgtaagtacctggctggtcgctatgtgctgttatttgctggtcgtctgccggtgcaggaggtatctgtatga

SEQ ID NO: 398727 - DNA, 501 bp, Salmonella enterica
atgactaacgccagccagagtaaaggcctttccgtggctggcagcaaagagccggacgtgaacggcctgccgttgtcactggttgatcagtggcaggagtaccagacaaaacgtacctttgccgtttctgtgtctacggaattgcgccgccagtattacccggatgatgccgctttcggtaaggctatgcgtaaggctggttatgttcctgtacgcactcgcgagctgaccgggaaacaggaacgtttctggctgtatcgtgtgaccgggaataataagggggtatgcacagcagaaaccgcgctctacaaggcttcagagcctgttgtccagaccatgtctaagccgcatccgtggtttaaacgtgtggcactcgatggaaaatggcagtacgtctacgccgatcacatccgtttcctgacgagaaagcgacaccgtgttgatggtgtgcgtgtgcagggttacacagctgccgggctaatcatggaggtgatcgcatga

SEQ ID NO: 398728 - DNA, 744 bp, Salmonella enterica
atgagcgataaaaatacctttcctcaagctatctttgctgagcctgaaaaccagaaagatattattgcggcagaagtcgataaaaaatcgctggttgtcccagaggtcgtaattattggtaaggagcctgtaaccacgtcacaggcaatagctcgttatttcggccgagatcatgacaaagttgtaagccgcattgaaaaccttaattgctcagataactttttaacccgcaattttcggcgggtaaaatttgagcataaaggtcggttcctgaatgcttacgaagtaacaaaagacggatttacctttctcgctatgggattcacgggaaagaaagccgctgcttttaaagagaattacatcgcccagtttaactacatggctaactggatgatcgagcgtcttgaaaccaaggcagaaatgaagtcgatggctgacgcgatgaagggctatatcgagcgcacggaagacaagcagcacggctttgcatacagcaacgaatgtacgttcctgaatggtttggtgctgggtatgcatccacgtgcttgggcgaagcagaacagcattccggcaaagaaagcgcgtgactatatgaatgccaaccaactggcgctgctggcctatctggaaagccgtgattgtgcgctactggatatggatatgccgacggcagaacgtaaagagtgtcttaccgagctggcgcaacgttggttggctaagcgtttagaggcaaaccatgactaa

SEQ ID NO: 398729 - DNA, 207 bp, Salmonella enterica
atgtctgccgaatcaaaaaaattaatcaaaatgtctgaggcagcgcatcgcgccggttttggaaaagcatggatttataagttaattgctcaaggtcgctttccaaaacctatcaaaaccggaactcgttctattgcgtttgtcgaaagcgagattgaggaatggattaatcagcgaattgctgaatcgcgtggggaagtggcctaa

SEQ ID NO: 398730 - DNA, 1215 bp, Salmonella enterica
atgaagttaaatgcccgccaggtcgagacagccaagccaaaggacaagccatacaaacttgctgacggcggaggtctttaccttctcgttaatcccaatggttcccgatactggaggctcaagtaccgggtcgcaggaaaagagaaactactcgctataggtgtatatcccgaagttactctggcagatgcacgcaccagacgtgatgaagcaaaaaggggtatcgctgggggtatcgatcctaacgaagcaaagcgggaagaaaagttaacccgggaagctcagataaaaaataccttccaggaaatcgcctgtgagtggcacgccagtaaggttagaaaatggtctgaaggttatgcttctgacattatggaggcgttcaataaagacgttttcccgtatatcggtaaaaagccaattgctgaaataaagccactggaactgcttaatgttcttcgccgtatggaagggcgcggggctacagagaaagccaaaaaggtacgccaacgctgcggggaggttttccggtacgccattgttactggcagagccgaatataactccgcaccagatcttaccagcgcgatgcagggccatgaatctaaccactatcctttcctgaatgcggcggaattacctgaatttttcgatgcgctatctcattattccggtagtgagttggtggtattagctgcgcgtctgctcattattaccggcctgcgaactggcgagttacgcggggcgttctggcaggaaatcaatgatgaagcaggtgtatgggaaattcctgctgaacgaatgaagatgcgcagaccacatatagtccccctgtcccggcaagcactatccattattgcgcgcattcgtgaaatgaccggcagatacccgctcatgttccccgggcgcaacgatccacgtaagacgatgagtgaagccagtattaaccagatatttaagcgaattggttattccggacgcgttactggtcacggcttccgccataccatgagcaccattctccacgaacagggctataacactgcgtggattgaaacccagctcgcgcacgtcgataagaactctattcgcggaacgtacaaccatgcgcagtacctggacgggcgccgggagatgctccagtggtatgccgactatatggatgcgctggcgagcggtggaaatgtggtgcatggtgtgtttagtaaaaccggatga

SEQ ID NO: 398731 - DNA, 567 bp, Salmonella enterica
gtgaccaccacgacattagagcaggcctttgaggcctgccagaccagtaaaaccaactggcacaaccataaagcggaactgacagaggcagaggccgcgctcgctgctgcactggcagtaagttcccccggaaacgccgcaaaaattgccaccctgcgtgaacgcattgacgtgaaatcatgggaagtcaatcagagtgccgggcgctatatccgctcgcacgaggaagtacagcgaatcagtattcgtgaccgtctgaacgactttatgcagcaacacggcgcggagctggccgcagtgctggcacctgaactgatgggcattaaaaaacagcctgctatgatacagaatcgcgcagtcgaccgctcaatgacgtatctgcgtgatgcgctctctgtctggctggaaaccggtgcagaaattcattatgcagaacaggacagcgagattttaacggccatcggatacaggccggaagcgccatcacgcgatgacagtcgtgaaaaattcacgcccgcacagaacatgatttatgtccgccgacgtgctgaactggccgcgcagtaa

SEQ ID NO: 398732 - DNA, 732 bp, Salmonella enterica
atgaccgacaccaccatccctgattatcttcaaccggcaatcgtacggctggaaacggccagagctgcccatcttgaaaacgctcgtctgctggatgaaaccacaacggctatagctcgtgcagtggagcagaaagcggcgctggagcaggaaaacggcactgatgccagcgcatggcgcaccgcttttcgtgccggtggtaccgtgctgactgacgaactgaaacaacgtcatattgagcgggtggcacggcgtgaactggtgcaggagtgcgtaaatctggctgaggtgctggacttcgaaagtgaccgactgaaagccgcctgtgacagttcggccagagcataccgacaggcgcatcataacgttatgagcctgtatgcagagcatgaactcgataccgccctgcgcgaatcatgcgctgcgcttgtcagggcgatgaaacttaaagtgctggcgctgaaaaatccccttgccaatactatcggtcatcagggttataccgaaccggaagtggacgtgatgcagcaggtgaaagcatggcttgagcgggagatgaaaggaagtcatatccgtctggctgatgagcctgttctgtataaaacagggttgtcggttacctccctgccgcatatggatcacagcgtcgccaccactcccggccagcgtcaggtgtggcaggagaaaatgaacaaacgagagtctgaccttaaagcacgggggttactgtaa

SEQ ID NO: 398733 - DNA, 390 bp, Salmonella enterica
gtgagacaaaaatattgcctgacaaaatcaacgcaatccccgacaacccgcgacaaaatcgttgcagagtggttccgtatctgcgagcagcgacaagagccctgcatcaggctgcactggagaggcaaaagagccaatgttcattgggatcacctgtcatatgcacaagaaatagatgaggttttttctggtgaaaagggagacgtactgcgttctgatattctggatatgttcagacgcacagttcaggaacagcgtgacgctaatatgacgtgcatggtcgctcgtgatactgcagattttgaacgtttaccagcgagcattgcgggaaacgtagcggcagaactgtatgaccttgttgtcaggcatgtaaagcgttttaaaaaataa

SEQ ID NO: 398734 - DNA, 2325 bp, Salmonella enterica
atgacaaataatatcactatttcagaattaatcaatcataccagcggtaaatgggatgatattctttttcgcctgaatattactgtgcctgaaaatggtaaacatggtgcgtgtccgcattgtggcggtaaagaccgttttcgctttgataataaaaacgggcgtggaacatggtactgcaataactgcggtcatggtgatggtctcgatttggttaaaaatgtgctctgcgtcggtaccggtgaggcaatttcgcgcgtgataaaggtttgccctgttgatgcccgttcatcatctgataaaaccacgccagccagaaaagaagcccaaaaacagggcaggcagagcgccggcgctaaggtgtctggtctcatgagcgatgcgacacagggtacatcgccttatctgacccgtaagggactgactgacgtaatgatgcccgtcctgcctgatggcaacattctggtgacgctcactgacattcacggcaccgtgcagggtgttcagtttatcagccctgacggaagcaaaaaaatcatggccggtagtgcgaaaaaaggcgcattctgggctgcgtcaccgctgccggataagccggaaagcatcctgattggtacgggcgttgcaaccactatcagcgccggaatactgcatgatggcgtgattattgctgcgctggatgatggcaatctgaaaaccgttgcgcaggcggtgcgggagcgctggccgactgcaaaaattatcatcgtggcggataacgactggcattatcccggcgaaacggacgagcgcggcaagctaaaagtcaacagcgggaaaatccacggcgaaaaagcggcaatggccgtcaatggctggcttgccctgccaccgggtgaaatcaaaatggactgggatgattaccgccagcggcacggcgtggaggcggcgcggctggcttttttggcctgtctgtgccagatgaacgccagtcagctttacgaggcgcgccgttctctgggtgacagcgtggtactgtccgatgaagaagtgaccgcgctggagaggctgaacctcagatacacccacgtcaccatcggcggcaagcatcgcgtggtgagcctcaagccctgtcaggttaatggccgtagtcatgtttttgaggagctttctcagttccgtaactatttcctgcatgagaagcagatagcgaaacgtagtccgggcgctgcgtggctgcaatggccgggcaaggcatacaagccgggcggcgtgggattctatccgcgaccggagaaatgcccgactgacgtgtacaacctgtttactggctggggcgtgatgccgcgccacggtgatgtgtcgccatacctggagcatcttgagaaggtcatttgcagcggcaatcagggggcgtatgaatacctcgttggatggctggcacatctggtgcagaagccggacgaaaagccgtccgtggcgattgtactcaaggccatccccggaacgggtaaaggctcaatggtcaagcccctgctgcaaattatgggacagtatggcgtacaggtgaacggagccgggcagattgccggaaaattcaatgccacgatggctaacaagatgatggtgtttgccgatgaagtcaccgtgaacaacagccgcgaggctgaccgcctcaagggaataatcagtgaggacaccatcaaccttgagcgcaaggggattgacccggagccaatgccgaacttctctcgtctgatttttgccagtaacagcgagcaggtgttacgcgccagcgtcagggagcggcgttatctggtgctggagccagcgccggagcacgcgcaggagaaagactattttgaccgcctgcacacctggatcaacgctgacggtgcatcgcatctgatggcgtacctgctacaggtggatatttcacactttgatccacgccgtgcccccatgacggcaggactggtgaaagaaatcgtgagcaatctgcccccggctgaaagttatgtttacggtgaattgttctccgataagccttttcgcggcgtggcgcgactgtctgccagtgaggaggtggagcgctttgtcacgttctgccgtgaaagcggtattgatatcagcatcccggcagcacgccggatgactggccgtatactatctgcgataggactggagcgtaccggaaggtcagaccgtggaggcatcttctacgaccttccggctaccgaagacgcctatgcatggcaccggatacgaagccagtttgccgcacagcttaacagcgacgtggtacaggttttcggggaggagtttagctatccgtcagccgattga

SEQ ID NO: 398735 - DNA, 324 bp, Salmonella enterica
atgaattttcatatcccggcaatattaccggcagatttacgcattgcgttttatagacgtgctgttgcttgtgcatggctgcatatctgtcagcggcagggccgctattcgcatatcacgcttgatttactggagagcgctattgttgcagagctggaagggttctatctgctgcggtacggagagacaaagggttgtgagatagcctgcgccttactggaggatttaatgcaggccggagcgctgaaagctgcaccctcattgtcgtttcttggactggcggtgatggatgaattatgcagtcaaattaaaacgactgattaa

SEQ ID NO: 398736 - DNA, 438 bp, Salmonella enterica
atgtttgattttcctcaaccgggtgaaacttaccgttcagcagcttttcctgccgttgtggtgaccggcattctcgctgatggtattccgtgggatttaccgtatcgctgtccgggactggtctggaacccttaccgtcggccttacaccattctgattcgtatcacgtctgatggccgggttatcgaattaccgctcgggcgttttttgcgggaattttcctgcattcgtgctgacctttttaaacgtaacccggagaatcgttattccgtcctgaaagatattgccactgaccctgtattgcagaaatggcgggaggacaatattgataaatacccggaagaaaaaatatccgtaattaagtcaaagccgctggcacagacatggcgggatattcccggtaaacagccggataacagttatcgccagtatctgtaa

SEQ ID NO: 398737 - DNA, 288 bp, Salmonella enterica
atgtgtaataaaaacactcctcagaccgtcccggcgcgtcgtgacgtccgtgagcacctcagcattgaggcttaccataaacttaaccgcgcaaactccgtatcgcagtctgtcgggctggatttgtgggggcgtaaaatcaacggcatgcataacctgtttgtgccacatattttgagctatctgcatgaagatatcagctatgtactcgaagagttgaaagacaaaggcctgtgccgcgacttcctcactcagcaaggccagagggaggaagaagaccatgtttga

SEQ ID NO: 398738 - DNA, 414 bp, Salmonella enterica
atggtgtggtgtcacgtatccggtacaggtttgaatcgctctttcctgcacctttcgttacactatgccgccttgtcaatggtagctcaggcggggcagctttcgggctggccggtctccgttgtagccggtatttccacccccgtctgggctatcgccatcgagcgtggaaactccggcgatagcataaccggctatacgacggaggttgccattatggctactacccctaatcattcgtaccctcagtttatctttgtgtttgcggctgttcgccgtgcagaccgtaaaccccgcatctgtatgcttcgcactgttgccggtgacgagcgcaccgctcgctgttcccttgtgcgtgactatgtgctttctcttgctgcccgcctgccggttgtggaggtgtcacatgtgtaa

SEQ ID NO: 398739 - DNA, 318 bp, Salmonella enterica
atgtcacaactcgctttcacatcaccaacaccagaacaacgccgtgcaattcttaccgattatggtttcgaatgtgagcagagaatcagggaagacaaatgcaaggaaatgacgaccctttcacgttccagacgctgggaactggagcaaaagggggcatttcctccgcgccagcatctggggcgcaattcctgtacatggctgttaagtgatgtgctctggtgggtcagaaatcctcctgcaatcagtaacgtaaataacccacaccagcgcaccaaagaaaaacagcaacgacaggctgacagccatgcagcctga

SEQ ID NO: 398740 - DNA, 1146 bp, Salmonella enterica
atgtcgttgcctttaagagagtattacacgatagacagagcctctgaacttttggggtgtacggtcgatgatttaattcattgggctatggttggatgtattcgtatttatattaaagtggagcgcgcctacggtgtagtggttagtcaggatttgagtgagttagccggttccggtgatttcgacgaagtgatggagggaacgaaatataaaaatgacttatccgagcttgatacgatggttgaggtggaggataaaagacaggcagatatatcagataccgaatattataacctgcgagccagaatcgtttatcatgcgatgaatgattatatttataaaaaaggtgatgtaaaatgtcttgatgatgtgggtatgaggcatatcttctcaaatctgcattaccattttgcacatcaggtaacagaagatttttgttcaataaccagtcttgaaatgctttgcaggatgtatcgtaatgacgctaattcttttaaggatgtattaaacaatgtgccgtatgaattaagttcgtcagttgtggatatgagaggtttctttggcctgggtgagggcttttacagaggatataatttctgtaatggctttgtagttaacacggaaggggagtatattaactctgtatacatgccagaaagcaatctgtgtgttaacgtaatttccgattgtgatattaatttttctcatgatgtgttatttatcatgaaaaatgattttcttgcaatcaaagaagcattaagaaatgaaagtgagttgaaaaagaaatatccttaccacagaatctctaataatcatgggtggtggaaatgttttgcatcaggagatgaaaataaacagtcttgtgatgtgcaaaataaaaataatggtttaagcgagaataccaattctgcttcaaaattaagtcgaaagccgcacgtcgctgaaatgcacgccagaaaaagagagtcggttcttaaagctgcaatatatataaaggttaatcatcctgatttgtgcgggaataatacaaagtgggctgaggcaataagtgaccatgcttataagttttgggatgacgggaagtgtccactatctcttgaggttacagcaaaactgttagggaaggctttaaacccaaaaaaataa

SEQ ID NO: 398741 - DNA, 1224 bp, Salmonella enterica
atgacgggtacaaataagctaagcgataagaagctaaaatctctgctgggggttgagcgcccttcaccggtaatgtttgctgatggtgaggggttgagcgtaagagcatcgaaactcgggcaattgagctgggtttattcttacaggcttggtgggcgaggtactcgccttgaacgaatgacattaggccgataccccgacatgtctttgaagatggcgcgggacaaacgcgagcagtgccgccagtggcttgccggtggccttgacccaaagactgaaaatgaattgagcacggaagaaacgttgaagcccgtgacggtgcaggatgcccttgaatactggttagtaaactatgcacggcgtaagcgtagcgatgaagaacttatccgggcgcaacttcgcaaacatatttttccccggctggggcgttatcctttggctagatgcgaaacccgacattgggtagggtgttttgatgaaattaacgaaacacagcccaaaactgccgggcgaatgtttcagatttcaaaacaggcgcttcgtttctgcaaagtgcgtcggtatgcgtccagtgatgcgctggctattctcactattcaggatgtgggggaaccatcaggaaaacgggacagggttctgaccgattcggaactggcagatgtgtggcgttttacttataacaatcgtcagcgtgactattaccctcgcctgttaaaaatacttgttttatttggagccagaacaatggaagcccggttatcacgctggagtgaatgggactttacatcatggatttggactgttccaaaagagcatagcaaaacccgtgaaaaaatagtcagatccattcctgaaggaatacggccgtggcttaaagagttaaaacgcgagacggggaaaactggttttttgttggggagtgagcgtacccgccagtcagtatctctgaaaggccggaggatttacaaagaatttcaccataatgaagcgtggacattacatgatttacgtcgcacgttttcaacgggtttaaataatatgggggttgctccgcatatagttgagttattgttaggtcatgcgttacccggtgttatggctgtatataataagagtctgtatcttcctgaaaagctaaaagcattaaatatgtggtttgaaaggctggagattatttccggtaatcatgaaaatgttattttgcttagcgctggtaataaataa

SEQ ID NO: 398742 - DNA, 879 bp, Salmonella enterica
atgaaaagtatagcaaaggcacaaaacgatttcaccatcttcaaatttggcgacagtgaaattcgcgtcattaacaagtgcggcgagccgtggtttgtagctaaagatgtttgtgatgctttagctttgactaactcacgcaaggcgcttactgcacttgatgacgatgaaaagggagtaactttaagttacacccttggtggtgagcagaatctaagcattgtgagcgaatcaggtatgtatacattggttctgcgctgccgcgatgcagtcaataaaggttcagtcccgcacaaattccgcaagtgggtaacagcagaagttctgccttcaattcgcaaacatggcgagtatgtaaaaggaaagaaaaccactgttgaggaaagaacaccgctacgcgatgcagtaaacatgctggtaggaaagaaaggacttcgctatgacgatgcatacaatatggttcatcagcgttttggtattgacagcattgatgaactttcaattgaacaaatcccgctggccgtagagtatatccacagggtagtgcttgaaggcgagttcatcggcaaacaagataagaaaaccaacgagctttctgcaaaagaagcaaacagccttgtatggttatgggattatgccaaccgctcacaggcattattccgcgaactatatccggcgctgaaacaaattcaatcgaactattccggcagatgctacgactacggtcatgaattctcgtatgttatcggaatggcgagagacgttttaattaatcacacacgagatgttgatatcaatgagccagacggaccaacgaatctttccgcatggatgagacttaagaataaagaattacctccttcagtacataactactga

SEQ ID NO: 398743 - DNA, 411 bp, Salmonella enterica
atgaacactgaaaaaatagcattcctttttccttaccataagtctgaaaatgatgaaaaatcacccatgttaatcatggagacagatgagttacctgtgactactgaccttgattttcaggttcactttctcggtttaattcatgatacaccatattgggtttcagcttgtctctatagaatcgagaatgagttagaaatcagtgtaagcggtgataaaggcgtgtggattaaggcaaaaggacacaatgagatcaggaacaccttggcaacatcgatgtctatgcatttcgataaatgcaaacttgatgctgacggggattacttaattcgagtatccatcagcaaagacaacactctagtgcattctgcgcaagcctacttttccgtgagtcatgtgaaagatgcttga

SEQ ID NO: 398744 - DNA, 324 bp, Salmonella enterica
gtgtatacaacatttgtcgtgatagctatcgcactcattgtggttcagtgccaactggcatctttaaagcaaaagatatctgacctcaagactgagaacgaagcacttaaaaactcaataacagatgagaagagcaaactatcattcactatatctgatattgagcaatccattgaaattattgaaaataatattgacagattaaaaaaagaagatattcatgaaatcaatgacaatatcaaggatttgaaagcttggcttaggaatgtagggaaaaccgccacatcaacacgagataagctcaatccatccatggatgattaa

SEQ ID NO: 398745 - DNA, 1332 bp, Salmonella enterica
atggctacgtggcaacagggtattaattctggtggttttctggctggcatcggtacgcaaaatgagaatgcgccaaaggcaagcgacattaacgcaacgcttggtctgatccgcgaaaacaatgaactggctcgctcaggtgcaaataacgttggtctgaccgcgttacgtggtctggctggagttgctgatatttacaatcaggaacagcaacagaaagcgattagtgcgttcaataaggttcacgctgatgcatgggcttctggtgatccatcgggactatttaagtttgcccaggaaaatccagcgtttgttgcacaggcacaacaggcgttttcaggtcttaatgatcagcaacgcaacgatatgggcgatttagccatgagggctaacgttgctctttctcagggaccggaagcctacagtaaattcattactgacaacaaggacaggttaaatcgcgtgggtgcgaatgctgactggatgattcagacaggtatccagaatccagagcagctatcacacatgctgactactatgacgctaggggctgttggtccggataaaatgctggattatcaggataagatggttggtcgccaactagagaaagggcgattggatgaaagcatccgtcaggctgatatggagaatgcgagaggatgggcaaatatccagaacgctcaactagacagggctcagcgggcacaaatgcataatgataacgtagccctgaagttgcaggaattagggatgaaacaacaggaaagcggaaagattgacccaaaacttgttcgagatctgaatagtgatattaatgggttctcaaagaattattctgcaatgcgtagtgcttctgacaacctacaagcccttgggaagcgcaacactccagcagcgcagttgggaatgattttcaactatatgaaatcgctggatccgcaatctgtggtacgcgaaggtgagcaagtgcaggtaaaacgcactgatggaatattcggcacacttggtaactatgttagccaattatctaacggcaagatgctgaataatgagcaagtccaagacttaatcaacacctcaaaactgatggcaaatactgaaggcgaaaagtttaatcagcaaatggatgattatctttcaacttatggagattctcttcccagcggactaactaagcaattgcaatccagaaaagccaagctgtatgaagatattcagcagcctgcacaacaacagagcaataaccaacaaccgacaaatacccaacagcagcagagtcaatccggatcatatacctcaaaatcaggcattcaatttacggtggaatga

SEQ ID NO: 398746 - DNA, 621 bp, Salmonella enterica
atggcaggccttattcaaaaattgattaacattcaatcatctttaaatgctccaaaaaatcaatataacagtttcggtaaatatcattacagaagctgcgaagatatcatggcagcgcttaagcccctcttaaagcaagagggtgtacttcaatacataacagatgaagttgttctaataggtaatcgattttatgtaaagtcaaccgttactctaactgatggagaatcatctatttctaatgcagcgtttgctagagaggaagaaacaaaaaaaggagcagatggctcacagataacggggtcggcatcatcttatgcaagaaaatatgcactaaacggtatgtataacatcgacgacgccaaagacgctgatactgacgagcacaaacagcagcagaatgcagcacctgcaaagcaaactaaatcatcgccttcctcccctgctcctgaacaggttcttaaggcattcactgaggccgcatcaaataagaacacgctcgatgaactaaagcaagcattcgccaaagcgtggaagatgctcgaaggcacgccggagcagcagaaggcgctggacgtttacaacattcgcaaagatgaacttgaaggagcgatcgcttaa

SEQ ID NO: 398747 - DNA, 447 bp, Salmonella enterica
gtgaaactatacgaaatggaaggatttcttcgcggtaagtgtatcccgggagacctgaaggttaacgaaacaaacgctgaatatctggtgcgtaaattttctgaagcggaggccaagatttcggcgctgacggcggagaatgagctggctcgtaaagcagttcaggcattctgcgatgttgttggcgacaacatcgaggttatctccgaggaggttgggcgagatggcgttctggttattttggaggccatgaaggcaacaggaaatatgccagctaccgacgcttttctggctgaagtgcgggcgcagagtgctgatgagcttgcagaattatatttcacactggcagcgcatgaggctaatcgatacatagctgatagttggcgcgagtccgctcgattcgcaaaagactacgccgcccaacttcgcaaaggcggtgcagcatga

SEQ ID NO: 398748 - DNA, 237 bp, Salmonella enterica
atggaaggtcggtctggaacagccaaattgtattacgattgtcagtgtctggaatcttccaattgtaaagaagtttggcttgagtactggaatctcaccagtgctacgaagtttatcgagatttctctcacgttgggcagtacaacgcattctctgagcatcagtttttgcgtggtcatcatttccccaaataatgaaaccacaactgacgcatcagaagaattcaaaaacagctaa

SEQ ID NO: 398749 - DNA, 210 bp, Salmonella enterica
atgagatataaatcaccgtctctatacgaaattcttactggcaactttacaggggatcttccccttgaagttgtaaacgaagaagaccaggtcattttatctgtactggataaatctcgggtctgccagaacaggattgatagcccggagctgttcctggacgcgcacctgagccttactttacaggggaccttccccttgaagctgtaa

SEQ ID NO: 398750 - DNA, 813 bp, Salmonella enterica
atgaaccatagtgttgctataatactgagtgtttataaagcagaaaaaccggcttatctgtatcaaagtctctccagcctgttttctcaaactatgagtgctgatatttatctctatattgacggagagataactgtttcactagaaaacgtaattaacgattttaaaccttgccctaatttttatattattcgtggaaaagataataaagggctagcttttgctctgaatagcttgatagatataactttacgtaaaggctacaaatacatagccagaatggatactgacgatatatcacgtttagatcgtattgaacagcaatttagatttatggagaaacgaactgacgttgacgtgctgggtggatattgtcatgaatttggcagtgaatacgcgcttgaattaaagaaagtaccaattgatcataataaccttaaaaagtatagtataatatattgcccttttatacacccaacggtaatgttcagaagttcagtttttaaggacgggattcgctatcctttagatacaaggtatactgaagatatagccttgtggctttgcctccttgataagggatattgcttccataaccttcccaaagtattattagactatagaataaatgaggatacgttctcacgaagaagaggttttaaaaaagcggttagtgagttttctgttagatttaactatatgcggagcctcagaaattttagcattaagaattggtgtgtcttaattgtaagatttttattccacatgctacctttgccattcattcgatatgcttataaaaaatatcgttaa

SEQ ID NO: 398751 - DNA, 411 bp, Salmonella enterica
atgaaagagcgtggaataactgatggcttaaccatgaatcagcttgcagaacgtaatgctgagtatgtgatgactatcgctgagctggaagaaaaatgcgcggcgatgactgcggagaatgccgggctgaaggctgcgattgattcaactatcggatggcagcaatcaaccgatccggtgaatgttgaaagcgtcagaatgctagtcgacattgaaaccccggctaccgacgctttcctggctgaagtgcgggcaagtgctatcgatagcctgataggtatcaagactaagcagttggcagatatgcatcccgatactcatgcttttggcgcaacagccatgtctatccgcagccagattaacgaactgcaatcgttcgccgcccaacttcgcaaaggagtgcagtcatga

SEQ ID NO: 398752 - DNA, 888 bp, Salmonella enterica
atgagcaacatcgacaaacaggcgttgcgtgaagagttccgctacatgcgagaccactacaacgatccggcagaccgtaagaaacaggaaatatatatcgctgctgaagcgctgctggatgagctggataaaaaacagcaatacatcaaactccgcgaccaggagaacgaggatattgcgctaacggtagggaagctgcgagttgagctggaagcagcaaaaaagcgtatagcagaaccggagaaaggtcaccaagaagccgctaagcaaatcaattcctggcgtcgactggcgaagcagaatatcgctgagcgtggaaaggatatttctgagctggaggctgcccgtcagcgcatagcagaactggaacacgccaacgccgcacaggacgatcacatcaatcagcagcaggtcagaatcgacgcactggaggagacaaaccacgaacttggaaaggcggcgagagttaatagctactggaaacctgatgtttgcccggttaccggacgccagttcttcatgtggattgagcatgaaacgcttggctatgtacctacatatggcgggccgttcgacagttacactatcccgaccagagatagcagcggtgaattttcttgcgagcgttacgaccatgatttcggcggttgggtgggaggggagttcattggcctttatctgattgatgatgacgaacaatgccgggtctgtgaacttgaggagcgcatagcagaactggaggcgcggacggtggtagtaaagcaattcgatgacttccaaattgtccactatggcgctactgaggattacgcgaaaggttatatcgactgccagagcaattataacaaagcaatccgcgccgctggcatcaaggttaagggggagtga

SEQ ID NO: 398753 - DNA, 396 bp, Salmonella enterica
atggaaattaagttggtcaaatactggaagattgagctattcgaacaatccaaatcggtaatttcaaatatgatgaatgaacccaaaaggccattcttcaccggctactctaaagagccaattaaaccgcataaacttcagggtggcgattttatttccctggctacatctcctgacttcatagagacaaaatctgttcggacgtatcgggttgatgaatttaaatgtacgccggtttatgagaacgacgacgcttttcaggaagcagctaaaccgctgattaaatggctggctgaaaatgttcatccacatcaccaggctattgtgaccagcacgcatgctgagttactggaaagtcagtatgtggtgaaaacagaagaattcctgaaggactag

SEQ ID NO: 398754 - DNA, 258 bp, Salmonella enterica
atgtatgatggcaaacgtgagcagataattaggcgggtttatacaccggaagaactgcgccagcaagtagaagcgaaaaaggtaaaactgctcgaagaggccgagacggttatcacaccactggcgcgggcggtaaaacggaacattgccacaggtgaagagattaaacaactggaagcatgggaactctacagcgttctggtcagtcgggtagacacctcaaatcctgactggccggtgaaaccagccagccagtag

SEQ ID NO: 398755 - DNA, 210 bp, Salmonella enterica
atgcccatttttaatagaagtacgtttgtaaatgctacggttatatcgttatataggatgacgacaggcgtcataagttcaaccagcgatatgctaaaaatagaccataaaaattatgtcgtctgcgagattaaattcgccgcgcctgccagaagtttttccgccagtacacattatccagcgatgaacgcatcacaccacgactggtag

SEQ ID NO: 398756 - DNA, 240 bp, Salmonella enterica
atgagcaacatcgacaaacaaattccagggtttaaaaacgtcggtcttgatgcgtttttcgcatatgtcggacctcgcgacatcattgtctgtaatcgcggcaactggaaagacaagagcaattaccagtcatttcagaccagaaacgggattgaggttggtcgtttctatgatattcccgacaataacagcgaaggtcaatatttattggctgaaaatttaacaggcggtgcagcatga

SEQ ID NO: 398757 - DNA, 999 bp, Salmonella enterica
atgaaagaagaacagcttttgtctgatgcgatagagaatctgccaaaaggattccatttgcagtatgaacatagcggtagacatggtaagcacgatgcctggggtaagctaacagggccggatggtgagtcagtgacatttgctctggaagtaaaatttatccaccgtaaagagtcactgatggctgttcgcgaacaaatggttcgctttcctgcgggttttcctgtgctgctggtgtgtaaccgcctgacgtctgcactggtggagtattgcgccgacagccagatcaactttatcgatacggcagggaatgcccgtatccaggtcccggggttgtatgtgcggatcgaaggccgctatgaaaagaaacccgtttccgccagcagtcgttttgctgaaggggtgatgaagcttctttttgttttgctgtctagcccagagaccctgaacgagacttatcgcagtttggccgggaaggcgggtatttctctgggaatggtcagcaaggcttttgattatctcgaagcgcaacgctatttccgcaaatcgcagaaggggcgtcgcttaatcaatgaaggcgagttagaggctttgtggctgaaagattatgctaccgctttgcgccctaagctggattcgctttctttatccgcgcctgtttcatgggatgagttgacgcttgcgtccggggaatactggagcggcgagattgcggcggcagagctgagcggaggatacctgataccagaaaatggcgtgatttttacaccccatccgttgttacaaaggcgaaaggaactgggactaaaacctgttccgggggggaaactacagctgatcgccggtttttgggggagctttgtcctgaaccgcagagccgaggcgatgctgtgcgtggctgaattgctggcaagcggcgatgacagaaactgggaaacggcaaggataatcaatgacaaatatcttcaccttaatgaatccgatctcttcagctactga

SEQ ID NO: 398758 - DNA, 810 bp, Salmonella enterica
atgacaaatatcttcaccttaatgaatccgatctcttcagctactgaaaagttactgagccagatcaaccgtatttgcaccgcgcaggggatcccgttttttattgcaggtgcaacggctcgtgaaattctgctccatcatatacacagcagaagtattggtcgccgaacccgtgatattgatattgccgtctttgtggatagctggccgagatttgatgcgcttaaaaatgctttccttgctgaaggggcagaagttgtccagggtaatgcccatcgtatgattgtcaaagggatcgagctagatattattccttttggtggtgttgctgaaggaaatcaaattgcctggccaccagaacgtgagatcatcatggctgtggatggatttgccgaagtcttttctcataccgtagttgtgcggctggataacagcgaaaatattccgttctgctccttgccaggactggctctgttaaaactttttgcatggcgtgatcgtgggcgtgggagtactaaagacgcgaccgatctctttaagattatctgtgaatatggtgttatcgagaatgaacgcatctatgaatcgcccgtcgaaggggaacgcctgaactgggatcccatacgtatgggcgcttttctgttgggaagcgatatagcgacaattagtgaacactcatccttgcaggatttactccatcttgataaagaacgcctgatcgatgtgatagtacgacaacatgacgtggatgatgccgggattgagcagatcatcaatgatttctgggatggtatggcaagtgatggttga

SEQ ID NO: 398759 - DNA, 285 bp, Salmonella enterica
atggctaaaaaaacggctcccttagttcccggtactaatcagttgcttgctgagtttggcgaacggcttaagctggcgcgactgcgacgtaagctcacagcaaagcgggttgctgagcgagccgggatgtcgccaatgaccttgcgttctcttgaatcaggcgggacgggcgtgacaatcggcgcttatttgtcagttatgcagattttgggtcttgaaaaggatctgaacaaacttgccgctgaggatgaacagagggacgccagcttcaggattcccggctaa

SEQ ID NO: 398760 - DNA, 252 bp, Salmonella enterica
atgaacgtaacctcacccaaaatgctggctcaggcaatcagggatgcacgcaagcaacgtaacctgacccagcgtgaaactgcagcatgtatgggcatgaaacagtcaacggtttcagagtttgagaaccatcctgaggggacccgcctggatacgctctttaagctgcttgccgctctggaccttaagcttcaggtcgtaagccggaggggtaaaaacaatttttctgatggctgggaccaggagtggtga

SEQ ID NO: 398761 - DNA, 1593 bp, Salmonella enterica
atgctgaagtggctaaaaaacaatttcaaccactcccaacctgcgccagacgctacgctgccggagggatggtttgcgccacaatccgcagcgccgttgctggcgacgccgttacgccagatctgcctgcgccagctacggcaactgacgccgctgccggatacactgttcgacagttggatcctcactgcgattaaccgtttcgccggattagcgcagcaactccccgcctcacagagccatcatcattccgctcctggcgggctactggaccattcgctggaggtcgcctgtaacgccatccgcctgcgccagggctatctgctgccgccggaagcgggcgcggaagaacaggcgcgacaggccggcgcatggacggtggcggtggtctgcgccgcattgctgcacgatgtgggaaaaatcgccgcagatatggagatccgcctgctcgatggctcacgctggcatccgtggcagggagtactggcgcaaccttatcgctggcgataccagagtcatagccgtgactaccatctgcatccggcggctggcgctttgctggtcactcaactattgccagcatcattgctggactggctggccggataccctgcggttttttcttccctgatttatcagcttaccggacaccatgaacgggccggcgcgctggctgaactggtgcagcaggcggataaagcctcggtcgccagacacctcggcggcgatatcaaaaccgcgctggcgcacaagccctcttccttcccccagcagcttctcaccgccttacgctcactggtacagaacgagtaccgactcaataatcccgaatgcggatccgatggctggttgacagaggatgcgctgtggctggtcagcaagactaccgccgatcgggcgcgcgcctggctgctgcaacatggcgtcaccggcgtgccggaaaacaataaccgcctgtttgatgaactgctggcgcatcggcttatcgttgccaacgaagataaagcgatttggcgttgtattatccgatcggataaaggttggtcacccgttgaaccgctgacgctgctgcgcctgacgccgtctgcaatctgggaacagggagaacaacgccccaccagttttgccggtgatgtcacaccggtaagtgaagcagaacttgcccctgaacttagcgcacccactcaaccgctgccggagatagcagacgacccaaggcttggtgacattaacaacttcctgcagtggctgaagaaccacaccagcccttcagccacggtgaatacccggaacggcaaggtacatgtggtggaaaaccatcttttcttgatttcaccggggatctttaagttatacgcatcagaaacaacaggtgataccggtgacggctggaaactggcacagcgaatgtttcaggagtcagggcttgccctgcgctgtaatgatgacagttttatctggacctgcgaggttcgcactccacaaaagaaaagtagtcagttgaaagggtttctgatggaagatacggggctggtgtttggggagaaagtaccggcgaatactccgtggctgaagttgacagtctcaaaatga

SEQ ID NO: 398762 - DNA, 1284 bp, Salmonella enterica
atgagtaataaaaaagaaggtccgcctaagctatcgtatgttcaattagggcaacttgctgatattactatggggcaatctcctgattcatccggttacaatactaaccaaaaagggcttccttttcttcagggatgtgcagagtttggacgtctatctccaattgcaaaggtatactgtaatcctccattacgaatttcaaggcctgagtccattttaataagtgttcgagctccggttggcacacagaattggggcgaagaaagctattgtattggaagaggactcagtgcgattaagggtaaacagggtattgctaacactaaattcctgagttatgccatttcagacaatataaattttttacatcgtcgtagtcagggttcaacttttttagcggttggtgcaaatgatctgcgagtttttccaattcctaattttgattttcattcacaagataaaataagcgtcattataggatcaattgataatgctattgagaagacagaggctttgatagagaaatatcagaaaataaaagatggtttgatgcacgatttactctatcgaggggttggtcatgatggtaagctgcgttcgtcttgtgagcgttcgcctgagttatatcaagaaacgccaatgggatggtttccaaaggattgggaattaaaaaaagtaaaagatgttttcaatattgattctggtattacacttggttctcatagaaggcccaaaaaaaatgctcggccttaccttcgtgtagcaaatgtctttaaagaagaaatttctctaaaagacgtttctcttttagaagcaactgacaatgaagcttttcgttatgctttgaagacatacgacttattagtcgttgagggacatgctaatattcaacaaataggccggtgtgcaattgtagataataatgctgaagggttactcttccagaatcatttgtttagattacaagctaaaactatctctccatattatggtatgtactacttaaactctgcaatagcaagaaaatactgggagatgaactgttcaacaagctctgggctaaataccataaatcgtacgatgttaggtaatatgcctttttttgtccctgccaaggctgagcaggcttcaatagaagaaaagttgaatggtatttctctgtttttaaaaaatgaaatagacgtattggggaaattacgagctcagaaaataggtttaatgaatgacctcctcactggtaaagtccaaatagagtcaaaagacacagaggcaacccatgtctga

SEQ ID NO: 398763 - DNA, 750 bp, Salmonella enterica
atggccaacgggggatttctggatgcgacgcgctggatggataaggtgccgccgttcgccagtcagcgatcagtatggcattttcatccgcttgagtttccggaaatattacgaagtgcagagtttcccaagactcctgttaatggggagttaactcctatagaatttattcacttctataatggagataaaattgatgatactgattatgaagaggctgcaaaagaattaggatgcgaagttgcagcaattaaagctgtagcaaaaactgaaaatggtccttatggctcctattttaaatttgaagataacgatgattatgttcctgcgatattatttgaaaggcatcactttcataaatatacaaatgggaagtatgatcagttcgaagatatatcaaatcctgttgcgggtggatatggtgcaacatcaatacagtatgcaaagctaatcaaagcgtatgctttagacaagaaagcagctttaaagtcagcatcttggggtaagtttcagattttggcgtcgaactacgccacatcaggctacgctagccctgaggatttcgtttttgcattaagtaagtctgagaaaaatcagttgaaagcattcgttagcttcattaaggctgatagagttttattgcgctccattcggactaaagattggctttcatttgctcaaagatataacggaccaaggcagaagggatatgatttgaaaatggagagaaattacaatgcatcattataa

SEQ ID NO: 398764 - DNA, 2340 bp, Salmonella enterica
atgccggtcacctatgccattattcccgacatggaaacgctaaaaagcagtgatatcatcggtgatagaattcatattctgatgcagcaaaaatcagagtattttacggataagatgtcaattcatttcggccgtaagagaaaaaatgcaattagtgtttttgatgtcaatggaaaaagttttactaaaacgaatacttttgcctggtcatatactaatactagcacaacatgctcggaaacgctgacgacatatgataatttaaaagcatcaacaacggttattcgctctgcttatacgggaaggatgcaatcctatacgaacagagcgggtaatcaggagaaattattctatgactcactagggcgtatcactagaattatatgtaatcctcaatcgaaatatgaaaacataaaagaatttacttataatttactcaaaaatgataatggcgagattacggaaatatctactcagataaagaatttaaacaccggtatgattgaggtttatttttttgatggcgcgggcagaatttattctgagtttaaaaatgctgctgacttcgatcaacctgatgcattttatgaagtaaaatctattaagtgggatgatcgtgggcgtaagcatagcgaaattaataaagattattccagagatgtacataaggagttgaacgaatactctgtcactacacaatatagctacgataattggggggggaattatttaacaactttatcttatggccgtcaggacattgatagccacgatcctgtacgtcgttgtgatattagtcagacaagatcagaaaatggtaaattagtgctggggtcaacgaaaactgaatatgatgtccagggaaatgctatcaggcaaattattcgcgataaaaacgatacggattatgctattactcggtctgagtacgatggtttagggcgccttcgtaaattcatcgatacatctggatatgttacggcgttaacctacgatgagtttgatcgcatgctgtctaagcgactgcctaataaagctctaattgagtggacctacgcttcatacactcctgaaaattatccagtcaccattgcgttaaatggtgtacaggtgggtagccaaacttatgatggcttaggacgtctgacggcaatatcctctggtgggcgtgtcagtagcgcgacctatactggggcaaatgacacgccagataccaccatggatgcgatgggccaaaggattactcatacgtggatccctgagcttcatagcgtacctgataccattgtgggccccgattttatgcaatccttctcctacgataatattacaggtgctttattggaaagttctgaaacgggaagtcgttcaacgcaattcaaatattatccctctggcctggctaaatcagagaaaataacagatagtgatataccgatggttgaaatggagcgatcatggtcattaatgggtatgactatgacttacagggatatctccaataatatcgttaatattgcttacgataattatggtcgctatttaactaaaactgacccagatgttacttctaccgtgcgctatgatgatgttggtagactgtattaccaaaaatctacaggctattcagatgaaattattattgagcttggactggatgatttcagccgtgaacatacccggaaaataacttcatcttccggcgaggtaatgaaaatcacccagaattattatccaaacaatcagttaaaaacgcgtgtaactgctgttggcttaaatgtaattcgtactgaaaattttgaatatgacgaatgtaatcgcctgatacattattactgtgaaggttcatctcctgtagtcgatgcgtataataatgctattgcgcaacaagatttcactttagatgattataataatattacctgctgtgttacgacgctagttggaggattgaaagataccgcaatatatgaatttacgaatccagacgatccttgccaacttatcacggtaacgcattcgttacatagccattatccagccagctataagctggagtatgaccataacggacgaatgacaaaagatgaagcgggtcggaccctacattatgatagtactggacgattagtccaggtattgagtgatgatgaggaaagttattatggctatgattcagctaataaaattataaagcaaatctctaatcagggtaaaaatactgcgctgtattatctggacgatggaataatcagcgaaatggatacgcattcaaataaacatacacgcttggtttctggcgccatgggaattattggcgttaatgacgacgctaaataa

SEQ ID NO: 398765 - DNA, 216 bp, Salmonella enterica
atgagcgcgaaaggtaactgctacgataatgcctgtgcggaaagcttcttccactcactgaaggtgcaatgtgtccacggtgagcactttgccagccgggaaataatgctaccgacggcatttaattatattgagtacgaatacaattggtggcgtcggcactgtgcctgcggcgggctcagcccggagcactttgaaaaccagaacctcgcttag

SEQ ID NO: 398766 - DNA, 234 bp, Salmonella enterica
atgaatatgacgaaaaaaggcgacaagcatctgcggactctttttattcatggtgcctgcgctgttgtcaggggtgccacgaataataatggtggctatctgaatcagtgggttaacccgttgaaagaacggagagggtttaataaaatgaccgtggcggtcgcgaataaaaacgcgagaataatctggtcaatgctgaacaatgatacggaatatcaggcaattgaaagttag

SEQ ID NO: 398767 - DNA, 150 bp, Salmonella enterica
atgcgtaaagcccgttttactgagcatcagctcatcgccgtgattaagtcggttgaagccggacgaactgttaaatatgtctgccggaaggccggtatctctgaagccaccgactatatctatggacgacctccattttgcaagcactga

SEQ ID NO: 398768 - DNA, 402 bp, Salmonella enterica
atgtttccaccccttcggcgctggctgcccgctgcgggtctggtgtggcgcagagccgcacccacacagcgtatccgcgatccgcacaaaaatgaaaaaatggccgttaccggtgctgcgctgaaacaatgccgtcaggagcatccggtgttttacgaagatgaagtggatattcatctcaacccgaaaatcggcaccgacaggcaggttcgcggacagcaaaaacgcgtggtaacgcccgtgcagaatgaaaaatattaccttgcgggagcgctgcacagtgatacagataaagtcagctatgtgggggagcagcaaaagctcagccctgtttatcagtctgttaaaacttctgaaatcgagttaccggcgggccagaagcattacattaatcgtcgataa

SEQ ID NO: 398769 - DNA, 501 bp, Salmonella enterica
atgatcacggaattcgtcaaagcatactggaaacagttgcttatcgtggcgatgcttgctgctctggttactggctgtcatgtcgcatgggttaaccatggtgaaactcagtacgcagccggatatgcgcaggcgcaggcagaccagaaacaggctgatgataaagccagagcacaacgtgatcaggagaaaacacaaattgaacgtgatgcgatatcccgcattgaagctgcgagggctgatgctgattttgctgctgcctcttctggccgcttgcagtcagaacttgacaagatcaagcgattcgccgaacactataccggaactttccccactggcacgccagccagcaaggtcatcggtgtgctcgccgacatgcttgaagaaagcaaccgaacttacgtcgcaacagcagaagaagctgagcgatatagggttgcaggtgagtcctgtgagcagcagtatgacgcactgaaaaaacggggtactgttaactggtga

SEQ ID NO: 398770 - DNA, 1950 bp, Salmonella enterica
atgaatcaaatgaagtacagacctgacatagatggtttgcgcacactggctgtgttgttggttatcctataccatgttggagtgcaggggataagtggtggttttgttggtgttgatgttttttttgtgatttctgggtatctaatcactggaatcatatatcctaaattgcaagacgggacatttagctatcaagatttttatctgaggagaataaaaagaatttacccaactctactgttagtagttgcggtgacattcattgcatcatacttcttcatgatgcaaacagattttaaagaattcataaatagtgctcttgcatcgttgctttctttaagcaatttctttttcatgttgaacactggtggttattttgatcagtctacagacaatctcccgcttttacacacatggtcattatctgttgaagagcagttttacattatttggccgataatattaaccatagcatttatatttaaaaagggaacagttatattcatagttttccttttgttatccattggatattctcaatacttaacattcaccaatccttcatttgcttactacatgataccatctagagcttttgaattgttaatcggtggtatatgctcaatttatctaaaaaatacatttcctacaatcaagatcaggtctttacttgcatcgttaggtgcaataatcattattgcttcatcattaatattgtcaaagcattcaaatttcccaggcttgaatgcgctgcctgtatgtattggaactgcaatgataataattgctggtaatggcaatatttatccaccagttaacaaaatccttagttttaagccgattgtttacatagggaaaatatcctatgccgcttacttgtggcattggccattaattgccttttataattataggggcctgcctctaacaccgttaaatcaattaaccattatcattaccacactattgttatcaagcataacatttcattttattgaaaataagtctaggtatctgaatttttcatttcaaaaaacagtcataatatttttcgttttacctgtcattgcgtttacaggaatcactattgcctcatataaaacagatggattcgcttaccgattcaaaggttacatcgatgaactgagcgctgaaaatgatcctagcaaaataagaagcgattgccatacaaactattataaaaacaattgggatatcaaaaaaataattccagagtgtaacattggtgatacatcaagacctgttgatggatacctatggggagactcttttgggaatgcaagtgcagggttctttgactcttacgggaaggctaacggacttaattttcaagaaagaacaataagctggaccccacctataccagcaacctcctttggtcgccctaacttcaaaaatgaatataaaaccagcacagcaagctttacctcttggatattcaatgaatctctaaaatataagtacgttgtattatctgcagactggagacaatatgacaaatgttctcgtgatgaaatcactggtatacctcatgaatgcgctctgtttgattccaatggtaacaacatcactagagactatagaaacagagttgaatccatgattaaagaatacatcaatcacggtgtgaatgtgataattttcaactctgttaatggcattgatttcaataaaataaaatcaggaaaaataagtggaaaagacatttccacaaaagaatacatgaaaaaagaggttataggagatgatgagtttattcattatcttgttaaaaaatacccacaaatcacttatattgatcctaacaatatcctctgcaaaaatggttcatgcacaggtcaaattaatggaaaaataatctatagagacggcggacacttaaactggtctggttcaaaggaacttggaagacttttcgttaaagagtaa

SEQ ID NO: 398771 - DNA, 2760 bp, Salmonella enterica
atgacggtttcaaccgaagttgaccacaatgactacactgggaacggggtcacgacatcattcccctataccttccgaatttttcataagtctgatctggtggtgcaggttgttgacctgagcgaaaacatcactgaattaacactggacactgattacacggtaactggtgctggcggatacactggcggaaatgttgttttgtcgtcgcctcttgccgacggttatcagatttcgatatcacgagagttgccggttacccaggaaacagatctccgaaatcagggtaagttcttcgcagaagtgcatgaggatgcttttgataaactgacgatgctgattcagcaggtacgcagttggttaagccttgctcttcgtaagccatcattcgtggcaaattattatgatgctcttggcaataatatccgtaacctgcgcgaccctgtcaggccgcaggatgcagctactaaaaattatgcagattcattaagcgcaggaaacacatcttatacagattctttgttcagcagaacgatccgcacaggagaaagcatcccgcaattaccacctgttgagttccgcaagaataaaattgttggtatggataatgacggtaacccgatcatgttgttaccggaatctggttctgcctctgatgttctgctggagctggcaaagcctactggtgccagttatatcggtactaagtacgggagtcttgacgaatacatagataatactccaagcctgttagcaacaaagtatatggatgaaactgagatggcagcactggagtcaggtgacttgtcagtaaaccatcagccaaaagtccaacaggtaatggatgaggcccataacaggaaatgctcagtgtatttcccgcctggtacatattgctttgataccgctgttaacgtctggtcttacgtccgttctatttggggtgacggtagtgcaattattactcgtaggtatcgcacgtattttgttgatggctcgacgatagatattgatccggcgcgtgatacacggaaattattccgattcctgagcggtgctgtaggtgctcagtcggtgcatgggttacaaattgatggtaatgcacgttcaattgaagttgctgcatcgggaaccagcagcactacaggaattccagaccaaacttattatggtgatattgaaccaggtggtacatctccttatgtacatggtcctgatggtaatattccagttgctggggagacatattataaccataacaaaaaaacgtcaggactggtcgtttttgatatggtttttaaagatgctcctggtagttgtgtagctggtaatgcgaggaatttgcgtgtttcatgtaactctttccttggttggtatgatcatgcagtctattgtgctggtcaggcgttttcggatctgggaaatggcatattaattggtgatattacggtcactgggaataccttcaggaacagaataaacactcgtggtaatggggccgttaaaggaaggtttggttttgaccgctatacagttactggcaatacatttgattgtatcgatggatgcatggctttcgatacaggatatgggatggttggtagtgtttatgctatgcagccatgggggcaaataacagtatctgggaatactgctacaacaagcagctattggatgatgatatacacgaacaggggtactgagtggtttgacacaggatgggttaatagtatagaaattacagggaatacagtccaatcacaggatagaatccttcttttaggaatatctggaaataatgattacattatgaattcttataatgtatccatatctgacaattatttttctgcgccgtcatttttaactttgtatacgcatgttataaactcagactggaagatagataacaatattattaatatcacaagcactggaatgataattggagtagatcaagatgaaatttcaaactcagtcctgcgtcttactaataacattatgggtaggttgctaacatcaggaaccgccaacttacatgttagtaattttgagcgtgtattcattcatgataatgaaataagaaattgctctttaagtttcgggagttatagtaaagagttatttattgatagaaatgactttagatggtcaacatctttaccatctacgccagtttttggggcaatgtggagtaactctggaggggggtatcaaaaagtatcattaacaaataacaatttcactggtgcatataatagattcaatattaaatgctcttctgattgtgttgtagaaatatcaggcaatcagttagggaccgtctcatcattttttcttgatttaagcgcaagcggttatactccaaagatacttcgagtaaatagaaatatactaaggggtggtaatgttattgctagtttgccatcaggtatatcccttggttcctccaatagtattatggagttaacttgcaacatgattacctcacaatcatttacatctcagggcgttgctacattattaagagacgatggaaacaaatcgtggttatctcactatcagaccattagatgtgtcagaaataattttataaatgcattggcatgtttgaaaattgatggtgctggttcgtcatcggtatccacatcaaataagttttggtttggcgaaaatcttaccgtaaactcaactttaacatgtaactatccagtcgttaataaagccaataccgatataattcagactcttagcgtttaa

SEQ ID NO: 398772 - DNA, 261 bp, Salmonella enterica
atgatgagcgtatcagtacaaatgcctcagtatcagtgccacaaaaaagtttgggccctgaaaatcaaacatgtgcatgtcaatcctgacggaacagggatcatcactccagaagaaaatggcttcggtaattttgatgttgaagttgattacatcaataaacactgtcctgttgctggcgggtactatgtgcagtatgaaggaggctatgaatcttacagcccggcagaagcatttgaatctggctatgcgcgcatttag

SEQ ID NO: 398773 - DNA, 348 bp, Salmonella enterica
atggttaaaatcaacagccacagtggttcaagcatcatcatcaacgggcatgagtacactggacgacaagttacagtcaataatggtagggttttcgttgatggggttgagcaaggaagcacacaaaacgaacaagtaatcataactataaacggtagcgtggaaagcgttgaagttgaaaatggttctgtaaatgttagcggaaatgctcatcaggtgaagactatgtctggtgatgttcgttgctcaagcgtatcgggaaacgtcaatacaatgtctggtgacgtgatttgcgacaccatcagtggcggagcaagcaccatgtctgggaatatcatcaaaaagtaa

SEQ ID NO: 398774 - DNA, 546 bp, Salmonella enterica
atggctgatgcagtgaaggtgattaatgaggtgctggaacaccgcaaggctaacagtgaataccataacatggctgaaatggagtatcaggcagagcaagcagagtgcgtatcaagatgcctggatgaactggatatacccaagaaagaaggtgaagaggatttatccctttggggtcgtgtatttatttatggggtcatcaatgctgatcaggccgttgagcatggtaaaaatcttcagcaactgcgcattgctggcaactctccggtaactccggatggttgggttgcttgtagtgagaggatgccagatgaatacgattttgatatatgggtcttttctctatctgaaggagttcaggacggggttcaatgggatggggatgtgtttgccgacgatgaatatcaattcaggataaaagatgccacacactggatgaaaaaaatatatccagaagcaccgcagcaggaggtgaagtcggcacttgaacatggaatgcagcgttactctggagctatgcaaaggctcgcagagggggataattga

SEQ ID NO: 398775 - DNA, 318 bp, Salmonella enterica
atgagcatcgtagacgattcgcatctgaccgacgaagcggttaacgctgctttcgaggggactaacttcgggcgtacagactttcgcacaatcctggctgaaacagtcatgaagcgtgctgctgggtatcactcaggatggaccgcaacgacaatttgcacgcgcctcgggctactcgggaagcaggaacgtccaactaagctcgggatgacgttcgctttccatcactactacaagccatgcgtacgtgaagcacttatgcctgacaacagcttggaaatctggaaaaaactcggagagcaggaggcagcccaatga

SEQ ID NO: 398776 - DNA, 1335 bp, Salmonella enterica
atgagcgacgcagcaatgattattgtgccaacagatattggccagaagattaaagaaatcgaaacttcttaccagcgttacgccgatgagttcagaatccctgaagaccacaaaatcatcgttaatttctctgctgggaaagacagcacgacgacagctattgtcgcacatcacctgttcggcgaccgcgcacaaaacgtaatggctgatacagacaacgaacatgaattaacaattgattatgctcgcaatattcatcaatacattggctgcaagccagtgcagatggtgaagcgtatttatacacaggaagaatttgatgctcgccgtttatccttaaccaaaaactggagcaagcgtcaggcgatacgcagcggtgcttatcgcggcgttataatgccgtcactggctcgttctgatactaattttggtaagtcgtggcaacgtactgccgaacggtggggagttgagtttgaaacccctctggaggcggctctttcagttctccatccaagcggaaacagctttctggatgctgcgttactgcatgggatgttccctatgctgcgcaaccgattctgtacagacgagttgaaaattcaggttgcattcgatttcgcggtcaaacctttgctggatgctggtgaagtcgttgtccagtggtccggcgttcgtggtgacgaatcagcaaagcgtgcgggatacgagcgcttctccaccgaccagagagaccctgaatttctctacaacttccttcctatccatcagtggacagcagcagatgtattcgccctccataaatatttcggcatatcaccaaaccctttgtatacccagggtgcctcccgcgttggctgcatgaactgtgttctgtgcaataaagaagaaatttcagaaaccgccgctcgctggccggagcacattgagaaacaccgccagtgggagcataaggtacgacttgtttctcgctgggttcactggatgagcgttggaactgagagccagtcatggatgcgctcacagcttgggttcagagagagcaactggagggaatttgccggattctccgaagatgaatcagcaccaggaatcatcgagcgcagcaggaaatacccagtaaacctcggtaaagaggtcctgctttatgggcttgaacctgatgttcaaaacatcgactggtcaggtttctatggtccgcgcggaaatatgggcgcgccgtcagtaccggaggtcgtagagtgggccaagacaggtcggggggggggggaaggtttacgacctggtgaaagcgagcatagacgcatcagtttgttcgtctcgttatggactctgtga

SEQ ID NO: 398777 - DNA, 207 bp, Salmonella enterica
atgaagcgaatcacccaacgtgaggctctcgatttgggccttactcgcttctacaccgggaagcaatgcatccacggtcatgatagcgagcgctacaccctgagcggtgagtgtgtgcagtgcaataacgaacgagcacgccgacagcagcaactgcgttcagagaaaatgaaactaaacaaattagccagggagacagctcaatga

SEQ ID NO: 398778 - DNA, 150 bp, Salmonella enterica
atgcagtggaaaatcatcaacggttggtactgcgttacagcttgcgggttgatgagctggaagttccgcacgctgggtgaagcaatgaactgggtattcgtcagcaagctggcggtaaaaacggaaatggatatgggggtgagcaagtga

SEQ ID NO: 398779 - DNA, 303 bp, Salmonella enterica
gtgaacacacaacagattaacaagctgaacaatatcgcggccatgttcagcaatgactaccagttgtcatctgaactgtatgaccgccacgttgagctgatcgatgcagtcagcctctccgacatggatgagacgttcgatcgttcgcttcttcgtgctggcgttcgacgtgaaattctggaagcggcaaaagaaagttgcgagttcgaagaactgatgtcgtcagtcaagcgtgagctaaccggcatcatcgccaggatggatatggctgacaaaatcgacagcgcgaggacagcggcatga

SEQ ID NO: 398780 - DNA, 252 bp, Salmonella enterica
atgaccatgttcaatgaggcggagttaatccgccaactggaagagcagcgcgctgtgattgtgcagcgggatagcgtgatccagcaacttcactctgaagttgctatgctcaccaaggcactgaaaagcgcgcaacaaaacatcttaccgtgtgaaaatcaacatctatggatttgcccatattgcggcgatatccacgatagcaggataggatgtaaagaaacagggagcgtaatatttatcaatcattaa

SEQ ID NO: 398781 - DNA, 165 bp, Salmonella enterica
atgatgccagttacccgttatttctgcattttcataaagcttggttttcaagaaacaataaatctggttgcagatacgctacaaaaatcgcaaaacagtgacaatattccggacaaagcgctgttcgttcgcaatattagaataatgatgtcaaagcgggtttga

SEQ ID NO: 398782 - DNA, 135 bp, Salmonella enterica
atgcaactggtgcgcgctgagcaacaggcaaaatatcagcaaaaccagcctgacaatcccacccccgaaaccgacccattgttgatcagccagcaggatatcgctgaccctggcccaaattcagtacagtgctaa

SEQ ID NO: 398783 - DNA, 510 bp, Salmonella enterica
gtggatccggatgactggggccgctttctgattgcggtatttgaggagtgggtaaacaacgatttaggccgcgttcaggtcaacctgtttgaaaccgcggtggcgcagaccatgggcatgccggcgcagatttgtatcacatcagagttctgcggcaaaggtctggcgattgaaaaaaacggcgacatcttctcctgcgatcactacgtctatcccgaatacaaattaggcaatgtgcaaagcactaagctggcccatatggccttttccgagcggcaaaaggcttttggtctgggtaaacgcgatacgctgcccgctgcctgcaaacgctgcccctacctgaaactctgttacggcgaatgcccgaaaaaccgcatcgtcagaagcgaggaaggtgaactggggatgaattatctctgtcccggtatcaaggccttttttagctatgcacagccgatgctggttggcatcgcgatgctgctgaaacgtcagacggtggaacctgcataa

SEQ ID NO: 398784 - DNA, 519 bp, Salmonella enterica
atgggacttgaatatttcgaaaagattgttgcgctgcaaaagaaatatcagaagccgggtcagcgcattgaaaacgatctgcagaccaacggtattctgatcaatgaccactgggcgtgcttcctgcgtcagcataatttcctggtcggcatttcgattgatggcccggctgagttgcacgatcgctatcgcgtcacccgtagcggaaaacctacctttgagaaagtgatggaaggtgtcgctgccctgaaacgacggcaggtcccgtttaacgccttagtcaccgtcaaccgcatcaatgcccgcttcccgctggaggtttaccgctttctgacccgcgagttgggtgccacctatatccagttcaacccctgcgttgaagccttcgattttaaacaaacggcaccgcagttctggcgggatgacaccataccggttcccgccgcgccagacctggcgaccttgactcaattgtcaccgactggtcggtggatccggatgactggggccgctttctga

SEQ ID NO: 398785 - DNA, 288 bp, Salmonella enterica
atgaagtacagcactactctgccggttaaaccgctcccgacagcggaaaagttcagtggcaaagggccggcttacacacgctgttttcatgtcatggcaaaacccactggatcgcgttgcaatattgactgtaactactgcttttacctgcacaaagaaaagcttctggaacaagacagacagagcgggatgagcgatgaggtgctggaaaccttcatccggcaatatattgacagccaggatggcgaacagatagtgttttcctggcagggggggaaccgaccctga

SEQ ID NO: 398786 - DNA, 1587 bp, Salmonella enterica
atgcaaaacagtttttcttttaaaatgacaatgcttgccagcatgcttacgctagcatctggtgtcgtttatgcaactccttcaatcaccaccgcaccagaaaacgccctcaaacaagacgcgtcgaaacccaatatagttgttatttttggtgacgatatcggctactggaaccttagtacttacaatcagggttcactcgggtataaaacgccgaatattgacagcattgcagatgaaggggctaagtttacttcttattatgcagaacagagttctactgctggccgttctgcctttattactggtcagatgccgttccgtaccggaatgagtaaagtcggcatgccaggcgcaccacaaggtcttaagaaagaagacccgacgttggcggatatccttaaacaattgggatatgccaccggtcagtttggtaaaaatcatcttggtgatcgcgacgagttccttcccaccgcgcatggcttcgatgagttcttcggtaatctttatcatttgaatgctgaagaagagccagagaacccggattacccgaaagacccgtctttccgcaaaaactttggcccacgcggtgtcattaaaagcactgctgacggcaaaattgaggataccggcccactcaatgtcaaacgtatggaaaccgtcgatgaagagacgctggcggctaacaacgacttcatggagcggcaggtcaaagccaataaaccgtttttcacctggtacaacaccacccgtatgcataacaagacccatatcaaaccggccgataaaggcgtgaccggtttaggtgactatgccgacggcatggtggagcacgacaaaatcgtcggtgaagtgctgaagaaaatcaaagatcttggcatagaagacaacacgattgtggtttacaccaccgataacggcccgatgaccgccacctggccagatgcgggcatcaccccgttccggggggagaaaaataccggttgggaaggcggtttccgcgtacctgcgatggtgaaatggccgggacatatcaagcctggcaccctgatcaacgacatcttcggcagtaatgactggttcccgaccctggtggcagcggcgggtgtgccggacatcaagcagcagttactgaaaggctacaaaaccagtgccatgacctacaaagtgcatcttgatggctataaccagcttgatttcatcaccggtaaaacccaggaggatccgcgcaaagagttcttctactggagtgatgatggcgatctgctggcgatgcgttacggacgctggaaagcacactttatgattcaggaacgttcggggctggatgtgtggaaatatccgttcgttaaactgcgtgtgccgttaatgtttgacctgaaaattgatcctctggaaaaaggcaccgatggcatggattacaaccactggttctacgatcgcctgttcctgctgggcggtgcgcagaaatatgccactgaaatgctgcagagcttcaaagagttcccgccacgtcagaagccgggctcattcaccgttgctgatgttacgaaactgattgaggaaggcagtccggctaccaactga

SEQ ID NO: 398787 - DNA, 417 bp, Salmonella enterica
atgttacaccggggcgaatgcgtcagcgatgtcgccagaacgctctgctgtgcccgctcaccagcagggcgctggattaactggtttacactgtcgggtattgaaggtctcgtctctttacctgcggggcgcggacgtcagtggccgtatgaacatatctgtgcgttgctgcgccaactggtaaaacactcgccgggcgatttgggttatcagcgttaccgctggggtacggaactgctggcaataaaaatcaatgagataaccggatgtcagttacatgccggaacactccgtcgctggctacctgcggccgggctggtgtggcgaagagccgctcccacactgcgtatccgcgacccgcataaagaagaaaaaatggcggcaatctataacgcgctggagaaatgcagcgcctaa

SEQ ID NO: 398788 - DNA, 243 bp, Salmonella enterica
atgtcccaacccttcgatttcgataaagcgcttaaggcactccagcccggtcaggcattaacgggcaaggatggtatcttaacgccattaatcaatcagttaactgaagctgtcctgtctgcggaacctgactctcatctggctcaggatattgacgctaatcgtaaaaatggttccggcaaaacttatcagtccggatttttaaatgaattatttactgagtactccagttacactcaataa

SEQ ID NO: 398789 - DNA, 159 bp, Salmonella enterica
gtgaaaaaaacatatatgctggacacctgcatctgctcgttcatcatgcgtgaacagccggaagcggtgctcaaacgccttgggcaggcggtactgcgcaatcaccgtatcgtggtggtcgcgggagcgccttccggtaaatatgaaaaccagccctga

SEQ ID NO: 398790 - DNA, 159 bp, Salmonella enterica
atgagaaccgtatccatttttaaaaacggcaataaccgcgccatccgtcttccccgtgacatggattttgagggggtgagcgagcaggaaaaggccaatccggactttatggcgaagcgtgaggacgttgtcaccgacgaagggcgatttgagctgtga

SEQ ID NO: 398791 - DNA, 642 bp, Salmonella enterica
atgggtataattgctaatgctcacccgaaaggcggtgcaggtaaaactacatcttcagttaacctagttggtgaaatgaaaacagatgctgtggatcttgacacacacactgggctttcaatcatcctggggttacgtccagatagtaaacaggtttctgtaaaggtaccgaatactgtcgaagagctgattgaaataatgacgccttataaaaatagcgataaagacctgtttatagattgtggggggttcgactctgatctaactcgtaccgcagtagcgttcgctgattgtgtcatcgttccatctaaggactctcttacagaacggattgggcttatgcactttgatgctgttctcgctgaaatcagttcaatcatggaaacaaatatcacagcacatctttacctgtgcaaagttaacccaaacaagaaaaacttcccgaaacttgaggcattactccctaccttcaagcacctgaagctaatgggcagccggatatctgctcgtgctgagtttgaagacgttattgaaagtggaatgggaataactgaaaccttgcatggacgcaccacaccgggtggcaaagaagtcatagctttagttaatgagattaagcaattgatggcgaataaacgttaa

SEQ ID NO: 398792 - DNA, 339 bp, Salmonella enterica
atgagcaaaaataagattaacgaacagactgagaaactcaaaaatttagtgggctcagctcggctgcaaacgtccacacaaattgctgcgaaaaatgatgcagctcacggtagtgacgaaattagcaacgaagctaagggttctgaaaagccgatccaggttacagaacgtcctgaaccggtgagaactaaggctaaaaatctcaaggccattcctgttacatattttgaggctcatgacgagctaaaagccacctgtaagacgtctctcgattttagctcatatattattgaagctatccgagaaaagcttgagagagatggtgctattgggagttga

SEQ ID NO: 398793 - DNA, 429 bp, Salmonella enterica
atgcttcgtctttattcggcggcatcaaccgctgagcctttttccgccccactgtttctggagcggtgccaggcaagttttccttcgccggcagcggactacacagaatctgaactggatctgaacgagtattgtattcagcgtcgcagttcaacttactttgtcagagccatcggcaactctatgcgggatatgggtctgcacagcggcgatctgctgattgtggacaaggcagaacgtcctcagcacggcgacatcgtgatcgcggaaattgacggagaattcacggtaaaaaagctgctgctgacgccacgaccggggatacaggcgatgaacccggcctaccctaccctttggccagatcccgataacctgcaaatatttggggtcgttacggcattcgtacacaagacacggggacgggactga

SEQ ID NO: 398794 - DNA, 972 bp, Salmonella enterica
atgattaacattttctgtgacgatggttccactaacgttaagcttgcctggtttgaaaacgatattctgaagacgtctgtttcacctaactcgtttcgccacggctggaaagtggatttcggcggtccggtattcaattacatggtctccggcctgaaatacacctgggatgcggtcagccgggaagcggtatcaaccacaaacgtggaataccagtacggcgatctcaatttactggcggtacatcacgcgttactgaactgtggcctgagcccgcaggatgtatcgctgacagtaacgctgccactgagtgagtattacgaccaggactgccagaaaaatgaggaaaatatcagccgcaaaaaggctaacctgatgcgcgatatttctctcaacaagggagtaacgtttacaatcaaagacgtcagtgttatgcctgagtcattgccggcggcgttctcccgcctggctaaaattaagcccggcccaggagagtcaacgttgatcattgacctcggaggaacaacgctggatgcgggggtgatcgtgggacaatttgaagatatcagcgccatccatgggaacccgaccattggggtatctgttgtcactcaggctgcgcagggagccctgcgtgctgcggaaagtgaaaccagtccgctgattgctgacagggtcattcgggaacgaaaagatcgtgcatttcttcacagcatcattaatgattcgaccagaattggatatgtcactgacaaaatagaagaggctatcggagcgctgggagccagagtggtgagtgaacttacacgcttccgtaacgtgaaccgtgttctgcttacgggcggtggtgctccgctcatcgaagaaagcgttcgtcgcgcctggccgcttgccgccgaccggatcgaggttatcaacgatcctcagctggcattggcgcgggagatagcgctcttcaaacacgaggactga

SEQ ID NO: 398795 - DNA, 645 bp, Salmonella enterica
gtgtctgccggaaatttctttctctacctgaatcatgatgatcatacggatatgcgtgccctggccactattcagtcagtgtcccgcccattacgcggagagtttattcgcgtcgcgtccgtggctggatctgttctttaccggattgatgtccgtctgccgccaatgttgggcgctatgtttgcaggcacaattacgccatcgcagtttgccggtatactggcattactgcggggaaccggagagactgatgtttcaggagagggaaaggtgtatccatggattccgggcagatataccggcacgtctcagcgccgtcggttgatactgcaactggaggatgatgtgtgcgccagcctggtactccctctgctggatgatgcttctgaccggcaacgtatgacacttctgcgcagtctgatgatcgcaggttgtgtacttcatgagctcgatcaacgatttcctcggttgctcgccagcatgccggagcctcctgccaccctggatgccctgcagcacctagctacgggattatttaaggagagggggctgagtatgcccctgcccggagaggtaaaaagtaccgggccggagtcctctcctgaaatcagcgtcgcgcgggcgaatatgaaaaaattattttaa

SEQ ID NO: 398796 - DNA, 342 bp, Salmonella enterica
atgaccgatctcagggagtatggtaagcaaatccgacaattcctcaagctggctcgggagctgcagacactgaatattgttgaggatttcgaaaataagacgctgactgaaatccgggaagtgttaacccggcgttcttctccggggacaggctataaagatgcgtatccacgccacggagcccggtgggaggaagaggaaaagcagcatctcatcgcgctggcagaggctggcatgctcgacgtggatcagtttgctgaggattaccagcgcaggcctgcgtcagtatttaaatacatgaaaaaaattgggttactgaataaaaactttaacgatttctga

SEQ ID NO: 398797 - DNA, 933 bp, Salmonella enterica
atgccaaactggtgttgtaaccggatgcgtttttctgctgtacctgagcaaacagcagctattaaggcactggctgagggtgctgtgacaccgttttatcgtcgggcgactgaagaggggattcagttattcgtggccggatgtgtcgggcttctgcaagtgacagaggaaattcagttcataccttatcctgcactgactgcaacaggaattggtgttttatcgccggaaaacctggcgtttactcgctggctgacccagttgcaggatggggtgcttctggatgagaaaaacagtcaggtacttcatgaaatctggctgcaaagcggtatcggcggtcgtcggtgggaaacgttgtccgacagtaccagaaatgagatttcgcgtctttatgcatacaaatgccatgactggtgcggaatatgggacaggaaagacgtggctgtatggtggacgcaactgtgtgataacccgttacccgcgcgaacgaatccgtttgacctgcttctggttctgccgtcccgacttgatgtggaaattaacggcttcaacggaaaactgctggatggcattccttcagcgtataactggtacctgtcgcaatacagaacaaagtggccggtggggtatgagctgaatatttgttctcagggcagtgactttatcgtgattgattttgataccccctggagcccggtcagcgaagaagttgtggctgaactcagcaagcgttatggctgtgaggtagagcactggtttgtggagcagggatgtaattactgcggttatgccaggtacgtcaagggcgaaacggaggtgtacatcacggacgagctggagtggggtaatgctgacccagatgatgaggacagcttccaggatataaccggccctgagtggattatcaacaatgtggcgcactttggcggctga

SEQ ID NO: 398798 - DNA, 351 bp, Salmonella enterica
gtgagtaatacagacattaatgatacctggcttgtcgggtttagtgcggaaatctccggggtggaaatggccactaatatgctgattcaggcgggcagcctggcaatggccgaagcggctgccctgtacatgggacgcacctggtggcagacgtgtctggaagagtatgaatgtcgctggctgtaccccggtggcgtggtctggtttaacaacatcattcacctcgatgatgtggaaaacagtattcttcgtggtctgaagtttcttgatgcgtgggcagtgaccggtgtgcctgatgcccctgtactgcgcgacgaatgggggaatgactggcgggatatcacccgctga

SEQ ID NO: 398799 - DNA, 222 bp, Salmonella enterica
atgaattacgtcggaaacgagaagttgcgggcggaggtggcgttgctgaccaacagcatgtgcgacctgcgcaccaccctgaaagtgctggaagatcgttatcactggcagcgtcacgggctcactgaacgactggccgggcagagtctgcggcgcatcaacaccctgctggatgaagcgttcaacgaaagcctgatgctcgatgagtgttttaaagactga

SEQ ID NO: 398800 - DNA, 411 bp, Salmonella enterica
atgatgtatggcactcgtaaggaacttaacaaaaaactgaaacgcgtgtttggcaacgacgagcgttttgccctgctggtctggacgaagcaggacgttatgtcactggctcaggggatgaccgaagtggaggccgatgcgattttgcgtgagattggcaaaaccggtttcggcgaccatgccgaagcgggcatttcataccgcacagtacaggagctgtacgccggattacgggaaatgccgagcgtcagtgttcccgccgacctgctggcaaggataacggacatcgccggacgggcgctggatacggaggacgctcaggcctggcctcttgtatgccgacagtaccccagcgttgccgatgctcaggccgatattgcccggctcaggcaacaggcgctggcagcataa

SEQ ID NO: 398801 - DNA, 621 bp, Salmonella enterica
atgagaaataacacgctcagtgcagatgaaatcctgactctggtgacgcatctttgccggtcccttaattatggacgggcgcaactactgacggccagtgcgcaacggctggcggggaggccagtccggttacatctttacccggtacaggtatatccgcaccctgccacggtacgtgaatgtaccgaaatccgccttccgtatgctcaggagtggctgattatggacgaatgcgcagacctgctggcgctcctgaaagattccactgaccgggtatgcgaaatcgtccgccaggatgcgcgacgtattgcggcggcgctggcgccgtctggcgagccccgtttgatggaaaaacaaatcgggaactggcggcttctggctgatgaatacgaccatgagaactggcttgatgcagacgacggggacgagctggataaggtgctggatgcggtactggtccgtaacgcacgtttctgcccggttctgctgacgctggttaatgagcaggaggaaggtattgaaggttgcggcgtgataacggactgtctgcggttgcccggctacgatggatgcacggcaccgcccggtgctgctgaacatgtcacagagagggattcataa

SEQ ID NO: 398802 - DNA, 501 bp, Salmonella enterica
atgtctgttattacacctgcggtatacgttggcacctggcacaaatacaacaccggcagcatcgccggtcgctggtttgatctcgtcacctttgatgacgaaggtgactttgtcgcggcctgtcgcactctccatcaggatgagaccgatccggaactgatgtttcaggattttgaaggtttccccgggaatatggcgtcggagtgccatattaactgggactatgttgaaggctttcgccaggcgcagggagaaggctgtgaggacgcgtataacatctgggtcgatgataccggcgagacggattttgacaccttccgcgatgcctggtggggggctgctgacagtgaagaggcgtttaccgttgaatttgtgaatgataccgggttactgactggcatttctgaagaaatagcgcgttattttgattatgaggcgtatgcgcgggatttattcctggacagctttacctttatcgatggccatgtgttccgtcggtga

SEQ ID NO: 398803 - DNA, 177 bp, Salmonella enterica
atgactattgctgaacgtcctgagcagaaaggtcgcgaggaaggacgtcaggagggcgctgctgaaaaagcacaggctattgcacgacagctccggaatatgggaatgacaccagagcagattgaacaggcaacagggctttccggtgctgaactgaaaaaattatttgctgactga

SEQ ID NO: 398804 - DNA, 849 bp, Salmonella enterica
atgaaacagactatgccagctacagatctgaatactgccagtacaacagaagttatcccgtccgtggcgattgaccgtatcatcgcgcagcgtaacgaaggtatagcgctttttatgcaggcaatagagtgcctggagtcttcgcgtaaaattctgcgggaggcatccggtcatgactttctttacggatttgaagacgccgtaactgacgttgttcgtcgtgctgacaagccggaggagaccagaaagaatatttctcgttttgccgaccgtaaaatctggcaccgcctgatgacggacactggtatgtatacgttcatgagctcatgccagtgtgatgagtggaacaaacagctgaagagtgaaacctgtcctgaaatcactctggacaatgtgctggcaacatttcgccatatgaatgccagaaaaatgcagacattcgagcaggggctgattgatgtataccgtaatctctcctgggattataaaacgaataatccctgtcgtcttggcaagagaatcattgtcagtaatctgctgtatcgctggagtgacggtcatgtatcgcttgaccacagtggtcgtgaaaaaattgatgatcttgcacgtccgttttatcttctggaagggcgaaacatacctgactttcgtcactccacaggtacgctatatagtgattttttaggcgccggtattaatgtcggtgaactgttcgacggagaatatttcacggtacggggcttcctcaaaggaacggtacatatcacctttaagtaccctgaccttgtcgaaaaactgaatgacatcattgccagacattatccaggtgcattgccgccacgtgtctga

SEQ ID NO: 398805 - DNA, 336 bp, Salmonella enterica
atggcagcaaaaaagttttattcagatgatgacattcagttggcgcgaacagctttatcagaacttcccgatctgacagcacagcgtaaaacacttcgcgattttcttgatgctatccgtgacgatattatcgccctggtaaaaacaaagggctatacgctggctgacattcgtaacacactgaaagaagcaggttatgaggtaggtgaaaaagcactgcgtgacattattcgggaagccgaagcgaagaaatcagtccgccgctcctccggtaagtcagataagaaaaaatcatcacaggacagaaaagatggcactgatacgaccgggctttaa

SEQ ID NO: 398806 - DNA, 333 bp, Salmonella enterica
gtgagtgataagcgagaaagaagtggtagtgaaaaacggcagaagaccctcctaagagcggtccggttttctcccgatgaagatgagatcataagaataaaagctgaagatgccgggcttactgtttctgcctacatacgaggtgcggccttgaacaaacgcgtaaattcccgaattgatgataagttcctgaaggaactcatgaggctgggaaggatgcaaaagcatctgtttgttgaagggaaaagaacgggtgacaaagagtatgccagtgtgcttgttgccatcactgaactgtctaatacagtgcgtaaacagttaatggaaaactaa

SEQ ID NO: 398807 - DNA, 2292 bp, Salmonella enterica
atgagtgaacatcgcgttaatcctgacctcatacatcgcacagcatggggaaacccgctctggaacgcgcttcagaacctcaacatatatggaatgtgtcttgcaggaagcctggtagtcagctttatctggccgcttgcattaccggcctgcctgctgttcacgctgataactgttctgatattcagcctgcaacggtggcgctgtccccttcgtatgcccatgacgctcaggtgcgcagatccctctcaggacaggatgatcaagcgaagtctctttgagttctggccaaccctgttccagtacgaaaccatcaaagagtttccggccaacgggatattctatgtgggctaccagcgaatccgggatatcggcagagaattatggctgaacattgacgatcttacccgccacgtcatgttttttgccgctacaggcggcggtaaaacagaaactatcttttcatggatcatcaaccctctttgttggggaagaggctttacgctcgttgacggtaaggctcaaaatgatacagcaagaacaatctggtatctgtccagacgttttggccgtgaagatgatgttgagatcatcaacttcatgaacgggggtaaatcacgcagcgaaatcattctgagcggcgataaatcccgcccccagtccaatacctggaaccccttctgctacagcaccgaagcattcactgctgaaacaatgcagtccatgctgccgcagaacgtgcagggcggagaatggcagtccagggcaatagccatgaataaggcacttgtgttcggaaccaagttctggtgtgtacgtgaaggcagaacgatgtccctgcagatgctgcgggaacatatgtctcttgaagggatggcaaaactctattgccggggtatcgacgaccagtggccggaagaggcaatcgcgccgttacgtaactacctgcaggacgtccccggctttgatatgtcactggtccggacgccatctgcttggacggaagaacccaggaagcagcatgcttatctttctggccagttttctgaaactttcagcacattcactgaggcttttggcgatatctttgcagaggactccggcgatattgacattcgtgacagcatacacagtgaccggattctgatggtgatgatccctgccctggatacgtctgcacataccacatcagcccttggacgcatgttcgttacccagcaaagtatgatcctggcccgtgacctgggataccgtctcgaaggttctgactctcaggcactggaggtgaaaaaatacaaaggacgtttcccgtacctgtgcttcctagacgaagttggcgcttattacactgaccgtattgcagttgaagccacccaggtccgctccctggacttcgcactcattctgatggcacaggatcaggagcgtatcgagggacaaacatcagccaccagtacggcaacactgatgcagaacacagggacgaaatttgccggcagggtcgtcagcgacgacaaaacggcaaggacgctgaaaaacgcggcaggagaagaagcgcgggccagaatgaacagcctgcaacgtcaggacggcgtgtttggagaggcctggattgacagcccacagataagtatcctgatggaaagtaaggtaaacgtccaggaactgataaagctgcatcccggcgagttcttttccatttttcagggagaatcgttcccctctgcatcattctatattcctgatgaggagaaaagctgtagcagtgatcctgtcgttattaaccgctatatcagcgtggatgcgccacgtctcgagcagcttcgccgtctggtcccccgcacggtacaacgccgtattccttcaccggaaaatgtcagcaccatcattggtgtactgacagcaaaaccttcccgtaaacggcgaaaaaaccgcacggaaccacatattatcgtggatactttccagcaacggatcgcaggccggcaggcagccatggcattacttgaagagtacgatacggatatcaacgcccgggaaatggcactgtgggaaactgcactgaacacccttaaaacaaccacacgggaacaacggcgaatccgcttcatcactctgaatcgtccggagacgccggcagcagatgaggagcatcaggtatcagtcagggcagagagagcagaaattaacctgttatctttgccaaaacaaaattgccgtccagcaggaccttctgcgaacggttcccatcataaaaataacagtcgtcatgaatggaaaggactgtactga

SEQ ID NO: 398808 - DNA, 1083 bp, Salmonella enterica
atgacaccccgttacagtgcaacccgtacagctaaaaatatcatcgtatatgcgcatcatgaagatggacgtcaggaagttctggccatcctgcaaattaaggatggcgtcagtatggtatctgacaaggaaaaacttttgctggtatctccggaatattcgtatcgggatacagagacatccctgttcgcgtgttcaggccacaatgtcagtgatattctcggcgctgtcgcggactgccttgtaaacgacaccagacgtcgtaagaaaaaactacgcggtattgcttactgtgctgtcagcctggcccttggagccctcatcgcgtcctgtgttttcctgacaagagtccctgttccgtttaatcaaccgtcggcttctgcaaccagccaggtgctaccggcacagaatcccgtggatgatgatattcaggcgtctgtttctgcgtcaagcaggtcgctgccggttactctggagagcattccacaagtaaataacaagtccggaaaaacggttttacagccagaggcaacaaaaaaagagacgccggaggccacgaaagcccgacaaaatctggctacggtgctgaaacgtaatgccgaccggggaatgttcactgtcaacttatcgtcaggtcatgaaaggacactgtatgcctttctcgatccccgctgtccgaactgccgggcactggagccggcactgaaacgactctctgccgactttaatgtggtggtctatccggtatctgtcataggtggcgataaatcagcctcccacatggcaccgttgctgtgtgaaaaggacccgcaaaagcgcgcagaaggatggcaccatctgtattcggcggatgccggcatgatggtaccgggaagtaccgaagcaatccctgatgaaacatgcctgaaagccgccagggcagccatcgacgtcaacaatctggctttccgccagtttggctttgccggcacaccatgggtgctgtccgatacaggctggcacctgccgacaggacttcttcaggagtccggcactgtaaagttattcctgaaaaccactgacagcgagtctggccatgagtga

SEQ ID NO: 398809 - DNA, 1209 bp, Salmonella enterica
gtgtcttacgttcgtcagcccgtaggggaagaccccttgcaagtctggggggctgttggagccctgtttatccttttccttgttgttgtctggttgtttttacccgaagtggtatacgccacctgcctgatactccacaccttatggggatttattgactggggaccatttcacgaatacgcagcaccccgatacaaccttctggccataacaggtaacaacgccaccaacatcagtttcagtcagtggcttaatgttatggatgagaccatcagtattctgtggatctttctgcttccgttaacagcatggtcactgtgggaatggtatcagcatccgggacaaagccgtttcacccgtaggcctgtcgatatcaccagattaccgcatatctttgcccccctgtccccggcgattactccggttatgactgatggtgatccccgaaagctcctccacggtggaaagcgacctgaacggagagtcgcgcttacaccagaagcttttgtcgaacaacatagcttaatcaccagtatgcagctcgatgttgcggcgacaagacaatgtttcatggcacaactgggtcacccactgacgtcatggagggacatggcaccacacgaaaaagccctctttgccatatttggacttcagtattttctggatgaccgcaaagcggcattaagtctcatggatgccctcaaccgctcctgccgtctcaaaagcaaacgggataacggaagattcagtactcccgtttattcgctggccagaacagcattcagcaaagtgatcaaaagcgagggcgcacaaaagtggctgaaacaacatcgctacgtccggagcggtctggtctggctttacgcacatgatctgcggcttacgcctcccaactggctgtggctgaaaggtgtggatcggacgttgttttacgcattacaccgcgccaataccacgaaaggctttattgagggtgccggtgtggtggcggtttcccgttcagaaaatgaagccatgcgttttggtcttccctgccctgagccctgcgttgatgaggcagtggaaggtctgcgacgggacatgctcggtctcggccttatctgggatgagccacagcccgaccgcgacagaagacgccgcatcctgaccaactggtccctcaccgacgacatactgtcccgtacacctgcaacagataacgaattttaa

SEQ ID NO: 398810 - DNA, 678 bp, Salmonella enterica
atgggtgtttatggagggtttattatacaaatggtaaaaacaaaagacagatttccgggatggtggccattatattacctactcaggattgcatatttttgtttaggcataccgtttttgttactttttattatatttggtatgttatcaatcacttcatctaaatatgtcacgcaagcagattacatttacacttacgtttgtctatttctgttaattgctccttgtctatggctatacactaaagccaaaaggaaaaaaaatactatccattatgttgtacaaaaaataaaagatactggttatttttccccggaaaaaggctttgaggggttctcattaatcaatagcacatatttcggcattgatatcagaaagggcactatattatatatcaggatttatccaaacaatatcatggatgtcattggccttgatatacataacttcacccgaacagtcactgaagacaaggaactgaagatatacacaaagtatgtgaacatgcctatgatacctgtaacgtcatggtgtacttcacccagcagcgctgcgaacactatgcatgctatggccgaaagaagttatgattacccggtagacttcccccggatgattcaggaaaagcgtaaagagtgggagaaggtggctggcatacccgttgcagaagtattttga

SEQ ID NO: 398811 - DNA, 2172 bp, Salmonella enterica
gtgaaaattatacttcgcgcactcagtgcaggcctcgccgtatctgcagtcccggcaatggcttcagtgacctatcaggatattgtgtccgcagccactaactctgacgatctgtcgcgtcaggcgctggtcacaatatttggtgatgtggtcacgaaccccctatcgaccagcagtcctaccctgatcggcaatatgttcggtgtatttaacggcattatttccgtacttgccgtagtctggtttgctttcatcggcatacggcatgttgtcagatccggacatcagggccaggtctttgatacaggacgtgacatcgttggcactctcagtgtcgtcagtggatttctgatgatcgtacctacaggaaatggctggagtctcgcccagcttatcatgctgtggggtgcatcaattatgggtgttggttccgccaatatcatggtgcagctggccgcagataatattgcaaacggttactctatgaccgtgcaaccagtccaggtctcaacacgcaccgccgcacgcggcatctttgaaatggaattgtgtaagtatgccattaattccgggctgaatgactttaaccaaacggccaggtcctccacttcgcttatgaccgaatcaagtaaaacggccggtggaaattacaccgttacggtatccaatggcagcggcatttgtggtactgccagcctgtctgttgaaggcaacggtacaactaatcagtcatccatcagtaagtttttcaaccccttcagcagtaccgaatataacagcgttatcgctgctcaacgtacagccatggataacatgattcgtgacatggacagtaccgctaacgagtttgtgacgactttcctggaaaaacgcaacaccggaaacggtacgttgcccgatatcgaaacccgcatacagcgggcagctgacgattacgagcgggcagtacaaaaagccctgcctgcagataacaacgaacaatccaggaaggaggctctgaaatcatatctgaccacttacgggtgggtggctttaggtgcctggtaccagacgtttgcgacagccaatcagcgtcttgccgaactggccgacagggcgccagcagtaacctcaatgtcatcgattggtgaagttggtgatactgatttttttgctgcagtgatgggagggtaccgggcacagttacaaaactccacatttactccaacgataggaactataaccactcaaaatgaaagtaatgctgccaatagcattgatcctcagagcgtaataatgaaaagtattgcgcctactatattaaaatggacgaaccaagttgctactgaatggtcaggaacaggaacaaccagcgaccaggttaatccattaattaagatgaagaatatcggtgattataccctaggaacaacagaggttctctgggccggatatacaacagtcagagttctcgcaacaatgggggataactcagttttcggtaaagccgctaattttttcactgggttaccaaaagggttagtggccctactggatgcttcagcacctccagtatatttcctgttgttcctgttgttttgtgcgggtttttcgttatcaatctatctgccctttataccttttattttctggatgaccggaataggtaactggattatcagcgtattaatcggatgtaccgcaggacctctttggggggctactcacctcggcacatctcaagacagaggaagtcgtgctgcctatggttatatttacctgattgatagcatgataaggccaccattaatggtgtttgggtttttctttgcatcagtagcagttgttgcgtcaggcactatattaaatgccttatttggcgcagccctagttaatgttcaagtaaactcctttacgggcgtatttagtcttgctggttttttactaatttacgcacggatttgcacaacaattgttgcagctatatttgcgttacaggcataccttcctgaccatgtaatcaattttctgggggggcgggatggtgcaaatactcttggaaaccttacatcatccgtgaaagatatttttgcaggttccaacaggaatattaggcatacccctggagttaaagaggacaggctaaaaaatgtcactcagggagataatagcaaggatggaataaaaggataa

SEQ ID NO: 398812 - DNA, 585 bp, Salmonella enterica
atgagtaaattacccggcgatacagaacaagaagcaactgtaaaaaaatcaccgtctatagcacgcctggctacgcgtggcgtggttaatattttcgttccggtaattgaaacccgctggattgctcgctcatgtcgccacatgttgagtcagcaaatacggcggattaaagaattaatccggagaacacacgaggagaccttcagtaacctgagctgggaagaagctgtacagacaagcggtctgccagttactgaactgaatcgctgtttccgtcggcgcagattattctggcgggcgcttttctggttattactggttcctgccgttttcttgtgtggtatggcgtttgcagcttcaacgctccccttaattacactactacggttaatcacaacgatcgtactgatgattacaggcgcagcgctttgcgcttcgaaagcactcatcacctcataccgtctgtggcagttgcatgagcgtaaagtcagtgaggcagaaaaagggactttcctggactttctgaatgatcgaaatggatggtgcaacgcttcatggatggcaattaccagtaaaaaatactga

SEQ ID NO: 398813 - DNA, 252 bp, Salmonella enterica
atgacagcaaaaattaaaaaccacacaacgtccctgcagaacgcaaaacacatcatgcatgagttatggatcatcggtatcaggatgccggctacaatcgccggtctcttcctgtttgtattgatactcaccctacacgatatggcaggattacgaaactggatggtgctttccctgctttgcctgattctgcgattcggacagtttattttctttcacttcaaaacccggaaaggcatcagaaatgagtaa

SEQ ID NO: 398814 - DNA, 1203 bp, Salmonella enterica
atgcacagaaaacatttacttgccgcgcttatcgcagccataagcggcgccacaattcaggcacaggcctacactgtcacagtagtggaaagtcgcccggtaaccacacaaattttgccagaaatggctgctattcagggagttctgggggaaatactggccatgcagacagccacaggaaccgccataaatcagaactctgaaaagctcgcaacggttatagcgcaggatggacaggcaacccgccaacagatgatatttggtaatgaaacacagcgtcttgaggacgccagacaaagctattccgtaccggactctatctgcagtgaatctgcatccgggatagcaacagagagtaaaaacgcctccatgtccacggcgtcaaagctaagtaagggcggcggtatcagtaatcgtaacattcgagagcgcctggctgttgctgctgcctcccctgcgcgcgaagcttatgacggtgcatcaatacacgccggttactgtactgaagcagaatatgcccgttttggtggtactgcggtttgtccttctgttggcgagctccccggtggcgacagccaggttcgctcggtctattacggggcaggaacggcagacacgccggcagcccttacatgggatcagaagcagatcgacgctgccactgcttacatgaaaaatactgcccgaccgtcagctggccgggcgttggggaaaggagaagtaaatacccaaagcggccgcacttacgttggtctccagaatgaatataacggcatcatagatgctgcatcgaacccccaactgtcgctgattgctgacagcgcaccgaatgaggcaacccggaaagcgctggcagaaacccttcagtcagattctgcggcagcttatttcgaccagatagcatcaaaggaagcaaaatcgcggggatatatgagcaccagggagtttgaatcctttgaagctggccgccgctacgcaaataccgcgtacctcactgacctgcaggaaatgcagggggataacctgttacgcgaactggtacgaaccacatctcaaatcaactggcagctgaacgatttgaaagagcagattcgccaggggaatgtgatcgccggtcagcaactggcacttacggcgcgccagtattatgaacagcggctgagtagcctggaaatgtccgttaaccagggaaatgccagatga

SEQ ID NO: 398815 - DNA, 630 bp, Salmonella enterica
atgtgtacaatccatatcacgccccgctgccgtcgaccagcaagaggacagatattcctgaaaaagctcaaagtggatggtgacagcttttcattctccctgccatcccggcacttcaggttaaatccagcccccagtcccagggtgatgtatgccactgatgcaagagcgcaggcgcaggaaaaggcatccggaatccgccttgttctgcccgagaaaacagaacgtctgatcacaacggccatctggcaggtcactatcccggatattccggagtttgacgctctgcatgtcattcagtggatactaccgtccccactggccccactgatgtctgataacacctggctatggccagccatacctggtgccccggctctgagcgccggagactggcccgtaatggataccgatccgtcaaccctgagacgggtcagacgtcgctcattcagcgttatcgataccagaaacaggaagggctacatcacccgacggttccagtgtttccctctcgccccccttcctccggaaggaaactacgacagcattcctgattttgttatcgatccaggacaggagaaaacaagatgcacagaaaacatttacttgccgcgcttatcgcagccataa

SEQ ID NO: 398816 - DNA, 3045 bp, Salmonella enterica
atgaacattaaccgactcatcttcgcgatagaagactgcataaacacgttatcccgtttttccgtcgcgaccagttttgtggactattgtgatttacgcaccgtaatcggtctggataaacaggatcatgaacgacgcccatggcttgaggctccctatattgctgttacaaagcgtggtgaatatctctccgtctttgaagtcagcggcgccttcagggaaatggatgaagatcctggccagacagaaagtggcacactggaatggctgattgccaacctgagtgacagcctcaatacggcatataaaaacagtggtcataaaatcagttttgtttttgagcgtgatcctgaacgcggaaaggacgagattgttgatatgatcgccccccagaagcgttcacttgccaacaccggtattcagttacaggatgtactggatgagaaaatagcaacgctttccccctggcttgtcagggaacgttgttggctggctatctggagcgcaccagaccttgtcagtaacggcgatcgctccgcccatgatgaacatatcaggaagttggcagaacgtgttccgaaatccagatttgcccagtcaccatggcaatggacattatcggccctgaaaatccgccatgatgcctttctggataacgtggagcaggctctgagacattcatctgatggcctgcttctcaggctgatggatatacacgaagtcggacaggaaatacgcagggaaacagagcgggacagcacaccacgtaactggcaaccacatctgcccgaagacgcacaaccagcaggatatcgctggggagatgatgactccatactccacgccccttcattacatctgcagttattcagtacccagcctgaaacaatgggcaacctggtacgcgcaggcggactctggcacggaatggtcgccgtcacgcttgcaccgcaaaatctgcaaacttttaacaaactggttcatgctgtcccccgcgccgtcccctggcgtatccggatggatctgatgcccggagggatgaaagcccttggactgaagaaaactattctgacttacagtagttttatcagtgccgttcgcccgatgtacgactccgtgatggccctgtccgcaacagacgaaaaagaccccgtctgtattatgaccatcgttgcttccacatggggcaaaacacgtgaactctgcgcacgaaaccaggctatcctcaaatcagccatagagggctggggcgtatgcggtaccacgactacgtttggcgatccccggcgtgcctgggtaaataccattcttggtgcatcagcaggttctggttccgttccactgtatcctcctttatcacatgcgctctcacttttccccctgaaccgggcaggtacggtctggcgtggaaaaggaaacctgatgctgcatacagaagatggtgccgcgtttgaagtgggtctggcatcatcccaacaaaacaaacatacagaactggcgccgggtgatcccggtctgggtaaatcagttctcatcaatacgttgtcagaaatacaggtatcgtccgcgcagaaaaacctgcccttcattgcgtatattgataagggatacagcgctcaggggctcgttcagcttattcgcgacagcctgcccgaggaaagaaaggacgaagctgttggtatcatcctgagtaacgatccggaatacaccagaaacctgtttgatgtaatgtacggggctaaaaagcccattacaccagaaaagaacttcatgtcttctgttctgtgcgccctctgcatcgataccagcacaggacaaccctgtaaccccggagatacccgacagatcatcagccagttaattgatctggcctttaaggaatatggtgaaaataatcccagattatatcgcgccgcaaccgaggaactggtggacacagcacttcaggactctggtctgtctgaaaaatatgatactgaatggtgggcaacagccacctggtttgaagtccgcgatatgctgcacaatgccggttttattgcagcagctcagagggcacattatcaggctatgccccagttgtcagaaatgtccgccttgctgggcaatcccggtataagagatatttttgcggctgttcagcgtaatggctcctctgaacctcttctggattatatccgacgttctcttgatcaagggcataacgactaccccatgatgtccgggcatacccgattcatgctgaatccggaaacaaggattgtcgctgtcgatctgaacaatgttgcaggtgacaagacaccggcaggcagactgaaaaccggcattatgtatctgcttgcaggacagattgctggcggtgattttaccctaccgcaatataaagatgaggtgctgaaaaatctcccacgaacataccatgatatcgcgcttaaacgtattaaccagcttgatcaggaagttaaaactaaagtttatgatgaactgcataattcgagaggtattgacttcatctgggatggtctggatacacaggaacgtgaacaacgtaaatttggtatccgcactgtattaagtacgcaatatcttaaagattacccggaaagtattctcaaatcagcgaacacactctggctgttgcgttaccggccggaggacattccgtttctgaaggataacttcaacgtgcctgaattcatgctcaggcgcttcctgaaaatgccggaggggcctgcgccagatggcagcggtgttcctgtactgggagtattcagggttaaaggcggtacgctcgcgcgcatactgaaatttaccgtcggtcctcatgaattatgggcgctgaattcctcactgaaagacagtgcattacgcaaaatactgaccagaacgttaggctctgttcgcgcacgcaaaatactggctgagaacttccgacaaggctcggcaacatcgtacatagagcacagggcagaacaacataacagtgacaacgtcattgaagaactggccactgagctcatcagacaacagggatacaacctctga

SEQ ID NO: 398817 - DNA, 801 bp, Salmonella enterica
atgccacaaaacattaaggacttatggttattcccgtttccggtccccgacgtggtacatacccaggaaccactgttacaggccccggagttaacaacaccaggacgctgtacctgctgccgtcagaccgtcaaacaccgcttccggctggatgaatcctggcctctaagacagctttccgacaacatcctcgatgtgactgcccggttgcacaaaacaacagaaaatctggagcgtttactgaaacgcggagaacccgtcacaaaagatgaaaaagagaaatacctgactgcactgatagcagcggaacggtcgctggagcaggcacaactctctgccagaaggcttgctcttcgtcacgtacccaaagctgaaatcacccgtaccgataaactgtcggaagatgaactgaacctgttgcatgaaaccagcgccccctatgaactgtgtgcattctgtcatgcctggcatgctctgaatggttatgccgctgcacagggagtaatagtctggttaccagatctccatccttcaactgtcgttgccctgaaccgccgggcattacaggaaattttcagtggtgataaaactcgtgtgcggcagggtcgtgaaatactgaccgcacttatgcaaaacaggctggctgttgaagataaatttcgtagcttccggccagcagactttgcagatgctcttcgccgttatcccccttcccggcgttccccactcagggaaaaaatgaacggaattgcgctgattctgacaccggattcatttccggaaaaagcctttgttgattga

SEQ ID NO: 398818 - DNA, 189 bp, Salmonella enterica
atgcataccaagaatctggataatttcacattattgcgaactgaaaacggtaacgttattgcccgagacaatcgggacaatcaggagtttgtctttgcagagtgttactcccgtgaaatcgcttcagtcattatggaggctgttaagcgctactgcagcgcggagataccccatgccacaaaacattaa

SEQ ID NO: 398819 - DNA, 405 bp, Salmonella enterica
atgtcacgtcttcgtgtcatgatggcgcgtgtctgcaccgcttttatttacgtacaaatctttctgatgaactgccgcgacaaaattatcagtctgttactgcttcttcctgcaatgctgttaccccgtactgttatggctgatggtgatcttgttgacatgatcagaaatgtgggggatggagcaaaaggcgccacaggttccaccctgaacattgctcagcttatcggtgttgtgatgttcattggtggcctgcttggattcaaaaaagtgggtaagcagaatggacttggtctcgccggctgcatagtgtccgtcatcattggagcgatacttgctgtcgtccctgaagtgatgaaccgttcacagcgtcagttgggcatatctccgaccacgataaattaa

SEQ ID NO: 398820 - DNA, 528 bp, Salmonella enterica
atgaatacagatgccctgaccgcgatagaacactttgccaatggcatcttcagtgccggaatggattttttgttcacatggggtgagtttctgggggttattggtttaattgcacatctggccagatcccgggttgacggtcctgcccggatgactcctagcaaatttgttggagggctttttacctgcgccatgatggtctcactcccgtccattattaatgctggcgggattcagatggggtttcatgccgattctttcggccctatcgcttacgttcaacctcagtcatttggtgccgctgcaggtgcggctaacgctgtattgtcactggcaaagctggctggcgttggattcgtaatgagtggcatttcaatctggcgtaaagccggacttgacggacatacatcactgagcgccagcgaaaccatcagcaaaggaaacgttaagtttatcgccggtgttctgctggtttttattgatcgtgtacttgatgccctcctggccagtattggccttgccttctga

SEQ ID NO: 398821 - DNA, 714 bp, Salmonella enterica
atgagatctgaaacagagcatgatgaaacaggcagcttcggcgaaacagatgaggtacggcttcccgtctggaaacgtccggtatggggaataagcccgacaatgtgggggttctgtgcaattcttcttctggccgctatctggtatttgtttctgaatacgcccacagccggtcagcagtcagacccgccgtttaatgatatgaataacaacatgcagacgtggcagtcccctgcttcttccacttcccctgtcatggcaacagacctcccgcaaccaccggcttctgccagtgatatgaatcagcttgcccgggatctgaaaacggaactggataatcgtgacgaaaaaatccagggaacgctgaatatgctccgggacagtataaacaaactcagtgaggctataaaaaaagacgaagactatgcgcaggaaacgcggcatcagctggatgagatccgtacccggctgaacggcgtgataaaccagaaaaccacggcagagacggccagcgtttcacattcccctgtaaaaaaagcaccttctccggttgcggcaatgaaaattatgtccatggaaaacggcatggcatggattcgctggcagggaagtacatgggctgtacgcgaaggtgacaaacttgggaaagtcatcatcacacgaattgacccaggctcccgaaccattatcacctccggcgggacattacgctga

SEQ ID NO: 398822 - DNA, 1302 bp, Salmonella enterica
atgagtgctgaacaggatgccggtaaatccggcaagaaactctttgccctgtcgggactgggtgccatcgttttgtttggcggtggctattttgccctgtcctggttaacgcagagtgacagcgacgtgcagtctgccgtgaacattaacagcacaatgaacggcggtggacgtcatgtgacagaaacaccacattatcgtgaattattacaggctgataatgaacgtggcgctgcagctgcaatccgtaataatcagactttcattgccagccttccgcaggggcttgatgtaccggacacatcagaaaaacatcagccacctgcgcgcgaacctgaaaaaaacagacaacaaccgccagacagacctgcaccggaagatcgcgctgccggagaaaaacgtgttgagcgcctacagaaactgattgccagaataaatgcgcagcaatccgccggtaatgcccctaccacagcagcggcaatgtggaacagaccacctgcagaaacggcggaacaaagtggcagacaacgattcggattacagaatgccagccgatcaaggtctgttgctgaccaaggcatacagctgataccggcgttaacccgcgtacctgcctatatcatcacagccgtggattctgataatccgtcatccaaggttattgcctccattccgtccggccagtgggctggcgccgtactgtacagtccgggcgtaaaactggctggagatggtgttgagatccatttcaaccgaatgagctggaatggcatgaatctgaagatcaatgcgtatgcacagcgggaggataacctgatgtcatctgttgccaccagtgtaaacaatcgctggtttaaacatattgttttgccgtcaattctggggggactggggggagtaggtacactttacaaggatgccaacacacaggttattcagggaaattatggcagtgtcactggccgtgttgggatgccggacggtaaagcggttaccggcgtcatcgccggtggtatggccgagaaaggaagtcaaatcctgacccgtcaggcagaaagtgaaccttataaacaggtgacagtgtcacaacacgaagtggtttcagttttgtttgttgatccggtcatgagtaacagcatccagtctgatgcaacgggtactccttcccttcagccagacacacgtcctgccacactggcggaagcagagcaacaaacccggcacaggctggaagcagcaatagaacgcagaagagcagaaatgcagcgccgttatgatgaaccacaggagattccacaatga

SEQ ID NO: 398823 - DNA, 984 bp, Salmonella enterica
atgcgatcacgccatattcttagcgcactgttccttgtgtgcggcactgccgcatctgcagataatgccgggtggcagaacgcccgtactccccccccggataagaccaccgccagcgaaaatgcgccaccggtggcgaataccggcggtgttcctgccacactggtcaggggagagcttcctgctcccggacaaaccagcccactggttcaggaagcagccaggctggactctgaactgtcagcggatgagatccgggagttacgcagcctgatggctgacaatgaaagagccatcagcgccccggtgacaagtatcgtcccccgcatcagttcgctgacggttaacctgtcgccgggagccagtcttccgctggttcgtacagccatgaataacctgagtgtggtgacatttaccgacattaacggttctccatggccgcaatcagacccaccctataatgcggcgccaaaactctttgatgtgcagtacaacgggaatatggtcacagtcacgccactgcgcccgtgggcatcaggaaacatatcaatctatctgaaaggcctgtcggtcccggtcattctgaacgtaaccagtggcgagacagatacacaggtcgccagccaggaaacggacagccgtcttgatctgcgtataccacgacagggaccgaccagcccggtggtaaacgttccggcagataaaatagctctgcatgatgccacactacaggcatttctggatggtgtacctccccgagatccgtcagtaagaaggcttaaattcaccggcaacgtcccgggtacgacaatctggcaacatggtgatgatcttctggttcgctcccgtgcgatgttacgggatgaatttgagcagacactatcctctgcggacggtacacatctctggaagcttcccgtcaccccactactgactttctctgtgaatggccagtctgttcacgtgacaccagatctggagtaa

SEQ ID NO: 398824 - DNA, 693 bp, Salmonella enterica
atgagcgcagaaaatcaatctcctccggtcccgcaacctcaagagcctgatcaggctgcactgatgaataccatcagaatcatgaagcaggcagagcaacgtgccaacctggtacccgggctgctgaaagcgctgttatgtacaggtacagcgctgcttatcagccttgccggcaatggtgtacagtacttgcgttccacgaacgtggaacgtgaatactttgcaacagataacggacgtctggtgcgtctggcaccgacaagccagccaggatggagccagaatgacgtaatgtcttttggcagcgaaaccctgagcatggcttttaatctggactttgttcattaccgctcacagatatctgcgttggcccctcgtttttcagatgaaggatttgccggatacgtgaatgcgttacaggcatctaatattcttgacacgatcaagaaagagaaaatgaacctgacagccactatcggcgtcggtgtactgatccgccagggacaactgaacaacggcgtctggttctggacttttcagtatcctgtaaaaatgcgcctggttggccagactgtcagtaaaccggaacagtccttcatttttgaaatgactatccagcgagttgacccccgcctgaaaccttccggtatggaaatcagacagatgatctcccgtaacgccggttcgaactga

SEQ ID NO: 398825 - DNA, 291 bp, Salmonella enterica
gtgaaaagagaaggcttctggcggtatgccacgccgcccataaacatacagggggttcccctgccgtttaccatgatttatctgttgatcttcccattcccagccaaaacaaccttctggatttgcaccggcattattttatttttcatcattcttgatcgttctggctggtccgttcgtactctctgcacccgtctgttctgcatcctgagaggtgctgtagcttccggtcgtccatggtggtaccggcattttacagaatcaccgagagactggaccgggtttaaataa

SEQ ID NO: 398826 - DNA, 1143 bp, Salmonella enterica
atgcctgatgaattcgggactttcccgttctcgcggttctccgccgatgagttccgccatttctatgcctggtgcgccttccaccgtgtcagtgacatcgatttgaccggcggttcccctgtttctgtcagtcggtttggacgcagggctcgttgttcgttacatacattgccatcatctctgatgatgccactcattgatgagctgtttggtcgtgaagtcctcccccgggtattatcaggtaatcctgccgaccggactatccagataaacggagatgcttccggtcgctatggccttaaacgtggtgagcgcgtccggttacgctcccatctcatccagggaacatccggggcggaagaaaaggccatatcgataacaatgcgggtaataccgacagcaataccggatatccggaccatgaatattgaaccggatctccttgcagcgatggtcagtaagaacggtctggggtttgtctgtggcgaaaccggctccgggaaatccacgctgtgcgcagcgctgtaccgttatatcatggataacttccccgaccgtaaaatcgtgacatacgaagatccagttgaatacatccttggccgcgaaggcgatctgcttccaccacaccaggctgaaataggtcgtgacgttgtcagctttgctgcaggacttcgttctgccgtgagacgtaatcctgaaattatcggtgttggtgagatcagggacaacgaaaccgcagatgctgcggtacaggccggaaatacaggacatttatgcctcagtaccatgcatacgaaatcgccgggggaaactttatcccgcctcctcggtctgtttccttccatcattcgtgacgcaatggcctggtctgttctgtcgctgctgcaattcattctggttcaggtactggtcagaacaaatgacggtggtcgtcgcgctgtccgggaatacattgtcattgacgatgagctacgcaataagctcaccagaatgccgcattctgagtggggttatcacatagatgagatcatccggaccgagaaacgacgtatccgggattatgtactggaaatgtatatcaaaggggaaattgaccgcagcgaggcagttattttcattcctccaggagaaatgcgccagtga

SEQ ID NO: 398827 - DNA, 834 bp, Salmonella enterica
atgaaagtgctcattcctctcatgctgccggcaattttactgaccggatgcgtcgcaaacactgtggtatccccgcagaacgtcaatgctccaccgccagatataaatgcctggctgaatccgatgaatgaaaaacccgaaggtatatcggaaacccgctggaaaatgttgactgatgcaggaagaacactgggattcaggggaggtaaagcccgacgctcatgggaattgattcaggctctgaactcccgtgaaagcactctcaatgctttatacgattttcgtccccttataagccctgaaggatggcttcctcccgtcatcgacgaagcacaggatgtcgcacatatcacaccagatcaaattcgaacatcgtctcatgtctggacaattattagacctgaacgctttgtcagtaacccaccgggatggcgtgactggctacttaaagggttgtccacaacagccacccccggaacagaaggcagcgttgtcccggaagacagaacccaacgtaaagtctgggaaatggcattgcggcaaggctggcaggaaggacgacagaatgctgacctgacactggaggcgaaccagaaacgccttacacgtgacttcaggggaatgatgctgtactcactgctctggagacagggcatgattacccgaccagatgtgaccgatcagctgcagacaattaccggtaacggacaaaaactggtgacgggtgatcgcgtccgccgtctgaaaaatcacgccgaatttaacctgcagaaatcgcactggcgtcccctcatcacaaccgaaaggacaaataaaaatgcgcagacaccatag

SEQ ID NO: 398828 - DNA, 456 bp, Salmonella enterica
atgaaccgtattatacctgcggtgtgtcttgtcgcctttctgctggctggctgcaataccttccccgaagccacatcccatagccgtaattatggcgctgcctctgaagttgctgttactcgccataaacaatacagtctacaggatcagggagtattctccggtcagttaacttcagcaccgacaacactactcacggccaacagtgaccgtttatcattcgactgggagggcgatgctattgagctgctgaatgagctggccagaattcgtggcatgcagtttaactatagcggcgttcgcctgccgttgccggtaaaccttcatgtcagggatatgacattctcaaatgccctgcggctgataaaagcccagacagcctggagagcaaacattcatcagtatccggggcttttgcaggtcagttttatgccgccggagacacgaaaaaaatga

SEQ ID NO: 398829 - DNA, 1203 bp, Salmonella enterica
atgatgaagaaaaatcaaattacccgcacactgattgcatcagctgtattatttgcctttaatgcatctgctgctacttcatattttgaagctcgaaacgatgcaatgggaggaacgggtgttgcatcatcccattatggtgtagctcctttggcaaacccggcacttctgacaaagcatgacagcagcgatgatttcagcctgcttttgccatccgtcggagcacaactttccgatccagatgatatttcaaacaaagcggacgatattaaagctgactgggacgcttttgatcgtgctgtagacagcaattacggcgtgaagcaggctgccgggaatctcaagcgtcgcctgcaggagtttcggaatatccacgctgatgcccaggcaggtgtttcagctgtagccgccatgcctaatgacacgttgccgttcgctctcatgatcaaatcatatggcactgcaaatgtggatggaaaggtcagcgacgccgatctggactatctggaaaaagtcgccaacggcacaatcacgaatgttgataaaaacgccctgacttcccgcgcatatggtcgtgctgccgtcatctctgatatcggaatctccttcgctaaggagctggaaaccgcaggacagaaatggtcccttggcctcacacccaaataccagcgcgtggatctatttaactacaatgtcacggttcaggactacgataaaaatgactttgacagtgaccagtaccacagtaccaaaaacggatttaacgcggatatcggcgcatataccgaccttaattcaaactggacagttggtctggttgtccagaacatcgtgccacgcagcattgattccaaagaggtgaatggtgtaactgaaacctttaaaatccgtccgcaggccactactggtgtgtcctggcacaacagtcttttcactaccgcactggacgtggatctgacccccgccagtggatttacctccgacaataaacgccagtttgccagcgtaggcgccgagtttaatgcctggaaatgggctcaactacgtgccggttatcgtcagaatatggcatcagacagtggcagcgcatttactgcaggtgtgggtatttctccgtttgatgttgttcatttagatgtctctggcctgattggtaccgatcatgattacggggccatcgctcagctacagtttacattctga

SEQ ID NO: 398830 - DNA, 615 bp, Salmonella enterica
atgaaattaaacaaaaccggcatcggtgcccggctgataaactccctggaccggaaggcgattggtgaacggcttatcaacgcgtgccagatacagtctaccccgctacaggtacgttatccacaaggagtcagggaagtgctgggaataatgagcgagcagctttccatatcaacttcagatttaacccgaatactggtagaagatgcgctgcgcgaaatgttcctgcctgctggtaatgccaccggcaacattattgacagggtagagcatattatgcagctgcatgatatcactgctccggttctggcagccttgcttgcgccgtggaatatcagacccggcgtcattcaggacccggcgaggctggccgactatttgtcggcggacgcactgcataatctggccgactggtttcacgtcaatccggactggctcgacggcagagagaatttcccggtttcatgtgcgggagaatggccggcaacaattgatgagtttaaaatgctagtcaatacagaaaaaatactgacattattttctggcatggttttccattttcaggagataataaacgtgaattttgtggagttatattacgccagaaacgggtaa

SEQ ID NO: 398831 - DNA, 1155 bp, Salmonella enterica
atgtcgactctacgcatccgcaaaatatccctgtcccacgcgctggataaatatctgaaaaccgtttccgttcacaagaaagggcattcccaggaattttaccggaccaacgttatcaggcggtatcctctggccctgcggaatatggatgaaataacaagtgtggatatcgccgcgtaccgggacattcgtttagcagaaattaaccctagaacaggcaaaccaataacgggcaatactgtacgacttgagctggccctcctctcttcgctgttcaatattgcccgcgttgaatggggaacctgtcgcaccaaccccgtggaactggtgcgaaaacctaaagcagctcccggacgggatcgccgtctgacatcctctgaagaacgccagttgtcacgtttttttcgcaacaagaatatctcgctgtatgttattttccaccttgccctggaaacagccatgcgtcagggagaaattctgtcgctacgttgggaacatatagatttacggcatggtgtggcacatcttcctgaaactaaaaatggccattcccgtgatgttcctctttcccggatggccaggaactgtctgcagatgctccccatgagtcttaacggcagcgtgttcaggtacacatcttccggtctcaggagtgcatggagaacggcactacaggtgtttcatattgataacctgcactttcacgatttgcgccatgaagcaatcagtcgtttctttgaactagggaacctcaatgtgatggaagtagccgctatatcggggcaccgctcaatgaatatgcttaaacgttatacacatttgcgtgcctggcagctggttagcaaacttgatacccgccgcagacaaacacaaaaggtggccgcttggtttatcccctacccggcgcgtatcgcaacagtgaacgaaactaacggtaatgtcgtacaccgcatagaaatcagcgattttgatgacctgtgcgtcacagcgccaacaaaatatgaagctgtcagccgggccagtgaaatattattgcgccggctggcctgcgcagcgcagaaaggcgaacgagttccttctcccggagaccttcccgtaaatgacccggaccacattatgatttgccctctcaatccgcacggtatgccgtcctga

SEQ ID NO: 398832 - DNA, 174 bp, Salmonella enterica
atgctaacccacattctccgcaagtgtgccaatccggtgcgtggcaactttcaggtaaaacatattggcgtgtcggtggaacatttcaggtatggcccgggcaaacaagagatttggggcgttttaagttgtgcatcaacacttaccggattgatggacgtgaaatggcattaa

SEQ ID NO: 398833 - DNA, 1338 bp, Salmonella enterica
atgaaaaaacacgatcggggctgggcctccctggaaaccggcgcagctttactaattgtcatgtcaataatcgcctggggcgcaggcatgtggaaagattacattgaaatgaagagctggcaaacggaggctcgtctggccagcaactgggccagtgcagcccgttcctacattggaaaaaactatgccagcctccaggccaccagttccacgaccacacctgctgtcattacaacaaccatgctgaaaaacacaggttttctggccagcggttttaccgaaaccaacagtgaagggcagcggctacaggccttcgtcgttcgaaacgcccaaaatcctgagctactgcaggcgctggttgtgtccgccggtggaaatgctctgccaacaaaagccattattcagatagcaaaagatattacaactgggcttggtggatatattgaggacgggaatacagcgactggcgcattgcgctcctggaaaattgctttaagcaattatggagcaaaaagcagtaacggtcatattgcaattttgttgacaacagatgaacttagcggcgctgcagaagacacagatcgcctttatcgatttcaggtaaatggtcaccctgacttaaataaaatgcacacctcaattgatatgggctcaaataatctgaataatgctggctctttaaatgcccagacaggtaatttcagcggcaccgttaatggtgcagatggtaattttagtggtgttgttaaagggagcagcggaaactttgatgtcaatgtaacagccggtggcgatataaggagtaatagtggatggttgataacacgcagtggtaaaggctggttaaatgaaagccacggagggggtttttatatgtcagacgactcatgggtacgcagtattaataacaaaggtatttacaccggcggccagttaaagggcggttcagtccggtctgacagcgacctttctgccggggggatcttaaagctcgaccaagtgaacgttgtaggcgcatggtgtccacagaacggggcgataagccacgacagcactggtggaatactttcgtgccaatccggtgcgtggcagtcgaacgggaaacgaaataccgaaaccgtctggggcaatacggcatgtaatccaacaccacaggaatcaagggctgtttgtcctgttggaactcaagtcactggttgtggttacgccttacagagtatctggggaggtacaaatgcaccggattctttttctcctcttgcaaatggcgccggttgtacgctcagggtcggaggcgctccgcaggcatgttttaaagtatgggctgcatgtcgttag

SEQ ID NO: 398834 - DNA, 657 bp, Salmonella enterica
atgcacacaatcataagcattagtttttccccgttttacctgttaccgttaatactcatattttcaatagttgggcgaactctgttattcagggtccgtcattttttttcatacacaaactatgtgtggcaggaaactcaccctgccgttctttcaggtatctggctgtatggtatcactggaggggtaattgttttatcgtcatcgacatcgatctgccgtattcatgccattattattctgtcatttatgctgcaaatggcagtaaccgatgctgtaagtggcttattaccggctacattcacccgaaggtttttgattgccggcgttcttattaatattacaaccgacacatggtggacgcgtacaaccgaaacgcttatcgctgcaattatactgttttgttttcacataattctcaatcgtcggcgtccttatattggcacaggcgatttgtggcttatagcaggtattacggcatggtcagggctgtataacgctatctggagcgttttgctaggccttgggggattcgtgttatggcattcaacctggcgcattaaaagacacatagaaggccctcttggaccctggatctgtatcggccatgttctcctgctactggataatctctaccaaccactatgggtaatctga

SEQ ID NO: 398835 - DNA, 618 bp, Salmonella enterica
atgtttattcaaaatgtgaatagtaattcaatgaaaaaaaacggaaataacaacgtacctcatgcaaaaggatgggggattatggaacagggcgcaattgcacttatagtcattgttgtaattgcgcttgttcttggtggtttatatatgcttcgttcaagaaccagcgttgcaaatgaaagcgcaaatatacaaaccatcattacaagtacccagggactgttaaaaggcagcgatggatatacctttaccagcgctgcaaaaatgacaggagctcttattcaaatgggaggggttcccaaaagtatgaccgttcgagggacgccatcatccggaacagcaaccctttataattcctggggtggtgatgtgactgtcgctccggcatcaacttccggatttaataatggtttttcagttacgtatgaaaaagtaccgcaggatgcctgcatccagatagccactcagataagtcgttccgggctggctaacggcatcacgctgaacagtaccgctcataatgacggtaaagtcacgactgaacaggccagtgcgcagtgtacggctgacaacggcagcaccggtaccaacaaactgattttcactattaatggttaa

SEQ ID NO: 398836 - DNA, 1098 bp, Salmonella enterica
atgcgtgaaatgaatttcggtcaacggctgagacgtttcatcgtcagaaaaacattcactgcgccctaccgggtacaattctatgaagccctgcgttttctgcttgaaaataaacagccattaaaatcagcactggagcagatgcgggacgcctggaccgatttcggtcgtcactggcatccttttgctgaactcgccacggactgtattgaatccctgcgggagaatacagaacagaattcactggaatatactctcagtttgtgggtaccacaggaagaagccgctgtaataagtgcggggatcaggagtggctccattgttgatgcgctcaaatttgccactacactgacagatgcaaggaaacaaatccacaaggctatatggcaaatggccatttatccggcagcactgttaattatgatgggtggcacattatatgttctgaatacagaattaattcccgtgctcagcaaaataagccctccggattcatggagtggagcacttggattcctttatggtttatctggttttatcgataactatggcgtgatctgtgcaattctttttgtagtgttcgtcgttcttatatcatggtcactggctaactggagtcgaccggatagtattcgttcttttgcagataacctgatgccatggagtatttatcaggatattcagggcgcaacgttcctgcttaatatggcagcactcctgcaagccaaaatgaccactctcaattcattgaccaccttgcaggaatttgcttcaccttggttaagtgttcgtcttgacagtatcatttaccgtgtacgcttgggtgaacacctggggctggctttgcgtcagtgcggttaccagttcccgtcaagggaagcggccaacttcctgtcgttgctacagggtgacggcgcaacagaccttatcagcaattatgggcaacgctggcttgtacaaacactggagcgtgtaaaaaaaagagcagttattgtccgtttaattatgctggtatttcttgtcatgtctctcctgttactggttctggccataatggatattcagtccattggtgacagtagcatgggcaatatctga

SEQ ID NO: 398837 - DNA, 1554 bp, Salmonella enterica
atgcatgaatataatataaaggatgcactcctttttataactaaagaggatgcttatgaaattcttattgaaaacaatcagcgaacacggccagatatacaaagtaatgtacaggcattaatgcagaaatatccgggagctacaaccagactggtcagcttatcggaaatgcaggaagcagatcagaatgaaaaaaacagtatgcccagagaacgagttattcatttgcgtgatctgggagacgtcagtgaaagtgaaaaaaagattctcaattactttgaagtggccagagaactcggtgcatcagatattcactttttaatctccgaatcacttttcaaggtaagaatgcgtatattcggtgaactccagacagttgatgaggatcagccaaccctggggtattcactttgtgcgacagccattctttcaatagcagatgtcaccgagaccagcttcttcccacagcgagagcaggacgcacgactgtcacctcaactgatgcgaaaaattggaatatttggcgcgcgatacagccacaggccaacaggggacgggctgattgctgttatgcgcctgatacctgatgacggcgacaaggttcccactttcactcaactgggttttctccctgaacaaatcaggttgctgaacatcatgctgtgccgtccggagggaaaaattatcctgtcagggccgactggttctggtaaatcaacaacattacgcagtgcctgccgcgtgtatctggatgagaacccggggcggcatctgctgactatcgaagaccccctggaagggcaaattttgggcgcgacacaaacccctattatctgtgacaaatccgacgaggatgccgttaagctggcatggagccgggcaatctcatctgcaatgcgacttgacccggatgccatcatggaaggggaaatgcgcgatctcgtctcaatgatgtcaacaacctatgccgcacaaaccggccatctggttctgagcacgttgcatacaaactctgcgctgggtattcccgaacgcatgattacgatgggtatgaatgctgacctgatttgtgatgcacaactactgattggaatgataagccaacgccttgtgccaaccctttgcccttcctgccgtattccatgggcaaagcgtattcctgaacttagcgataatacccgaacttatcttgagcgctattgcaacaaagaatcgatctgcagtacagaaaatatctggtttcgtaatcacgatggctgtcctgattgtaatcgcgacgtcattattaacggaagaaaacgcggtgtagttggtaaaggtctgactggcagaacggtaatcgctgaggtgatagaacctgataaccgtttgtttcatattctcaaaacgcacggcaaggttgctgcccgtaaatactggctggaacgtatgagcgggatcagtcgtgttgagcacctgctgcgtagtattaatgcaggtcttgtggaccccctggaagccaacaggattattcctctcgatgaggatgaacgtctcaatattgacgatgtttaa

SEQ ID NO: 398838 - DNA, 453 bp, Salmonella enterica
atgcatctaagtaaattacttataattacctcacttcttctgcttcctgaattatcctccgcaaccacccaaccactggttaccattggagagctggaagcccagcaaaaccagaatatattgttacaggcaaaagtacagggtgcacaattacagaaacaactggatggctctgatgttgattcgtccatgacagcacctccggatgctggtcagctcacatcctccctgccgtctgtatccggcccggctcagcgtagacccccaacagaattacctgttatcctggaaattaatggcaaagacaagcgacttcatgccgttctccgactggccgacggacgacagacccgtgttacaaccggaagctcgatccccggtacaaaagtaacggttaaatcaatctctctgtcgggcgtgacgctgagcgacggtacaacgctgaccttctga

SEQ ID NO: 398839 - DNA, 1302 bp, Salmonella enterica
atggctgatgaagatataaatccggttgtgattcttgctgacccacaggtaagtaaccgaatgtgggtgggagggatgagatgggcaccggagaaaacaggccgccgcaaacgcccctcgttaaaaagtccagaacgtcaccgaacggctaaaggacggttaacctgcctgaaggtaaccagcggctgcaggaacgcaaaagggaaaaccagcaggctaaccggaacaggaatactgaccatgccggaacgtcaccgctatttttctcttgcactgggtttttgttcgttggtccgtaatggttacggtattttcagatatgacaatgaaaaacttttatttctggcctcagtagatggacagcctgcagttatggctgaccagtcaggaagtccggaggacatctctaagaagataaaccttttccttgtgatgaacgaggagcccactgaaaaatggcaggttatttcttctttggaaaatccgcataactggcagaccattatcgagaaattgtcacctgcggacatacgtcactgtaaattaacagttgatacccgtcagcgatttatactacccgttgctctgttgtctgctgtggcttgtgccggtgtgattttctggctgacacagccagaacctgatactggccccaccgcagaagagattgcagcacgggccagactgcagttcagtaaaccgaccataccacctgagctaccacacccatgggccacacaacccctaattagcgatttactaaaggcctgtgcagacctgagaaaaccgtcgccggtcgcactgggcggatggaagctgacagaaggcttctgcacgccggagtcattcactctggtttacgaacggcagcccggaggaacagtccaaggctttctgaccagaagcaaagaggtttttggcattattcctgaattcaacctcaaagatggtgcccggctggcttctgtcccccgtccactacctgctttaccccacagagatgaagctgtaccggcaccttctgaacagctgatgcgtgtgctcacatggtttcaggaaaggcagataacgccgtctgttaacgaaacagcaataccagaaccgctaccaggtaatgacagcgaacccgcacctgttcagaattggagagaatatcagttcagcgtatcgacaccgttaaatcctgatgaactattccgtgttttccaggatacaggggttcggatcagcagcattcattttaaattaaatggcggtactttcagctataccacagaaggtcacgtttatgcatctaagtaa

SEQ ID NO: 398840 - DNA, 438 bp, Salmonella enterica
atgggctggctggttatggtcgccggcctgaccattctgattatcatcggggactttcagaatcaacaactggcggcaacaacaaatgcccaacaacaagcaagcggttctgtatgggcaagccagatgttaatgattgccaacagaattaattatatcagatatgtatcaggccagcagaacggcacaatttccccggatcaactggcactccctttcacacctgattcccgtatcaggcatcagttacatcagggtcgattatggatctggatgccggaactgcccggacttattgatgcacttcgttccagaagccgggggtctgcacttatcggtatttttcaacacggacaactcacttggttatcaggaactgctccaggcctgacacctccggcaggcattacagaaaactccgtcgtctacgttaactaa

SEQ ID NO: 398841 - DNA, 1068 bp, Salmonella enterica
atgaaaaaaagctatctttcattcattctgccgtcgttattatccggctgcacaggtatttcaggcagcaataatataactgatgcagacacaccggcgctggtttttgtcgatggacaaataagtgacagtgcagccgtactggctcacactcagcaaagactgtcaacgcccgcagtggctacgacaccacaaacggtgtcttcaccgggcacaattaaaacaatagaatcattcagtgaatcacgtccgctaccatctccatcgatcagccagaacttctccagacttattatgacagggacggcaggtgctgtaccggtcacttttttgccgacagttcgtaatcgtactgtcagtcagtggatcaaaacgttattgcctcctgactggcagttcaaacaggaaaatgccgcaacaccaaaacttaatacccggttggcctcatggtccgccaatgaccagtggacacgttctctgaatcgcttactggaggaacaacatctgtggggacatctcaactgggcagacaaaacactgattgtaaccacatcatcttctgtacctgcggtcgacagttctggcgtgcaaatatcgcctccatccgtaactgttataacacctgagattaaccagtcctcccggattcactctgacaaccagataaaacctcggaatcctttccacggcagtactaaaacaaatacagacgaaaccgcagttctccccggaaataagcctgctcagttaattacgggtacaccggtaacccctgtcgctgagggcaaggaatggcgtgcagcagcagggaccactctgaaagaaaacattaccagatgggccgaggagacaaaatgtgaaagcattccatcttcccactggatggtgttatggccatcatccgttaaagattatcgcctggatgcccctctttttttcagaggctcttttgaatctgtcattggagaggtgtttgaactctatcgcacggctcagacccccctgtatgctcagggctcccgcatacaatgtatcgtgaccgtttcggacaccagggacgggcaataa

SEQ ID NO: 398842 - DNA, 273 bp, Salmonella enterica
atgatgagtatttctgctccatcttattcagcattaagaattattgtcatcacaaataattgtgaacaacgaattcataaatacaaatcagatgagtatttaatggattatctgcagagtttttgcatgccagaaaactgcatggtgtgtgtatttgaacgacaacgaccattattcaaacttgagcgcgtgccaggcagcacaaatcagtggagccaggtagaaattcataaacctcgtcggctgcgttcatatcgtcttcatcagcattaa

SEQ ID NO: 398843 - DNA, 579 bp, Salmonella enterica
atgcaaaaaaaacacattcccttttgcatttggattatctggagccttacttggctatgcttttactatcctgtgctacgttacagctacttttatagcgagtacgcaggatctgtttgtctttcttcagtaatatttatcgttgcaggaacctgtctggcccctcttacatttagagctggtctgaagattatgcgtcgaatatctgataatcctttcagtttctttataaaaaaagcaggtaaaaaaggccggtgtattatccatctcagtccttatgctgacacacgtacacatgaggagataagcaagcactggagtatattgatcgagctaataagcaatgccatgactcatcatgaaaccatcataatgcagtcacatttattgactccagccagaattaaaaagttaaagaacaaactggaatcgcacggggtttttacatcttttaaagtttatctgagaaaaaccactataaatgaaaaattgtcagttccgttaatatatttattgcttcactggtcattacctttacttccttcagaaagttctatagtaattatatcagcaaagtga

SEQ ID NO: 398844 - DNA, 702 bp, Salmonella enterica
atgagtactcatgaaaatccggtgcgccagttactctggtgtgcactgacagccctgcgcacggcacaggaagaacatcacattcattctgaagcccgactgcgtcgatatctccgggaatggttacagggggccgcgaaactccatcagttccggagtatcccggaagaaatcatgacactaaaaaggctccttgatgaaaacagacacgttcccataatcagcacgctcaatgccctgtttatgagttcggtttctgctgataactgtgatctgtttcgattccgtgcggccctgagcgcaatttcccgcaaaggctggagctgtggcgtttgtccatggccagaacagatttttagcgagacgattacccaggcctgtaccggacgggaaagcctgctgcagttgacacgtaccgaagagtgcttctcatccgccggtaaaatgaccgcgcctgttaccctgcaacttatcttcccactggataacgataatacgactgctgaagatctattttctaacgagaggtttcaggtagtacatggacgcgaaaaccagtatggtattgccggaacagaaatattagtcagaacattgtttcttggactaccgtccctgcctgaagaattatgggctctccaccaaagcccattgatgagtgatctcaggatgtcagaagagaaggcttccgttattcactga

SEQ ID NO: 398845 - DNA, 654 bp, Salmonella enterica
atgcctgtcagaattgcggtatggtcagacgagggctggccaccgcttcagacatatgatttagcctgtttgccagataaacgcagagtcatcccggatggatcgattctgcgcggagcgttgaaattcatgaatattgaaagcctgataaaccggcactggtatcttgcacaatacattactaccggtaaaaacagggagtccttattttcatggctaagcagccaacatgttgtgccatggactccattaattaaaagaaaagtcagacgggctgactcaccctcatgttaccgccaacgtgtacatgccatattccctggatatttctttatgcgtgctgatttcaatatacagtccgcatccagattacggcaacacagtgcatttatagatttcgtaaaatttgacgggacaattaagcctgtcaacaatgatattgttgatgggttaatgaagatatatccggaccctgttttaaatccaggagccagggaagagctggatgctgcgtccagtatctggctgacaaaagcacagtacaagtatctcctcagaatggaaaataatcccctgcctgagtcgaggatatccctgcttcttgaactggtatcaaatgcggcaaatcacggttttatggagcgcctcccatag

SEQ ID NO: 398846 - DNA, 267 bp, Salmonella enterica
atgtcgcctcagttatttcaaaaaatggcatcaatcagcctgctcgaagatatgttccccgaactctctggcaatcagctgaaggtatgtattctttacgcaatgggcgcttcttacgatgcgattgcgcaaaactgtcatatttctactgaaacggcacgcacctacttaaaacgaagcatcaggaaattaaacctggaaggttatgatgctttacgatccgctgttctgatgcgggctttctttctcataattagtaaacgataa

SEQ ID NO: 398847 - DNA, 477 bp, Salmonella enterica
atggacacgacgtgtccgatattcgatttaaagtacatttttatgcgactttttgggtatgcgggagtgaaaaccaaccgcatcttcacagacaaggcatccggtagctcagtcgaacgagacggtctggaactgctgcgcatgaaagtggaagatggggacgtggttctggtgaaaaaacttgaccggcttggccacgatacagccgatatgattcagctaataaaggaattttacgctcagggcgtggcagtccggttcattgatgacgggatcagcaccgacggtgaaatggggcagatggttgtcaccatcctgtcagccgtcgctgaggccgaacggcgcagaatactggagcgtaccaacgaaggccggcaggaggcgaagctcaaaggcgtcaggtttggccgcaggcgcaccatcgaccgtaagctgtgcttgcgcttcgtcaggaaggtaatggcgctacagcgatag

SEQ ID NO: 398848 - DNA, 615 bp, Salmonella enterica
atgcaagcaaaactctatcaacggatagtgcttactcttgccgtggggctgaccatcacggcggcaagtgccttactgacgtggtatcaggtcgccgaaactgctcaatgcactttttacgtccatcggcttcaaactacactactaccacaggtgcaacgcattcgcgacgacccgcgtcctcctgggctaacccgggcactggaaatgcttcgtgagggcgacacactggttatctggaagctcgatcgtctggagcgtagcgtaaaacagcttgttgatatggttggtgaactgcacagacagggtattcagttcaaaagtctcacagatgctattgacacaggaacaccggcgggacgtttctttttccatgtgatggccagccttgcagagatggagcgagagttgatcatcgaacgtacccgtgccgggcttgatgcagcaaagcaactcggccgtaaagggggacgaaaacccaaaatgaccagcagtaaaattgaatcggctaaaaaactattagccagcggtatccctcccagagaggggtattgcgcacatttccccgaaaagtgccacctgacacctaaaaaccgattattatcaatatattaa

SEQ ID NO: 398849 - DNA, 7584 bp, Salmonella enterica
atgtatctgactgatgaaatacttgacaaactgaacgccggccgtagttcaaaaagcagcctaaagaaatctttctcgaatgaaaagattaccctgccggacatcatggtccgctcgtttgccgaagtaaaagcgctggccggtgatatgcttacctggggagaaaagagctttctctatcaggaggcgcagaaggaactgaaagaaaacaaaatggcggaatcccgcattctgacccgggcgaacccacagctggcgaatgccgtgcggctgggtatccgccagtcgcccatgctgcgcggctatgatgacctgtttcctgcacgcgtcaggcacttcgtaaaatccggatctgtggcatcgatgttctcaccggcagcgtacctgaccgagctgtaccgggaggcgaggaacctgcacaaggagacgacaccgaatcacctggacacccgccgtccggacctggcgtccctgcccctgtcccaggccaatatggatgatgaactgtccaccctgtccctgtcgaacgagctgctgttgaataatattcaggcacaggaaggtaaagtttatgacagcgttatagagatgctcgccgcgtacagacagacaggtgccacgccttacaaccagcattatgaggcagcccgacagagcatcattctgcaggatcctgagtttgcggcgttccgcaataatcccgctgttgcggcgaaaatggataccgtctcactgcttagtatacaggcggacatttcacccgatctgcgggaaatcctgaccgaagaaatttctgaagataatgcggatgacctgataaagaaaaacttcggggataccgatacagcggctttccagaatgtcgcttatctcgccagctggtacggactcacctatgatgaaatgagctcactgctggggctggttacggcggggaacagtcttactgaaggcgttcagtattaccagaatgaccagcttatttcactggtggagacagatggtgagctggaggctgtactgatgacgcgtacgccaggtggaaattatgaccagtttggttatatcgaactgataccggtgtcaggggatgattatcagctccggtttactgtaaaaagcggatttgcaggtgaggggcattcggtcaacattgggaccacgggggcggaaagctctgacctgcttaaggatgggcgcatccccggcctgaatattcctttcaccctgaacgttaagcttgacagcacgaagctggcccagaaaatccttatcggtgtaacccgatacgagtccaccgattatccagcctatcaatacgcgaatgttcatttccagaaaaacgacttttcttacagtacattcctgctgaaactgaacaagcttatccgcctttacaaggccaccggcatagccccgtctgatatccgcagtattatcgagagcagcaacagtaaacttgagattacttctgatgttctcagccagctgttccgggtgaattattatatgcagcgctacggcattgatgtgtctgccgccctggtgcttgtcggctcggcgatcgggcaggtgacgcacggcaatcaggccagcgcctttacccgtctgtttaatatgcccatgctgaataacaccgaattttccgccgacggcaccaccattaagctgtcgccatccgggacctccgataccttccgcaccagtgtgataaagcgcgcctttggtgttaatgatacggagctgtacacgctctggacactggtttcgggcagcgtaaccccgccggattttacctgcacaatcgaaaatttgtccgccctttaccgtgtcagcctgctggccgatgtccataacctgagcgtaacggaactggccgcactgctgtccgtttcgccttatgcttcaacacccattggtagcctgtctggcgaggagctgtcaacactgctcggttttactgaccggtgcactggctggctggaagatatgagctggacgatcagcgatctgtatctgatgctgacggaccgatacagcaccacgctgtcaccggacatggaaaacctgattaccacgctgaaaagcggccttgccggtcaggacttcagccaggcagaggaagcagccgcaataaccgcctcggctccttttattgccgcttccacgcagcttgactcagccgaaacggccgcggccattcttcagtggctgagtcagctgaagccgcagggactgacggtgtctggttttctgacgctggcaaccagtaacgatcggacgaacgaagaaacccccgcgctggtctcatactgccaggtgatgggacagctggcgctgattgcacgcaacaccggccttagctcggcagagttgtcatgggtggtagcgcaccccgccattatcaccagaaatgccaccgcacttaaccataatatcggcacgttatatgatctgacacagttgcacgcgttgctttcccgctgcggcacccgtgccgctgaaatccttacctcgctcagtggcaaggccgggtctgaaaaaaataacctgtccgtaaaaacggtgtctgcagtactcggcctggatgaacaggcgcttgtccaggcgctggcgcagtgttcttcatacgagtatttctacagctggatagatctgcgggacgccctgcagtggcttgacgttgccgccatcttcggcatcacaccggcagatgtggcggcgctggtgaaacttaagccagattctgcgtatgccgactgggttaccgccggtcacatcctgcaggccggactgaattcacagcaaaccgcacggctgaacgacacgctggacgaaacgctcggcgcggccgccagtgcgtacgttatcaaaaatatcgcaccaccatgggtgaccaaccgtgaccagctgtacagctggctgctgattgacaaccaggtgtcggcgcagataaagaccacccggattgcggaagccatcgccagtatgcagctgtatgtcaaccgggcgctgagcggtcaggaagaaggtgtggattacgcaattaagtcgaaaaaattcttcagcaccgactgggacacctacaacaagcgctacagtacctgggcgggcgtatcacagctggtttactacccggaaaactacgttgacccgacgctgcgtatcgggcagaccggtatgatggatgagatgctgcaaacgctcagccagagccagctgaccaatgatactgtggaaaatgcttttaaaacctacatgacccgctttgaggaaattgccaacctggacatcatcagtggctaccatgatgatgttagcgaccagaacggaatgacctatttggtcgggaaatcggctgtcggcgattattactggcgttcggtcgatatcggaaaaatgtcttacggcaaacttcccgccaatgcctggagtgagtggaaaaaagtcaccgcagctcttaatcccgtaaataatctggctcgccctgtaatatttcagtcgcgcctgtatctggtttggacagaaagcagggagacggccactacaaatgaaagcgagacaacagaaagtacggaatacgtgctgaagtatgcacatattctgcatgacggcacatggagcgcacccgtagttgtcgcgctagacaatgggattgagccctttgcagatgttgactctaccggcatgtactgtgcaaaagatggatatcaggaaaaactctacatcttctattacacaaaagcggacagttattcggagttaccgaccaacatcgctgggctgtgcctgtatcaggacggtacgaccgaaaatatggtggcagactctgtcgcaaatttgaaaaactatatctacttacaactggataccaccacgtcggtcagactgaacacgcctgtcgacggaaccacacaagtaggcatatcagaggcgaaacaaactgactatacatggggagatggctcttacacattaatttattccggcagcgtaaaaggtacctccgcaaccgtgtctgatgacagcgttgtactgcattttaattccgttgcccgcgtggtttataatggtgtagagggcagccgttcccgtacgctggttgacatgatgcatagcacaggtagcataggtgataaatttgatctgccggatatgaaagaattaagcagttttgcgaaagtaaatggtagaaatcttgattgtatattcagttatacggatgatgatgatgatcaagtaagtgttttggtcattgataacattcctgttgcaaaaagcgatactataagagtttttaactatgacggaattgactatctatggagttccaagaagggcaacatcattgccgggcttataaaggataaaaacaacaacaagctatggcatacagacttaacaccatttactagagcaaaaaactatgtctacgcttatatatccagcagcccttccgcttcggatgacgattcatatccaaacttgtgtttattcggtaattttaaaacaataaatacaacgattaacgcaagcgacgtaaagctttccgttagcggggccgctactggaagttttacagcagataattactccaaatattcattagaagagtcattatttaattttaacgataaaaccgtttcaatccctttttcggcattcagcaataataccgctcagcttaccttcgtcatgagcgcccacgcccccgccgacgatggtcgctttctgggaaaagaggaattcactttaaccctgacccagacatttgaaagctcaatgccggttatctcgctgaataaaacatctgacggagctcaataccttcaatatggtttttatcgtgtaagggtaaacacactgtttgcaaaacagcttgtcgccagtgcaaataaaggtctgagtgctgtactgtcaatggatactcagctgctggaagaaccgaaactgggtgatggcagttatgttgagataacattcgaacgctacaatgagggcaagcatggtgacggaacatttgagctttatttaataggctgggaaagcagtacagcggatggtaaccgcagtcagatgaagtatgcggctggcactatatcttcgcaagcggaaaccaaggtcaggatatttgttccctacaacccggataagaccggtgatgaaaaagatatgttctatattggcgtgaaatattctaatgcagattatatctcctccaataaaactatgcaggtatttacttatgatgaaaaagaaaaagcttttatcgctaacagcgataatccaggtcggacacctggtctgtcaagcctggtaacgaacagtgaacctatggattttaatggtgccaatgctctctacttctgggagatgttctactatgtgccgatgatggtatttaaacgcttgctgagcgaaagtaaatttactgaagccacgcagtggattaagtatatctggagcccggatggctacctggtgaatgaccagccagcgacctggaagtggaacgtacgcccgctggaggaagagaccacctggcataccgatccgcttgattccgtcgacccggatgcagtcgctcaggctgatccgctgcactacaaagttgccacatttatgtcttatctggacctgctgattgcccgcggcgacgcagcctaccgccagcttgagcgcgacacgctgaacgaagccaaggtgtggtacattcaggcgctggacgttctgggggatgagccttacctgacagaaagtgcgagctggagctccccgcttctgaccgaggcggcagacaaaaccacacagacccggacccatcaggccctcctggcggtgcgacagcaaattgcctccggagagctacgtaccgccaactccctgacgagcctgttcctgccgcagcagaacgagaagctggctggctactggcagacgctcgcgcagcgcctgtacaacctgcgtcataatctctccattgatggcagtccgctgtcactgtccgtgtatgccacgccggccgacccggcggcgctgctcagcgcggcagtcatcggctctcagggcggcagtgacctgccagcggctataatgccatcctaccgcttcccggtgatgctggaaagcgcacgaaacatagtggggcaactgacgcagttcggcagcacgctgctcagtatcagtgaacgccaggatgcagaggctctgtcagagttactgcagacccagggcgccgagctggtacgccagagtattgccctgcagaacagcactatcagcgagattgatgcggacagggtcgcactcgaagcgagcctcagcggcgcgcagtcgcgccttgagagctataccacactgtataatgaggatgttaacaccggcgaaaaacaggcgatggatctggcgcttgccgcttcagtaatatccattaccgccaccaccgcttataccgttgcagccggactggatgcagtgcccaatatctacggccttgcatttggtggttcgcgctatggcagcatttcccgtgcggttggcaatggtattgagattgccgcaggagcatcccgcaccgccgctgagcggatcagccagtctgagatctaccgcagacgtcgccaggagtgggaaatccagcgcaatgcggcgcagtcggaggtagatcaaatcaatgcccagcttgacgcgctggcggtgcgccgtcagggcgcggtactgcaaaaaacttacctggagacccagcaatcccagacgcaggctcagatgaacctcctgcagaataagttcaccagcaaggcgctgtacaactggctgcgcggaaaactggcagctatctattaccagttctatgacctgaccgtctcccgttgtctgatggcacagaaagcgtaccagtgggcgctgggtaatgaagtttcattcatccgtcctggcgcctggcagggcacctatgccggcctgatggcaggcgaaacactgatgctgaacctggcgcagatggagcaaagttatctggagaaagaccagcgtgagaaagaggttacgcgcacggtctgtctgtcggaggtttacgctgggctctccacaggtgcctttacgcttgcagaccagatagccagactggttaatgccggcagcggtagcgctggcgtaacaggtaacggtctctccgtgaccagtgataaacagttgcaggccacgctgacgctttctgagctgaacatgggtagtgactatccgtcgtctctgggtaatatccggcgtattaagcaaatcagcgtcaccctgccggcgctggtcggaccgtatcaggatgtacgggccgtgctcagctacggcggcgtgtcgttaccccgcggttgtacggcgacggcggtgtctcacggcatgaacgacagtggcctgttccagctggacttcagtgacagccgctggctgccgtttgagggaataccggtcgatgattccggtacgctgacgctgagtttccctcaggcaaacagcagccagaaggacctgctgctgagcctgacggacatcatcctgcatatccgctacaccattattaataccgtcagctga

SEQ ID NO: 398850 - DNA, 4290 bp, Salmonella enterica
atgcaaaatacagaacagccgagcctgacccctccctcactgccctctggcgggggagccatcagcggcctgaagggcgatattgccgccgccggtccggacggggccgccacgctgagaattccgctgccgctcagcaccggaagaggatacgcaccctcgctggcacttggctaccacagccgtagcggcaacgggccgttcggtatggggtggggggttaacctgcccgccattcgccggcgaacggtcaggggcgtgccgtcgtatgacgatacggatgaatataccggcccggacggtgaggtactggttcctgtgctgaccgccagcggcgagccggaaacccgcccggcaaccacgctgctgggcgtgaatcttggagaacattttaccgtaaatacttaccgcgccaggacggaatccaccttcagccggacggaacactgggtgcctgaagggggggcggggacggacttctgggtgatatatgagccggacggccaggtacatctgctgggccgtaacctgcaggcgcgcattgttaatccagcagatgcgtcacagacggccgtatggctgactgaatcgtcagtttcaccgaccggcgagcagatttactggcagtaccgtgctgaggatgaaaccggctgtgatgtaacagaaaaatcggctcacccgaatgccacagtgcagcgctatcccgtagcggcctggtatggaaacaaaaaggccggacgcacgctgcccggcctcacagatgagccggaagacaaggactggctgttcatcctggtgatggattacggtgaacgtgacaatgccacagccagcgcaacgcaatggctggcacctggcagcgggagctggctgtgcaggcaggactgcttttccggctatgagtatggatttgaggtgcgcacgcggcgcctctgccgtcaggtgctgatgtttcaccgtatcaccgcgttgtcaggggaggaaaaagagaatgacgttccacaactcgtgtcatgtctgcggctggattataacgaaacgccgtctgtctccaccctgaaaagggtgcaacagatggcgtatgagtcggatggtacagtacgcagcctgccgccactgacgtttggctggcagggcttcacgccacccgtagccggtgccgctgactggcagcagagggatgacctcggaaaaatgaacctgcttcagccgtaccagctggttgaccttaacggggaaggcattgccggtatcctgtatcaggacggtggcgcatggtggtaccgtgcgccggtaagacaggggggggatgaccccgatgcggtgacctgggaaaaagcgacgcccctgccctccattcccgccctgagggagggcggtattctggccgacctgaacggcgatggttatctggagtggatggtcaccgcgccgggcgtatcaggccgttatgagcgagtccccgggcaggggtggcgtcctttcaccccgctttccgccctgccggtggaactcgccagtccgcgtgcgctgctggccgatattaccggctcaggcctggcagacctgacacttatcggaccgaaaagcgtgcgcttttacgccggtctcggtgatggctggatgaaggcgcagaatgccctgcaggcggcgggcattacgctccccgtgccgggcacggacgcacgggttctggtcgccttcagcgatatggccgggagtggacagcaacatctggtggaagtacgggcgacaggggttcgctactggccgaatctgggccatggacgctttggtctgccggtcagcctctccggtttcagccagccggtcgccacgtttaatcctgagcagctgtatctggcagaccttgacggctccggcaccaccgacctgatttatgcgctgagtgaccggctggaggtatatatcaaccagagcggtaacggttttgccgaaccgttcaacgtgaacctgccggacggcgagcgctatgaccatacctgcagcctgcagctggcggatattcaggggctgggcgtagccagcctggtgctgacggtaccgcatccggtaccgcgcagctgggtctgtcacctgtccggggataagccatggctgctgagcgggatgaacaacggcatgggggcaaaccatgccctgtcttaccgcagttcagcgcagttctggctggatgagaaggcagaagcggcggcggcaggtaaatccgtcccggtcagctggctgccgtttgcgctgcacatgctttcgcgtacggaagtgacggatgaaatcacgggcaaccggctggtcagtaccgcatgctaccggcacggcgcctgggacggacgggaacgggaattccgcggatttggtcttgtggaggtaagcgatgctgaaattgtggctggtcaggggacgtcaggcaacatcagctttcccgcagtcagccgcagctggtacgccaccggggtgccggcggttgatgcgctgctgccggacgggtactggacaggggatactgccgcctttacctgcttctccccacgcttcaccacgggctgtggtaatgacgagcaggtatgtaccccggatgacaccactgtattctggctgaaccggggactgaaaggcctgctgctgcgcactgagttatatggtgcagataaaagcagccaggcaggggtgccttacaccgtcacggaaaaccgtccgcaggtgcgtcaggttgagggggcgggcgcatatccggtcgtctggccgtccgttgtggaaagccggacgtacgcttacgagcgggtcagctgtgacccgcagtgcagccagcaggtactgttgtctcgtgatgagtacggtcagccattgcggcaggtaagcatcagctacccacgccgcctccagccggccgccagcccctgtcccgacacgctgcctgacggactgtttgctgccagctttgatgaacagcagcggagtctgcgcctgacgctgcagcagacccgatggcataccctgaaggatgtagctgcgggcgtctggctgccggggctggctgatgcctcacgcagcgatgccattacccttacggaaagtgacgtaccggccggaggactgacgctggaatccctgctgggcagtgacagccccgtcggggacgggaaagaatatactttcgccggacagcagcaaatccggtatctggacgctcagggtgacgtgacggacgggacaccggcttttccgcccctgcaggcctttagcgaaaccgcggtgcttgatgaggataccaggagtgcgctgtcagataatcttcctgaagacgcgctgatgtccgcaggatactgtcagtccggataccttttcccccggacgggcgagtcagaccgtaccctgtggacggtccggcagggatatgcctcgtatgccacggctgagcacttctggctcccggtgtcgttccgggaaaacctgctcaccggcgccgtacaggttacccgcgatgcgtatgactgcgtgataacaacgctggaagattcagccggactgaccaccaccgcgcagtatgactggcgttttctgaccccggagagcgtgaccgatgtgaacggtaacgtgcagacggtcacaatggatgcgctggggcgggtcacctcactgcgcttcagcggcacggaacgtggtgtggcagcaggctacagtgatgcagcagtggatattcctgaagatgctgacgccgcgctggcgcttgctgcaccgcttcctctggcacagtgtctggtgtatatgcccgacagctggacgcgtgatgacgcggaaaaactgccgccgcacgtggtgacgctgaccacggaccgctacgacagtgacagtgcacagcaaatccggcagcaggtgacgttcagcgacgggtttggtcggttactgcaggcgtcagtccgccaggctgacggagaggcgtggcagcgatctgataatggatccctggtcgtcggctcggacggcgcgcccaccacggtgaccacaacatcgcgctgggccgtcaccgggcggacggagtacgacaataagggacagccagtccgcacataccagccgtattttctgaacagctggaaatacgtcagcgacgacagcgcccgtcgggatctgtatgccgacatccacttttacgatccggtcggccgagaataccaggtgcagacagcgaagggcgggcttcgccgcaacctttacacaccgtggtttgtgataagcgaggacgagaacgacaccgcggaagaaacacgctga

SEQ ID NO: 398851 - DNA, 1113 bp, Salmonella enterica
gtgacctactcagcgaccaaagccgttccaacgcttattggcgcaggtattaaccagtctgaaaaaaccattacagtgaattacatcggtaatgctgacacagcaaaactatcgaatattaagccggataaaaccaaagccgtcgctgataacaccgagctggtgacctggtctgtcgatgtaaaagatgcgaatggcaatattctgcccggtatctctgtaaactggagcagtgacgacccggacctcacgctggcagccagcagcagcgtcaccaatgagcacggcgtggcaaccatcacgggccgcactcttaaagcgcgcgatgcggtggtgaaagccacactctctgctggcgggcagatgctctctgccgccaaagtgaccttcattggcgacgccaaaacagcaatgctgatgtcactaaatgtagataagttcaacgtcctggctaacggtggggatgccgccacctataccgcttacgttgaagatatcaaccacaacattgtgccggatgcgaccgtcagttggcggacaacaatgaacaagctttcttccgggacaagtaagaccaactcatccgggaaggcaaccgtgaagctaagcggtaacggcgttggcatggtaacggtcacagcgactatcaataattcgtcgatgtcgaagagtggcgtcaagtttattaacgtcattgaagatacatggtatgtcaaatccggttcatcaacttacacgtccagcgcgattaaaggttacccggatctgggctttgtcgtcgcctcgccaacaactggcccaacctacctggagtggagtcctaccggcacgtcgaaagtaacaacgcccgttacgctgattgatgacgccggccaacaatatacagtcaatcttaaaggcaaccgaacctctgattgttcgacgcgtccgcttaacgcagccgttggttgcagcagttcggcgggatacaaggcgcaatttacgtggaatatcaacgataacaaaagcataccgcctgggcattacaccggtcttatccacttctatggtaaagactggcataccgcctgggcatttgagtatcgcttaacgatggatttaacgattaactaa

SEQ ID NO: 398852 - DNA, 198 bp, Salmonella enterica
atggcacaagtagttattgatattaacgacgacggccaatcaggtatcgattttaaattatctattaccgatatccctgatgaaaaagatgtaactgattacatcgcccagggcattgttgctatggggccacaaatgctgaagcaggtcctggatatgttgggcctgtcacctgaacaccagaataaagagctataa

SEQ ID NO: 398853 - DNA, 450 bp, Salmonella enterica
atgtcgatttcaaaagaacaatggaacggtatccagaataccctctgtaggatgtatagcgaagttacattcaggatgccctcaggtgaagaaattacggttaataaaaggtttattgccgagaataaaatggccttaattgtctgggttaacggagaacgcagtacggcatggggcttacctacgcatgagcagtttcggccattggtaaagcatgtctggcgtcggcagactcgccgccctggagcctcgattatccgtaaaatatcaaagatgaaaggtggtaagcgatggttaaagcagaaagaaaatgcccacctgtatgatgtggtcgagtattgggtgtgttatttcaactccgcagcctccctggttcgacagtaccgtaaaattgaggggctggaactggtaacgccagtttctgaggtgatgaaaaatgcagagagctaa

SEQ ID NO: 398854 - DNA, 1461 bp, Salmonella enterica
atgtttcatcttgataataacagcggcatttctgccatgccgaaaccggcagcgcagcagagttccgcgacacgctggtttactgagggcggcgggaataattccccgagctggcctggtcaggactggtttaatattgttcaggctgaattactgaacgtacttaccactgctggtattgctcctgagaaaactgcatttaatcaacttgctcttgcaattaaagcgattattaataaagacgcattattaaaaggtaatcttctgagtgaaataagagctgcgggtgcatcatctcagaaaacagccagagagaacctagatattactgatgccaccttgaataaaaaaggtctgacacaactcagtaatgcagtggacagcaccagcgaggcacagtccgccacgccgaaagcagttaaaattgcaatggataatgcgaatgctcggctggctaaagaccggaacggcgcagacattcctaacgttgcattgtttctccaaaacgttggtttagaagaaacgataaatctggcaaaaaatgccgtcccggtgacgcgcaggattaacagtaaaccactgtccggtgatatcgccctgtgggcgtcagatgtaggggccatttccgccgatgctgttggagaaattacaaataacggcacgatggcatcagctaatactccaggatggtggcgggtggcagtgtcgaattctgatacggtcgatgattttcccacctatccggatggcagcaaactgtacagctatggatatctgtttgttgagaaaatcggggaagtctggtttcagcactattacgctcatatgggggcgaacgcaaagcgccaggactggggaactgtaccgaataccagccgtccgtgggttattgactacaacaccgcaaataaaccatcagccggtgatgtcggtgcattgccgattacagggggacggcttaacggtccgctgggtattggtactgacaatgcgctgggcggtaattcgattgtgctcggtgataacgacacaggaattaagcaaaacggagatggcgtgcttgatatttacgcgaactccgcacatgtactccgctttatcagtagcctcgtggagagcatggtttccctgaaagtaaacggaaacgctgtagccacgggcgaagtgcaggcaggaaatggttcatcgcgcatgactaataacggggatattttcggttcggtctggaacggctggctaagtatacatctgaataataatctcgtcgcagatgttcagttaggggcgggtacttcagtttccacgtgggataaggcagggtcatggcctaatacccccggatatgtagttacctccgtctggaaagatgcaaacggcattaatatcgacggtattgattatgcacctttacaaaaaagagtcgggaatcagtggtataccgtgcaaggggggacggcataa

SEQ ID NO: 398855 - DNA, 585 bp, Salmonella enterica
atgaaaaaatatcaggatattaaaaatttcagatttattgacgcccccgtaaacagggggaaaacacagtccgaaataaatataggtgcatattttctggagtcggaagatggacaggactggtatgactgtcagtcattattttcggatgataccgcaaaaatcatgtacgaccatgagggggttatctggggcgttgttaataaaccagtcccgcaacggggaaacacatatgctgtatcaatgctgtggccggttaatatgtctgttgcggaaacagacgtggctgactgccctgaagattgccgtggtgatggctcctggttgtacagagatggtaaggttttacccgttccggtggattatcaggctaaggccgaggtcacacggcaaaagctgcttaatgatgcaaacatcaccattgccgactggcgaacggaactggcgctgggtgaaatcagtgacgacgataaggtcagcctgactaaatggatgagctacattaaggcgcttaaggcactggatttaacagacgtttcagatgaggccacctttacagcaatcaggtggcctgtattaccatag

SEQ ID NO: 398856 - DNA, 258 bp, Salmonella enterica
atgtatgatggcgaacgtgagcagataattaagcgggtttatacaccggaagagctacgtcagcaggcagacgcgaaaaaactgaagttactcgatgaagccgaaacagttattacgccattagcgcgcgcagtaaagcgcgacatcgcaaccgaagaggagcaacagcgactggcggcatgggaactctacagcgttctggttaatcgggtggacacatcaaaacctgactggccggataagccagccagtcagtag

SEQ ID NO: 398857 - DNA, 450 bp, Salmonella enterica
atgtctttttctaaaggtaaagacttttttgaaatgtggcgttttgaagaatgtcctgatctagtgagggctgttgagtgtggagatattatattgttcaatcaagaacagagtaaaatcctctggtctatgtttgtttcatcgaatgcaaaacatttgatgagaatggatatgaatatattctcgaaaatagaacattatgatgttgattttgataggaaagaatctgctgataaattattctgtaaatttaatgaattatcgggttatccccaatctgtttttttattctttagcgaaaaatatctttgtataactccatatattaccctgcaaaaatactggaatcattattttttaccatcagatgaaacaactataattatcactcctaaaaatagtcatttcctgttttcttacgaagaacgtttttttattgtaactagataa

SEQ ID NO: 398858 - DNA, 741 bp, Salmonella enterica
atgcagatgaatgttcaattgcatcatgccgtatcggatattactggcgttaccggtctttcaatcgtcagagctattgtcagtggtgagcgcgatccttcagtattgatccagtatcgtgatgtcagatgtaaaaagacgccagaggttcttcaacaggcactgacagggaactggcagcctgaacatctttttgcacttgaacagtcggtggcatttttcgatttttaccaggaaaaaatccgtgagtgtgatgatcaaatcgaaacttcattattgcagctcagcaccggaactgaagagcctgaaggagtattgccctccgccagacatcgtacaaaacagcccaatcagctttcctttgatgtcagaccattactctggaaaattaccggagcagacctgacacagatacatgggtttggtccttatctggcactaaaattcgttgccgaatgcggtactgacatgaatcgctggccggatgcgagccattttacctcgtggctgtgtttgtccccggggaataagatctccggtggaaaagtactgtcctcgaaaacacggcgttcagccagtcgaattgctgctgcactaagactggcagccacaacaattggccggagtgataccgcgctgggtgctttttatcgtcgattatcatcccgtatcgggaaagcaaaagcagtcactgcaacggcaagaaaactggcaatactgttctacaatgcccttaaatag

SEQ ID NO: 398859 - DNA, 258 bp, Salmonella enterica
atgtatgatggcaaacgtgagcagataattaggcgggtttatacaccggaagaactgcgccagcaagtagaagcgaaaaaggtaaaactgctcgaagaggccgagaccgttattacaccacttgcgcgtgcagtaaagcggggtatcgcgaccgatgaggagcagaagcgactggacgcctgggagctctacagcgttctggtcagtcgggtggatacatctgaccctgactggccggagaaaccagccagtcagtag

SEQ ID NO: 398860 - DNA, 588 bp, Salmonella enterica
atgaaaaaatatcaggatattaaaaatttcagacttattgacgcccccgtaaacaggggtaaaactcaggccgaaataaatataggcgcatattttctggagtcagaagacggcctggactggtatgaatgtcagtcattattttctgatgatactgcaaaaataatgtacgaccatgagggagttatctggggtgttattaataagccagtcccgcaacgtggaaacacatatgctgtatcaatgctgtggccggttaatatgtctgttgcggaaatagacgctgctgactgtcctgacgactgccgcggtgatggctcatggttgtacagagatggcaaggttttacccgttccggtggattatcaggccaaggccgaaaccacccgacagaaactactggatgccgctaacagcgccattgccgactggcgaaccgaactggcgttgggtgaaatcagtgacgacgataaggccagcctgactaaatggatggcgtatatcagggagcttaagtcactggacttaacaggcgtttcagatgaggccaccttcacagcaatcaggtggcctgcattaccacagtaa

SEQ ID NO: 398861 - DNA, 990 bp, Salmonella enterica
atgccatttacgaccgttttctgcatttccataaaccttggtttaggagaaacgataaatctggcaaaaaatgccgtcccggcgacacgccgggttaacaataaaccactgaccggtgatatcactttgtgggcgtcagatgtgggggccatttccgccgatgctgttggagaaattaccgataacggcacgatggcatcagctaatactccaggatggtggcgggtggcggtgtcgaattctgatacggtcgctgattttccgacctatccggatggcagcaagctgtacagctacggatatatgtttgttgagaaaatcggggaagtctggtttcagcactattacgcgcatatgggcgcgaacgcaaagcgtcaggactggggaactgaaccgaataccagccgcccgtggattattgactacaacacagccaataaacccacagccggtgatgtaggtgcattgccgattaccggtggccgggttaacggtccgttaggcattggtactgataatgcgctgggtggtaattcgattgtgctcggcgacaacgacacaggaattaagcaaaacggtgatggcgtgctggatatttacgcgaactccgcacatgtgctccgctttatcagtagccttgtagagtgcatgactaacctgaaagtaaacggaaacgctgtagccacaggcgaagtgcaggcaggaaatggttcatcgcgcatggttaataacggggatattttcggttcggtctggaacggatggctaagtacacatctgaataataatctcgtcgcagatgttcagttaggcgcgggcactgctgtttccacgtgggataaggcagggtcatggcctaatacccccggatatgtagttacctccgtctggaaagatgcagaaggtgttaacattgatggtgttgcttatgcgcctttgcaaaaacgagtcgggagtcagtggtataccgtacaagggggaacggcataa

SEQ ID NO: 398862 - DNA, 423 bp, Salmonella enterica
atgtccttctcaatgtcgatcactaatatccctgcggcgctgagcgatatgatcctcgctatttccgccaataaactggttatcctgttagtcatcaccgcttttttgctgattatcggcgcatttatggatatcggccctgcaatcctgatatttaccccgattctgttgccgattatgactaaactgggcgtcgatccggcccatttcggtattatcatgattgataacctggcgattggcactattactccacccgttggcagcgggttatacgcaggggaaagcgtaggaaaggtcaaagttgaggacgttatcaaaccgctgatgcctttttacggggcaattatcggcgttttgttattaattacttaccttccggaaatcactctgtttttgccccggctactgggcatcatgtaa

SEQ ID NO: 398863 - DNA, 972 bp, Salmonella enterica
atgcagacgggaatcacgggcgccacggaaggtcaccagcgtgaggaacacgccttcttgcagggccgtaatgacgtcgccctgcggctccagcacctgcccgggagtgaggtgtgcagcattgctgaacaggtgaatgcgggccgacctgttgagctcccgctcgtggtgaagtcgggcgtagaacgcgccagattcggtttccggctccgggctggcgtcatcgcccgcttcacgataaggtgccgcgtagcggtaatgctccccggtggtgaccgcatcattacgtacgctgaccgccgcatccatcggcgtgctggctgtccggtagttgtaatcccgcgtgacgacagtgccggtggctatgttgtgccaggtccgcacatcccagaccgattctgccgcgccgtcgaacagacccgatggctcgctgtacggcaggcgcacatcaaactggtagttaagctggctgtcggcaaaaatgtacgtatccagatcgcgcacatcgtccatcatcgtgcgccagtaaattcccacctcagacaaaatacgctggatgaattgcagatccgtctcctgccactgagtgataatttcacgcggcgggtacgtatgttccagtctgaattcaaaatctggaccttccagaccgtgtttacgcagcacctgctcaaccacctcaggaacggactggttctgaaatacggcgcactggcgggtgtgctccagcagcgccagccgggaactgagcgtgagccggtagagagactgatcccgggtagtggaaagccactccaggcgggtgacaacaccgtgaacgtttttgccgctgcgcatccggaacgacgcatatttcatcagcacctcctccggggaaatgttcgcctgcggagtagtgaactcaatatcccacttaaacggctcgctcagcgcttccctgccacgaaagcgcaaaacatccggcttcactga

SEQ ID NO: 398864 - DNA, 414 bp, Salmonella enterica; identical to SEQ ID NO: 380315

SEQ ID NO: 398865 - DNA, 462 bp, Salmonella enterica
atggctaaggtaaaagtaaaaacactcatcggctccgttgtgactgtcgccttttttctgacggtcatcgtggcatttctgttttatgcctttccggaaaacgtggcttcggccaccggattcggtccgtatgacggccagcgcatactcacattctgcaccatactggttgccgcgttgtttttattcggctggctgattgagaaggccttcgacttcgccggtagatcggggctgtatttccactggggtcagaaaaaggctcagatggtcgtcccggcaacaggcaccattgcgagcgaagatgatgaagaagagcctgtcttcagtgaggatgccgtatccgagcacctccgtttccgctatggccgtcgctggcagcgtaaagtgcgactcctgctggtgatgggtaatccggacgacgtccagaaagcagccccgggtctgtgccatgacctctga

SEQ ID NO: 398866 - DNA, 174 bp, Salmonella enterica
atgtcccgcagagtctgcagagtgcgttcagacagcggattcccttccagatctacggttgcctctgaggacagaccagtgatactttccggcaggctggccaactggttattagagacccacagcgcccgtagttctgacggcagctccggcaggctgggcagttggttatga

SEQ ID NO: 398867 - DNA, 141 bp, Salmonella enterica
atgtcagcgccggtgtttatggcttctgtctgcactacagtaaaaataaaggggagagactgcggtactataaacggccatgatgaatcgttatcgatttggaccctgatgaaagacgctcgtgaggctctcgttcggtaa

SEQ ID NO: 398868 - DNA, 321 bp, Salmonella enterica
gtgtttgaactgatctttcatcctgaagcacaacaggaaatattcgccctggacagcgcgatgcagggtaaagcgttagctgcactggataagctggagttacagggcaaccagctatgctatccgcatacggatattattcaggaagggctttttgagttacgggcggggaagaaagatattacacgtacttttttcgcttttgctaagggaagaaaaatatacattttacggacatttatcaaaaagacacctaggacgccaccggcagaaatcaaaatagcattgaaaagactggaggagctgacagatgaaagttaa

SEQ ID NO: 398869 - DNA, 615 bp, Salmonella enterica
atggcccctccggctccccggcgctgccgggtcatcagtcctgcttcgctaacaggcaggaccggtaagctccgccgaatccctgcgggtttcgggcctgacggctggggtctgatggcaacggccaggtcaacccctgcagcgggcgtgcgcccgcgcgttcactggccacaaaaagacgtggccgctgaggaccggaccggcaccgtgttgtgccgttccggggccgtgccctgttcatccttccgcgttctgttttgttccctgagccccttcgccgtgcagaaacctggcacccgggcgtcttcacgcaagggtcgcgagctaaacggctgcacccggtcccttcgggctgcggctttgccgtttccccctgcgttcagcctgatgcccggtcgcccgttctgccctcacggcgaggaactcagagaaacatcacttaatcagaacgggagaaacaacatgtcacagcagaacgtcaacaccacggcttcagaatctaaagaatcatcaggggaaaaaaccgtcagcacacacctggcgagtgcgggtcagcggctgacttttttgaggactttattggtcatctggcaccgaaagcgccgcttttactga

SEQ ID NO: 398870 - DNA, 318 bp, Salmonella enterica
atgcgttctcactgtcaggactatgcgggcagctactgggagtatttttacaccagcaacggcacctgttttgccgtgccggggttcgagggcaaaaaacactttcagatcatgtccaggcgcttcagcgccaaaatgtcggcggaggccacaggcgtcagcgccatgctgaccgtgctgaaatgtctggcctggcagacgtggagtgaaaacggcaatgaccccctgatcggcaagctcaatcagcttgaaagcgacctgtgggaatacgccctgacgcttgatgaaaagcgcgttatctgtatggcagtcgcctga

SEQ ID NO: 398871 - DNA, 273 bp, Salmonella enterica
atggcatcaacaagacttcgtcagcagggcggggccgtcgtgctgactattccgagcgacattgctgcaagagctggctggacggttggcatcgagctggacgtgaccgcagagggggaatctgtaaacattgtgccggttgcgcgcgttccgcgcggtcggcggaccgtagcgcagctgctggccggtatcgaccagcaggaaattcagggcttcaacgaagaaacagctgacggcctgggtgatgcgccgcagggcagggagcatatctga

SEQ ID NO: 398872 - DNA, 366 bp, Salmonella enterica
atggtttcaagaagggtgccgcagaagggagaaatctggcacgttaacggtgatccggtcgaaggccgtgaatttaaggggccgcattactaccttgttatctcactgcgcgagctggttgcagcgctgggaacggcggtctgcgtgccggtgacaagtggcggcggcgcgtcacgttcgcagggcgtcaccgtatatctggacggtaacagcacggacaccggtaaagtaacgggcgtcgcgctgtgctatcagctgcgctcacttgacctgacggcacgcagagcaaggtatgccgccacggttgagccacacataatggatgagatactgtctctggtggttgatctcatcgatcctcgttaa

SEQ ID NO: 398873 - DNA, 699 bp, Salmonella enterica
atgaaactggtcggtaatttagttacggttgctcttattagtgttgcagcttttggcgcgtaccgaatgtacagcgtggacaaggcagaggagcaggcctttgaaacagcaaagcagacggcacttgatgcacctgatccttttcttgaactggacaggttcaggtcagcgatcggtgattacgggaaaagttgctatgtttttgctgaagcatcctgtaagcgtcgggtagaaacagaaaatgaactggtgattgcgggcgcgaaaaaaggctcagtgcctgcgctggtctttctttttgacacgggcagtaagtggccgctgattaaatacaccgatctgccgcacgatgagtctcagcgtctgggacagcgcctgataagcctggctgaaagcgcgcccgtcacaaaagagaacgcagcgcttttctctgaagcggcacagttgctgaaatacagcacacatacggcaaaagccattgacctgtatgttaaagcctggcagacaggtgcgccgtgggcggcttcagggctggcctacatatacgatgaaatcctgaatgataaagcgcgagcgtatttctggtacgtacgtgcccggaatataccggttggcactgaaagttttcaggatttgtcggcaggggaaaagctgacgcttcagagcaaggcccacgatattaatctggtgaacatctga

SEQ ID NO: 398874 - DNA, 414 bp, Salmonella enterica
atgagttcaatggtaatcttcattcttttaatgaacttactggcttttaccacacaagtggcagaacctggcttttatagcttcagtgagttcagttttttagtattagcgagtattgctgtagggttaatgcaccattacgcgagagacagggagaaccatgattacaatttcaatttgtggatagcggattgggctgccttgcttatttgtttggtgctgctgtggctcggttttgatcttttactacaccctgcaaaacatgaagtattcattcagaaaaccgcgacaacacctttcaaagcacatcgtattctcattttcatgatggctggcttaaccgcattaaacctggttggcttgtatggaaaacttaagagaagggtatcgcttaaatcagaacataacatgtga

SEQ ID NO: 398875 - DNA, 162 bp, Salmonella enterica
atggtaagtaaagacgcacgtcctgatggcaaaccgattcagatgaagctcccggttgtccgacataaggaaatgaaggcttacgcggcagagcgggggatatctatgattgatatgtttctgaaaggttatcagatctttcggaaaactcgcggcggataa

SEQ ID NO: 398876 - DNA, 171 bp, Salmonella enterica
atgaagaagcgtttttccgacgcacagatcatcaatatcctccgagaggccgaagccgggggctgcccgggaactctgccacaggtatgctatttcagacgtcaccttccacatctggcgcaagaagtctggtggtatgaaagtgcccgaagtgaggagggccccggctaa

SEQ ID NO: 398877 - DNA, 204 bp, Salmonella enterica
atgacgaaatcagattggctaatgaaattcaggcgttgccatacacttgcgactcttgaaacggtttacgagcatcttcgttacaatggtgatccgcaggaagaatatgcgatgacgcaggcttacgaccaccgaaaggctgagtttgccacgggaaagctatttgaccgcgtaccagcgcatgtatggaaatttgttgaatga

SEQ ID NO: 398878 - DNA, 3372 bp, Salmonella enterica
atgaaaattgaaaaatttaaagctattatcatgaatggcgacaaaatagttagtactttggatttaattcagcctggtactcatttaaaggtcaaaaaaggtgataaaataattctcatagataaagaaactggcgaggccccaggggatatcatcaccagtcataaaggaaataatctgcatattacttttgaaaagggccagtccggcgaatctgatctgattatcgaggatttttatggcaacaatgtagctctgttaggtcaggctgaaaacggccaatactattcttatgtgccgtctgacggtcaagcagatcattttattgatgcacttttgccaggagaagaatctgttcaggtattggatacggctgattcagatgtcggggctgttctcagtccgcttgcattggctgcactgggtgtcgccgctttaggaggcggaattattgtagccacacatggcgacgatgatggtggccatgacaagaaaggtgtgggcgacggaaataatagccaggcaactattaatactgtggttgacgatacaggcagcattacaggcgttattttaaatggcggcgttacggatgacactatgccgactatcacaggttccggtggtagggctggtgatttggtgaccgttaccgatactgatggcacagtaataggtacggctactgtaggcagggatggaaactggaccgttacaccgctagcaccactagctgagggcgagcatgagatcagcgccgtaatttcgggggaagatggcaatgtatcgctgccgggcaaaataaccctcattgttgataccactcccccgggcgctcccatcatcaccattattgataatgtgggaactatacaaggtgaatttgctgaaggcgctattacagacgataacaccccaaccattaacggcacaggaggagaggctggggatgtggtgacggtgagggacaccgacggcactattattgctacaacgacggtagatgcgaatggtagctgggcagtgacgccgaccacgccgctgactgatggtgtgcatgaaatcagcgcgaccattacggatccggctgggaacatatcacagccatccacaataaccatcaccatagatacctctgtgccggttctgccggtcgatccggctgagcagctgacggtaacggacgacgcgggcagcgtgacgggcgcgctggcaagcggcgataccacggatgacagccgtccggagctgagcggccggggcgaggcgggcgacacggttaacgtggtgctgacggacgcgcagggccgcgtggtgacgggcaccgcggtgattgatgcgtcaggcgcgtggagctggacacctgccggggcgctggctgacggcacctggacggcaacggtaacgcacgtggacgcggcgggtaacgagacggcggtgccggactttgagtttaccgtggacaccgtggcgccagaggtaccggaaattgtgctggtatcagataatgcagggaactttacgggcccgctggcaaacggtgatgtgactgatgactcgacgccgaccctgacaggcaccgcagaggcgggcagcgtggtgcacgtgtatgacaacggcaccgagataggcacagcaaaggtagatgcgcagggaaactggacctttacgccagataaatcgctgccggagggtgttcaccaccttacggcggttgcggaagatgcagcgggcaaccagagcccggcgtcagaggtatttgagtttacggtggataccacagccccggtcgcgcccgtcattgatattctggctgacgacaggaacaacccgggcgaggtggtgtggaaccgtgtgactggtgacagcacaccgatcgttattggttataaagctgagccgggcgggatggtacacattatgagtggtacgaccgagttgggcaccgcggcggtgggacccgatggctcatgggcatttttcccggatgcccccctggcggacggtgactatcgtatcacggcggtcgcggaagatgcggcaggcaacctgagcccggcatcagaggtatttgagtttacggtggataccacagccccggtcgcgcccgtcattgatattctggctgacgacaggaacaacccgggcgaggtggtgtggaaccgtgtgactggtgacagcacaccgatcgttattggttataaagctgagccgggcgggatggtacacattatgagtggtacgaccgagttgggcaccgcggcggtgggacccgatggctcatgggcatttttcccggatgcccccctggcggacggtgactatcgtatcacggcggtcgcggaagatgcggcaggcaacctgagcccggcatcagaggtatttgagtttacggtggatactgtaacaccatatgccccggcaatttcaacggccgacgacgacgtaggggggagccaaggttcgatggggaatggaagtatcattgatgacaccacccctgaactgaagggcactgctgaagctaatagtatagtccatatctaccgtgatggtacagagataggcacaacccaggcaaacggcagcggagagtggcgctatacgtcagaggcgctcaatgagggaacctatattttcactgctcgagcggaagatgcggcggggaatataggcgtcaattctgatgattttttaataacagttgatacgggcccgacagggccgattactccgattgaaggtgacaataacggtatggtcggtatgcggggggatggatttactaatccaggacatgatgtctataggtttaatgaaagtactggctatccaaatgaagttgaatatgaaatcaggagtaacaataatggaagagaaacaaaaataattatcggtcttatggatgaagagacaggtgaaataaccacccaaaccctatatccacaaggggggcaaaatgatgcaacgtacgagtttcaagtttatcatgccccacatggacaagtaattacctccttcgattttgatttgtctgaggacccgattactggcggatatgactataataacgttaatttttcttatcatgactcgagcgcaaacagttcactttccattagcagtgatcaacccgaaatatttactaccgaggatgtgctgagcagggggacaactgatctgttcagtgaagaaagtgatgaacagctaatgattaacaaagaaataggttcatctgttgaagtcagtaatgaagagaactggagtgcggcgagtcagacaatggtagatggtgtgagctataacggctacaccagtgcagaatataatgatctgcttattcagcaaggagctaatatgcccataagctga

SEQ ID NO: 398879 - DNA, 1527 bp, Salmonella enterica
atgctttttttaatccgtaaaagaattaatattggagctatattaattatagcgacccataccgtttcggcaaatatgctaagtgatggaagtaatgagtcatctcgattaatggcatcgcaatcaggtaattttaattatctaagtgctcccatgcagagcgatgcagaagcggctaagcctctggttgataagttgcaagcatcctaccgaaaaagcagcactgattttggggaagtgtatgcccggtgggcaggatctgaccagcctgcaacaggattaatcgatgaatcgatgctttccacctcccagctcaagtacattttcagtcaagctgtcctgctagccgcgagccgcagtcctgaaattaaacaaagttatggtgaatggcaggcagcaggatttgatgtagaccaggttaaaggtcagcgctggccacagattcaggtcggggcgtcaacgaaatctgttgagtttggtggacggtcagagtaccaacgaagcagcggaattaatgtctccgcctctacgataatttttgactggggccgtatcagaaagcagattcgaagcagagaacttatagaaagtgccaactggctgaaatttcgagccatgctcgaatctaatgcctatgaagttagtatgactctaactgagttggccaaagagcgctacattgtcaaagtaactgaagaatatgttactcgtctttctgagcttgttaacctgctacaggaaattgtgaaagtagatgtgggtcgtactagcgaactcacccaagtcagagcacgatttcttgaggcaagaacatctcttgaaggagcgcaatcccgccagaagtctttagaactggagatgcgtaagttggtaggtaatatttcattcgctgttccttccagtttgaggtgggattttccgctgcctgattttgagaccactctaaaaaaagtgcgtaagtctcctcaggtgttacaggctgaatatgaggccgatgcacaacgggttgacgcagatgcaatacattctgctcaacttcctcaactaaactgggtagtaggtaaaagcacggtaacgcaaggctataacggaaaagaggatccttggcaaacctctctcaatgttacctggaatgtatttcaggggggaagtgccagagctgaggagcgtgcagctattgctcgggcaggtgccagccgcgaaaaaaaagaacagttattgttagatacagaatttgaagtacgtaacgcatggcaggacgcccatatttatcgacgaagagcagaagattatcagcctctggtcgttgaatctttacgcgtaaggcgcgagttttttgagcagtggtaccatcttggcaaacgaacaattctcgatgttcttattgcggagcgagattattataataatgaaattggacagattagcgcaaagtttgattcttatagctcagtcataaaagtttattctggtagcgctcagctacttgaatggcttgattcatcacgttacatgaatgttaattga

SEQ ID NO: 398880 - DNA, 1230 bp, Salmonella enterica
atgaaaaccaggaaaactggtaagaaaaatttatcagccaatgaattagcgtttattgatgatgttagtgaagcgttgcatgctcaaaaaacgccggcttcaatggtcattttgtatatgatcgcagcaattatcattgtaggtcttgtatgggccaaatttgctcgcgttgaagagattacccaaggcgaagccaaaattattccagccagtcgggaacaaatagttcaaagcttagagggcggaatattggaagagctaggcgttcaggaaggcgacatggtaaaaaaaggggatatgctattaaaaatagatcctactcatgcaggcgcgatttaccgtgaaggctattctaagttaattggtttacaagggactatagctcggttacgtgctgaagcctactctattccgcttgaatttccaaatgaagtaaaggcagtcccttcaattgtacgggatgaaacgctggcatataaagcccggaagaaagcattggaagaaagcatttcttctattcaacatagctatgaactagctcaaagtgaaataaagatgtcagtcccgctttcagcccgtggattaatatcgaatgtcgaaatattacgcatgaaacgttctgctaatgatttattgatgcaaatcgctgaaagaaaaaaccggttccaggctgaagctaacgccgaattgtcaaagcttgagcttgaatatgctcaaacaaaagaaaacctggtaggtagggaagatgtctttcaaagaacgaccatcgctgctcctgtgaatggcacgattaaaaatatacgggtgaatacaatcggtggtgtgattcaacctggtgaacctattatggaaatcattccactcgaagataaacttttggtggaagcaaaaataaagccttctgatgtagcctttttaagacagggtttgccagcgatggtgaaaatttccgcatatgattttggtatttatggagggttaaaaggtaaggtcacgctcattagtcctgataccttaagagaagatcctcaggaacaacaaaaaccgggggaaacttattatagggtttacgttctcactgataacaatgcgctccatgccaatggaaaaatactacctattattcccggaatgacggctacagttgaaatcaggacaggtgagaaaaccattcttgattatattatgaaacctgtgcttaaagctcgggaggctttcagagaaaggtaa

SEQ ID NO: 398881 - DNA, 558 bp, Salmonella enterica
atgcaaatagatccagctgactggcgtaaagcagttggttatgtaggtcaggattgtcgactattttatggcacgcttaaacaaaatgtaatgattggtcggcccgaagccactcttgcagaatttttacgtgttatgaaacttgtaggattggatgttttcgcagcgcaacatccattaggctataacctgcatataggcgaaatggggaatggtttatctggtgggcagaaacagctcgtcgctctcgctcgttgcctaattagacatcctaaaatggtgctctttgatgagccaaccagcgcgatggataatcaaacagaggctatgttcattaaacatcttaaaggcgctattcgtgatgaaacgattattatcgtcacgcatcgcccgtcgctacttcctttagtcgatcgcattcttgtagttgaacaaggagaaatcatttctgacgggccgcgagaagtgattcttactcagctacgtagtaacttatccaaatctgtctctaaagagactaaaagccgaatcaatatacaaccggtagcaaaaaaatga

SEQ ID NO: 398882 - DNA, 129 bp, Salmonella enterica
atgcagatttatcagcctgggagtaaaacgcgcggaaaagtcgcgattattggcgcgggcccggcaggtttgcaggcgagcgtgacgctcacacagttaggctatgacgtcaccatttacgaaaaatag

SEQ ID NO: 398883 - DNA, 303 bp, Salmonella enterica
atggcgacggacgtcaggcagaaatcgagcgagcaggcgaacgctaccgggcaactgctgaagcaagagttcgacaggctcgggaagtgtgtcagcgaggcactgagcttaagcgggcagaaaatcagcgacgacatagccgcccggaaccgggagctgagcgatgccctgaggcaccacagcaacggcatgacagaggccatgcagtcacaccgggagagcgtgatgcgcctggcaacgcgccggtggctgtcagtgctcatgacctcgctgctgctggcgggggcgtgctgtggctcctga

SEQ ID NO: 398884 - DNA, 768 bp, Salmonella enterica
ttgaactttctcagtaaaaccgtcgttgtcgtgttggctgcaacactgctttccgggtgtgataaccagcctgacaagacgctgtcccctccggtgggtgcaaagtgggtggacgtcactttccgggtgccggagggcattacactgcagccagccgagctgctgtaccgttcggcgcagtgcaaatccgtgcgctataactcaagcaatgaaccgcatgatataccgggctacaacgacgttgagcggccattcggtgcgcctgatggtgacaatatccgccgtctgcgggttgccgtggacggtggcggttcgtgccagtggcaactgaactcgctgaaggtgagcttcagaattgcggactatgttcccctggtgaagggaaaagaggttatcgataccagttatattttcgatttcggggactacggacttagtgacggctacgggaccgggcgggcgaaggtgttcagcgagaaaatattggatctgaatacagatttcttccctatggttgctaatcacatcgataatacggttagcttgaagttatttgggggggagactggaacagaaaagtggcgcaggcgttttagtctaagtaatacacaacatatagctattgaacctgttgttcatcttatgaaagttgttgtattaaacccaccagatcatccaggaaatctgacagcaacttatccggatggcagtcgtgaagatataccgaatatttccccggattatgacaagttgctgtcaatgaaatag

SEQ ID NO: 398885 - DNA, 960 bp, Salmonella enterica
atgtcagaaagatcaaatataaaaggtccgcgagtagattataatcaacttaaagttattcaggccattacagcgacagcaagtgtagcaaaagcagcggaattacttggggtaactcctagcgcaattagccaaacgctagctaaaatgcgccacacattcaaagaccctttatttatctggaaagataaaatcatgcttccaacccttcgtgcagctgaattatccgagaagatttcacccttaatggatacacttgaagaaatttatcaagatgccgtcggtgacccccagcacattaagtataaaaggcaatctatttctatcatttctcatgatgtggtcgaatatattttgcttagtgagcaagcaaaaatattattggccgaaaacattgcgataaatgtattgcctatatcctcttcaagcgaagaggatttacttcgcctgagacttaggaaagctgatgttttattcacgactgaaattgtaaagaatcctgcatttgtctcaatacctttgattgaaagtgattactgcatcgtttgtcggcaagaacatcctgatttcgaaaatctatctgaaggaaagtgctggaatgaacagagattttgttccactttaaagactgattaccagactcttgattatatggatgttacaggagatgtaagcaagaataaaataagatttggctatcgaaatatgaatgctatgcttcgatatcatattgtttctaaaactgatctagtaatatttgcaccgacattggtagctaaaaaaatgcaagaaatatttcctatttcaattattccttttacaggctcaggcttgagaaaagcttacgtttacgctgtaatactaaactcattaaaaaaagatatgtttataaaaaaattcataatttccgttaaaaaaaattctgataaattagttttggatgcaagcaataaacaataa

SEQ ID NO: 398886 - DNA, 735 bp, Salmonella enterica
gtgaaagggaccccaatagagctggaaaaagtattagaagatcatgcgctagaaacaactccattattaacagatcttattaatacatccaaggttcctatggatcagataactaagaatatacttgctaatcaggctggaggaatactgaattttaacgcaatacgtttctcaataagcgataacgaaaatatccatgcattacagatcgttgatgccaaaacaacagccaatcaaattggaaaaggttttatttcagcagcctattgggccccgcaaggggggtatgtagatattcctgcacgtcctgagacaggtccaaaactcgtgttcacccccggattcagtggatgtacttttgtcgctgataaattaaacgaagaaaccattcgtgtcagacatgtacagggaggaaaagaagacctggagtataataacctcgctgccgatgaacatggacagggtatgatcgatgccatggaatatggagattatggttaccatcatgatagtcagggaaatttgatggaaaatataacaggctcggcatttatgatatatgaaaacgaccaatggaatataaaataccagagcctcgctaacgcacccggaatttcatcattaagagaagagtcttttggtttcttcaataagaagacgcaactgataggtaaaattcgttatagcgaaggaaaaaatgtagttaagacaaaaaccttacccctacatcattaa

SEQ ID NO: 398887 - DNA, 684 bp, Salmonella enterica
atgggtggaaatattacttccgagaatcggggggcaaaatggtatgctggtacacactgggaaaagaaaccattaaaaaatacaatagatctggttgttcttcacaatggcatgcagggggccgcagggataaatattgatatggcggagataaaagcaggacgttctgtattggtaacagccgggacattaagtggttgcacaatgataactggtgttaaagataatcatttttatgctctgcatgcagggacaggaacaccgacaggagaatggttaaccagccagcatggtgtaagggataatatccgtttatttaatgaattaattcctgaaagtggtctgacattaggtaacaccactggggccggagaaacaaatgataatttattgcctgttttagactatttcgatagcggaacaatagcttacagtggtaaacctggctcggagatgagccgggaaactgagaatatacttaactaccacacgaaaggtttggcgaccacagtcggtgtatcgtttagtctactgacaaagaaaattaatggtggactttctgcatcaacattgcttgaacttggggagctcagcccacataatccgccaaaaacaaaaggagagtttggtcaaattgttcttaaatataaagcgctcaacaataaaattattaaactaatttag

SEQ ID NO: 398888 - DNA, 582 bp, Salmonella enterica
gtgccctgccggacgttccgttttaatgccggtcaggcgctgcgtctctgcttcatacgtgtacgtggtcaccacgccgttgccgtgctcttcgcgcagcttctgcccggcggcggagtacgtcagggaggcgacgataacctgctccgtgccacctttcaccgtcagccagttgcccgacagcaggcccgccacgtcataggccacccgctgcaggtttcccttcgcatccgtgctggtcagcaccgccccggtggcgtcagccgtggtctgggtgttataagcttcaccgtccagcaggtcgttccaggcggtggcatcctctcccttccagtcagccacggcgtccgggttgtccgcgtccttcagcaggcggcgggagacggagagcggcacgccggtcagggccacactgtcggtctgcgtcaggccggccgtgtcgtagtggctgacgcatgctcccgccaggttcagggccttctctgcgtcagtatgtccggcataaacaaaacgctccgtgatgcgggcggcctcgccgttcacctgttccgtgatgctcagcggtcggcccggcagttctga

SEQ ID NO: 398889 - DNA, 267 bp, Salmonella enterica
atgtactgctatagtgatcaagcaccaaatattttgcaactggaaactgaaggaaggtattatgaatttactgaacctgaagaatacgctgcaaacttctttagtaaccaggctaacttttttatttttattaacaacgataattatttggctgctatccgtatttgcagcagcttatatatcaatggctcagaacaggaagcatataatggaggacttatccactatctccgagatgaatattgtactaaacaatcaacgttttga

SEQ ID NO: 398890 - DNA, 870 bp, Salmonella enterica
atgagtgttattttttcgataattacacctacctataatagatcacaagagttagaactgttatttaatagtttgaatcgacaggatgtaattggctttgagtggatagttattgatgatggctctatagataatacgaaagaacgagttaaaaaatatatagaatatagtaaaaacttatatgatattaaatatttttatcaagagaaccaagggaaaaattctgctgttaataaaggcattcaaaatgctagtggtgagtatatagtcattattgacagtgatgattatttatgtgataatgctttatcttgcgtaaaacattatatagatcaaggtctgtttagcctaaataaagatttaataggaatatccggagttaaagttgatgagcagatgagcccggtatgttttatttctgatgctaatatgactattatgagtcattatgattggttttatcgtcaacatcgcttaggagatcggattgatttttataaggcatctgtgctgaaaactaatataattaacaatttccctaaagaaaaatttattactgaagatgctttatggctcaatttaaaagggaaaaaactttttataaatgagccattgttaatagtaaaatatacggacgatggtttgagttctcgatatagaaccttactcaagcagaatccatttggttcagcttattattattatgtacttctgattaatagtgataacgttctaattaaatgcaaagcatcgacgctaataatatattatataatattaactatcatgaaaaacaataatagttttatcgggcttctatccatcttaatatcacctataacatgtttattaaaattatttcaaaaataa

SEQ ID NO: 398891 - DNA, 144 bp, Salmonella enterica; identical to SEQ ID NO: 380269

SEQ ID NO: 398892 - DNA, 5016 bp, Salmonella enterica
  misc_feature (4979)..(4988): n is a, c, g, or t
atggtggaggataaagccgggaacgtcagccattccgccccgctgacggtgacggtggacacgcagacagccattaacagtattgagctggttaacgacaccggcattccggacgacaacctgaccaatgcggtgcgtccgcacttccgggtgacggtgccggatgatgtgaacgcggtacgcctgagcatcgacggcggcaagacgtgggtggatgcgaagagaacttccgccggcgtctgggactacagctggctgacggatgtgaccgaaggggcgcacacgctgacggtggaggccaccgatgtggcgggcaacacggtaaaagaggcgatgagtttcaccatcgacaccacgctgtcggtaccgctcattgcgctggacagcgcggatgacagcggcgtcaggggggatgaactgacccgggtgaacaggccgacgttcttactggacaacattgataacgatgcgcgttatgtcacggtggaagttcagcatggcagcaccagggaggtgctgaaggcgacgcagggtgcgaacggacgctggagtttcaccccggcgggcgactgggcggacggtcagtacacgctgacggtaaaagtggaagacgaggcggggaacattcgccagtctgcgccgctgacggtgactgttgatactcagacagccattgatggtatcgagctggtgaacgaccacggtatttccggcgataacctgaccagcgccctgcgtccggagttccgggtgacgacaccgggggatgtgaatgcggttcgtctgagtctggacggtgatacgaactgggtgaacgcgacgaagaatgccgccggggtctgggaatacagctggccgggcgacgtgggcgagggtaaacacacgctgacggtggaggcgacggatgcggcgggcaacacggcgacgcggacgctggagtttaccgttgacaccaccctgtcggtgccggtcatcacgctggacagcgcggatgacagcggcaacaggggtgataacgtcaccagcgtcaggtcgccgggctttaccatcgaaaatatcgatcctgatgcgaaccgggtgacggtacagatcgcgcatgacggcagcagccgggaggtggagctgacccagaccggtggccggtggcactttacgccggacagtgagtggacggacgggagctacacgctgacggtgaaagtggaggacaatgcgggaaatatccgttattccacgccgctggacgtgaaggtggacacgcatacggcgattgctcgtattgagctggtaaatgacaacggtgtaccggatgacaacctgaccaacgagatgcgcccgcagttccgggtgacggtgccggaggatgtgaccgtggtacgcctgagtctggacggcagtggcagctgggtgaatgcgacggcgggagcaacgaaaggggaatggaactacagctggccgtcagatgtgggcgagggtaagcacacgctgacggtggaagtgaccgatgcggcgggcaacacggcgacgaagaccctggacttcagcattgacacgaagctgtcggagccggtcatcacgctgaacagcgcggatgacacgggcgtgccgggagacggtctgaccagccgcgcgcagccgtcgttcacgctgcaggatatcgatgccgatgtggtgagagtgacagtgagcgtggagcacggaggaaggaccgagacgtttgacgtgttacagggtgcgggcggatggagcttcacaccgacggcggcatgggcggatggcagttacacgctgaaggtgacggtggaggacgaggcgggcaatatccgccattcagcgccgctggacgtgaaggtggacacacagacggtgattgaccgtattgagctggtgaatgacagcggcgagccggcagataacctgaccaacgatgtgcgaccggagttccgggtgacggtgccggaggatgtgaacagggtgcgggtgagcctggacgggggtaagacgtggatggatgcgacgaaggcatcggcaggcgtctggagttatacctggtcgtccgatgtgaccgaaggcgcgcacgtgctgacggtggaggcgaccgatattgcgggcaatacggcgacgcggacgctggatttcaccattgacaccacgctgtcaacgccaaccattgaattagcgccagatcaggataccgggcaaagtaagaatgataatctgaccagtttaactcagccggtttttgttttgggccatatcgataatgatgtccaaagagttgaattacagattgagcataacggtacatttaaaaacattattttaaccgaatcggctgatggatggcgttatcgacctgacgcggcattaaacgatggtagttataaattgaccgtgacggtaactgatacggcgggtaacaaaacgacatccgctcctttaacggtaacgatagatagtacgttgagtaccccggtaattgcgttggctaatggcgaagacagcggcgtggttggcgatcagcttactaaccacgatcatccggtatttgacttgagtcatattgattctgatgccttgcacgttatggtcagggttactcataacggtagctctcatgaggaagcggcggtatttaacaatggtaaatggcgtttcagtccttctgtgagttgggcggatggcttatatcaattagctgttgttgtagaagatcgggcggggaatgtaaaagaatctgcgccattagatgtccgtattgatactacgaccactatcaacaatatcgtgttgcttaatgacactggcgttctcggtgatcaattaacgaataacgctaaaccatcattcagagttgaggttcctgcggatgttgcccagatgcgcgctactcttgatggcggcacaacctggattccgatacggcgaaatgcggatggacagtggatttttgcaagcacaaataatctgactgatgggcaacatacgcttcgtatcgaggctacagatacagcaggtaacgttgcgagcaaagatttagtctttaatatcgatactcacttacagattccgacaattgctttgggggccggacaggatactggagcgaatacttccgaccatattacgaatatttcacggcccacttttgttattggcaatgttgatgccgatgttattaaggtaatggtaactattggtaccaatacttataacgctactaaagtggggggggcatgggagttcagaccggataatgcgattcctgatggttcttataatgtgagcgttactattgaggataaagcagggaatatagcgacatctcaaccgttatctataatggtagatacgagagccgaaattaatagcgtaacgctattaacagatagcggtgatagctcttcagataatataaccaacgtaaacaagccgcagtttgaaattgtggctgctaatgatactgtacaggtacgcgttaaaatcgataatacgggtaattggattgatttaacgcagagtgttgaaggacactgggaatttaatgtaggaactgcattacctgacggtcaacattcactattagtggaagttgtcgatgttgccggtaacgttgcacaacaaacgcttaattttacggttgataccacgctgcgtgagccaaatattgtgcttgaccctacgcaggatactggcgatgacagtaatgacaatattactaatattaataagccgacatttattattggcaatgtggataatgatgtgtcacatatcgttattcatcttgatggtcgggattatatcatcgaaaataatggtgctaaattaacatttacaccagataagccgctgacagatggtcatcatacgcttactgttacagtgacagatattgcgggtaatacaaaaacatcatctgaactgcaggttgaaatagatacccaggtacaaattgacagggtttcattaacaaccgatagtggtgttaatgatagcgatagaatcactaatgttgctcgtccatcgtttaatattgtaacacctgatgatgtgaccaaagtattggtttctttcgacggtgttatctggagcccggcaagtaagaatgcagccggacagtgggactttacggcgggtagcgctctattagaaggtcattatgtactccatgtgcaggcaacggatcgggcaggaaatacggctaattccagtcttgcatttacggtggatacacatgttgatggccttaacattaccatgctggatgatacagggaatgacgcggcagaccgtataaccaatattacatcgccgcgttttgaaatctcagccagagaatcgctacaggttgtaacggtgacgttaaatgggaacgtcaccactctcaacaaagggatgggtaataagtggatatacactcccgaaataccattacttgatggacattataaactagaggtcactgctgaagatattgctggcaatactattaaccaggagatatcgttcactatagatacgactgtacctgtgcctgatgttgatttgttggatgccgatgactccggtgaaagcgctgtagataatattaccaatgtcactaaaccacgtttcattattagtgatattcctaccgatattgacactgttacgataaaaattaacggtgtctcttatcctattactctggatggcagtaacaccgggacattccaggttcctgtggcgctaaaagatggtgtctacgaagcggttgtcgtcttcagagatcttgcaggtaatatatccgagacgaaactaccatttaccattgatacggcaacaagtgttagtgttcgaatggatcccacatcagatacgggaagttctaatagtgataatctcactaacagaaaaagtcctaaattcggcggtactgcggaaccggatgcaaaacttgttattaccattatcgatgatacatcaggtcatgaggnnnnnnnnnntaagaaccatcaggtcatgaggtgttga

SEQ ID NO: 398893 - DNA, 300 bp, Salmonella enterica; identical to SEQ ID NO: 375181

SEQ ID NO: 398894 - DNA, 129 bp, Salmonella enterica
atgggacaccctgtaatcttatgccttatatttgtcaggttgcaatcggaaaatatactcacgtatcaatttttggtagtgattatcctactgatgatggaactggagttcgtgattttatccatgtaa

SEQ ID NO: 398895 - DNA, 267 bp, Salmonella enterica; identical to SEQ ID NO: 375323

SEQ ID NO: 398896 - DNA, 468 bp, Salmonella enterica
  misc_feature (272)..(281): n is a, c, g, or t
atgaggaaagtaaaattagacaatgatgatttaattcactatctgaacaccatcaaagctttaaaaaaatatccaacgatgactgaatataaagcagaatatcgcagactaagaactaatggttcacttttaattgaagccaagaaatttaaatcagcacatattgaattactcaggctggacaggaagaaaatatccctgctcgaaaaatttattgaagaactcaatcctgtcagtcattcatcggcccttgcatccaagagccttgagannnnnnnnnnggtgttttttctaacaacgtttttctgtagagtatggattcatgaacccttcgctcttgtcatcaaacaacgtacagaagctgctcttgagcttcagcgttctattgaacagagccttgaacagctttcttctatctcatcagattttaacgcatcaactacaaaacgccgaaaattttctatctaa

SEQ ID NO: 398897 - DNA, 129 bp, Salmonella enterica
atgcctaacgagttgataataaaaggctacaaccagagcaacgcatatcccaaggagtcccacctgattaatcagatgaacaaatgttgttggatgatgatgcgttttcatacacactccttaaaatga

SEQ ID NO: 398898 - DNA, 1782 bp, Salmonella enterica; identical to SEQ ID NO: 381649

SEQ ID NO: 398899 - DNA, 201 bp, Salmonella enterica
atggtaaaatgcgtatctcctttcctcctgttcagcctgttgtctcttcaggcaatgccagctgaaagccatattgattcccaccgaccaaaagatgttgtcgatattactacggtcgcccccgacgtacgcgatacttcacttcccataactttattggtcgcccgattaaaggttataaagcgcctgtttgcctgttaa

SEQ ID NO: 398900 - DNA, 225 bp, Salmonella enterica; identical to SEQ ID NO: 377879

SEQ ID NO: 398901 - DNA, 225 bp, Salmonella enterica; identical to SEQ ID NO: 377927

SEQ ID NO: 398902 - DNA, 474 bp, Salmonella enterica
atgaggacctccactccaggcgctgacgctaactccacagccacatccagcccatttgtcatgaccaccacgttttctactgattttaaattggcagcgatttcacgcgtggtggttcccgaatccagaatgaccgtatcaccattgttaatcaattttgcagcagcccgcccaatcagggattttacgtcagaattacgacgactcttttcattaacagtaagttcagcaattacgccgacgttcgggatagccgaaccgtgcgatctgacgatatatccgtttttttctaaaaaactcaggtcactacgaatggtgacacttgagacattgaatctttcggctaagttttcgacacgagctttcccctgccgggttatcacctcaaggatttccatacgcctttcgattgctgccttcacttctgtctccttacgaaaccaaacaaataccattcgtttgggctcgaattaa

SEQ ID NO: 398903 - DNA, 309 bp, Salmonella enterica
atggacggtccggaccataaagcctcgctagaacccgatgaactgaatgcgatgatacgtgctgtgcgacaggttgatatggcattaggaggcagcatcaagtcaccaacagtatcagaggtgaaaaataaagttattgcgcgtaaaagtctggttgctgcaaaagcgattgctaaaggtgaggcattcaataatattaatctaacaataaaacgtccggggaaaggaatgtcaccttatcaatattggaatttgctaggtaaaacatccagtaaaagctatgcagctggagatttaattcttgagtaa

SEQ ID NO: 398904 - DNA, 291 bp, Salmonella enterica
atgtctatcgatgctgttgattatgcagaaaccctaagcgaattattaccaccagcgaatgttcaagctgcccttaagcgtcttgaatcagctaaacaacatgcttcagaattatatcgtaataatcgggtcataagtaattggcaagatcctgacattgaaatttattataacaacgaactgatagattatgaaaataaagtaaacagaggcatcagttatccacaaaatgccaatctcgatctatctttatatcttagggacttccactatagtgtattattggtttga

SEQ ID NO: 398905 - DNA, 1131 bp, Salmonella enterica
atggggcaggattcggacgacaggcgccgtacctccagtgctggaagggtatggcaggatcataaagatatggtcaggcaagcgctacgtgtaagtattccgtggttcacatttgtgaatatcagctttgcgcttatcattttatttcgccacatactcatcagtgactttgacaagtcgatcagtgcacagactggaatactgcctttaatagacgatattatgggcagtattattgttttttcgttcctgatactccttttcatttaccgccttccggccagatttactcctctttgtctggtgatgctgctgattctcagtctgatgtggagctattgtagctactgttttattgtctggtggcaactgccttttgcctggcctctcagtgtcatccttatgcttaccgcgctggctgcgctttattatcatctgccagcgttgctacttttcatcgtcccgttatggctgaccgccctactggccagcgtgcagcttaaccagtatgtgaatatccggtttttattagtctggcttactcttaccgccatactcatttatggtcgctttatcctgcagcgctggtttgatgaagcctggttgcgttaccaggaaaaccggatgcttatcgcgcgtctcgacgttatggctcaccaggatgcactgaccgggaccgctaatcgacgttcaatggaaagttttcttggggatgctctccgccagacggagccgtttgcactgatcatgctcgatgtggactatttcaaaaactataacgacaattatggtcaccaggctggcgatgcctgtctggcaaaggtggcctgtgtagtaaagaggtcgattcgtactccggcagacctggtggcacgttacgggggcgaggagtttgtcgttgtgctgccttcgtcgtcgctgaatgaagctgcactggttgctaaacgtattcagacaaacctgcgtgaaaccgcactgccgcatgtagcatctgcggtaagcgaaacggtcaccgtcagcatgggcatcaccctttccacagccggtgacactgttaccggcattattgccagagcggatgaggccctttatcgggctaaacaacagggacgtaatcgttgggtaaagtaa

SEQ ID NO: 398906 - DNA, 273 bp, Salmonella enterica
atggaagtcaatgactatgtgattcagtacccgattgatgcggtacatacggttaagtttgcagagttacttggtaagccagaaacggctgtagtcaagatggtaaaagagaataaattgccagttattgagcttcgtgatccaagtaagccgaacgctcgtgtcggtgagaagtgggttttcattccagagtttaatcgcgctgtacgagaggcgttttataaccgaccagttgaacagcgtgatgcatggcttttgtggatggggttgtga

SEQ ID NO: 398907 - DNA, 1107 bp, Salmonella enterica
atgcattcttactcaaaacatgataccttcaaaacatttttcaataacactaacaaaaaaaacaaaatgaaacaccaaaaagttaatatagtcaaaaagaatggtgaattctctttaagcctacttagcttcaagttggttcatataaaaagaacacaagagaataagagaagcattaattattactggaatagcaggacaaaagaagtcatatgtggctcaggttcattgcgcaatcatcacagcataccatctatcgcccatttatttaattataagaaaaaaacatgcgatctaagtcgcgaagagatacaacttggcgactccgtatgtgttttatttaatacaacagcagccctttttctttttggttcaattgttggtgtagacaagctaaaaaaagaaacttattttcacatattgcctcacgacaaaaactttccatttcaacgcaatcatgtaatcaaagtaaagcaccaaaaagacaatatttttcttttacgtgacgggaaaaatgaaagatatgaatacatggcaacaaaaaatctagtatttgcaaaatatcaataccaagttgaatttgccgaaatggttatttcatatatcaaaagtacgcagctcataataaattatgtctccgacaaaaataaaacaattaatgaaaagacgatcttagaatgccataaagctctttttggccatatttatgattgggcaggtgaatacagaaaccatcccgttgttgttggagataaagagcgaccaacaatggaacataatgaagtcaaaaaatcattaaaagcctgtcttagaggttgcacaaaaaaagaacttagcaaaataaattctaaagcagagttagttcataaactagctactctccatgcagaaatcgcatggatccacccctttcaagatggtaatggtcgttcaatacgattatttcttcagattgttgcaactactatgggttatgaatttgatatggaaaagctagatggagatgtgcgaaataaacgtgcgtaccattatgctgtaagacgcgcaatacacgacagtaacagaaatctgattgcccttatttcaagggcaatcaaagagctttaa

SEQ ID NO: 398908 - DNA, 531 bp, Salmonella enterica
atgaatgattcgcgactgctgccgaccggctcatcaccgcttgaagtcgctgccgcaaaagcctgtgcggaaattgaaaaaacgccggtcagtattcgtgagctgtggaacccggacacctgtccggcaaatctgctgccgtggctggcgtgggcgttttcggtcgacaggtgggatgaaaagtggccggaagcgacaaaacgcgccgttatccgcgatgcgtatttcattcactgccataagggcactattggtgcgattcgccgtgtggtggagccgctcggctacctcatcaacgtgacggagtggtgggaaaacagcgacccgcccggcaccttccgccttgatatcggcgtactggaaagcggcatcacggaggagatgtatcgggaaatggaacggctgattgccgatgccaaacctgcaagccgtcaccttattggtctgaatattacccaggacattcccggctacctgtttgccggtggtgtggcttatgacggcgatgtaattacggtttaccccggataa

SEQ ID NO: 398909 - DNA, 1818 bp, Salmonella enterica
atgagcacaaaatttaaaaccgttatcactactgccggagccgcaaagctggcagcggcaaccgcaccgggagggcggaaggtcaacattaccacgatggccgtcggggatggcggtggtaaattgcctgtcccggatgccggacagaccgggcttatccacgaagtctggcgacatgcgctgaacaaaatcagtcaggacaaacgaaacagtaattatattatcgcagagctggttattccgccggaggtgggcggtttctggatgcgtgagcttggcctgtacgatgatgcgggaacgttaattgccgtggcgaacatggccgaaagttataaacctgcccttgccgaaggctcagggcgttcgcagacctgccgcatggtcatcatcgtcagcagtgtggcctcagtggagctgaccattgacaccacaacggtgatggcgacgcaggattacgttgatgacaaaattgcagagcatgaacagtcacgacgtcacccggacgcctcgctgaccgcaaaaggttttactcagttaagcagtgcgaccaacagcacgtctgaaacactggccgcaacgccgaaagcagtaaagaccgcctatgaccttgctaacgggaaatatactgcgcaggatgccaccacagcgcgaaaaggccttgttcaactcagtagcgccatcaacagcgattctaaaacgcttgcggcaacgccaaaggcggttaagacagcgtatgaccttgctaacgggaaatacactgcgcaggacgctactacagcgcgaaaagggcttgttcagctcagtaatgacaccaacagcgattctgaaacatttgccgcgactccgaaagcggtgaaagctgccaatgataatgcaaacagacgcgttcctgacgggcgtaaggtcaatggcaaaccactgaccaatgatgtcaatgttacatcgcaggatatttttaacagtcagagtattgcgattggcgcaaaccagaatctggataattacaaaacgccgggactgtaccatcagccactgaatgcgaatacaagcgcatcgctgaaatacccggagaatcttgcaggtactctggttgtgcttaaaaatgccggaataacacaaatttactatgtctataacacatcaagaagctatacccgcagccagtattcaacggggggctggacatcatggacaccgcaggattcatttccggtaggtgctccaatcccgtggccttctgattcagtacctacaggctatgccctgatgctggggcagacttttgataaagcagtctatcccctgcttgcagcagcttatccgtcaggggtgattccagatatgcgcggctggacaatcaagggcaaacccgccagtggtcgcgccgtattatcacaggaacaggacggaattaaatcacatacccacagtgccagtgcatccagtacggatttagggacgaaaacaaccagttcgtttgattacgggacaaaaacggtcagcacgtttaaccacggcacaaaaacgacaaacaatacgggagcgcatacacacactgtcggtggtcgttacggtggtgactccatcgggggtaaacaacgcgtacaggtatcaggaaccaaccaggtgtcaagctctgcgggagcacacgcccatacagtcgacattggtcagcataatcacacggttggcattggtgctcacagccattccattgcgattggcgcgcatagtcataccgtcactgtaagtgccacaggtaattcagagaacaccgtaaaaaacgttgcgtataactatattgtgaggctggcataa

SEQ ID NO: 398910 - DNA, 579 bp, Salmonella enterica
atgactttcagaatgagtgcagagacacaaactatccgcgttttcaatttacttgatggaaccaatgaatttattggcgaaagtgacgcatatattccgccgcatacaggtcttcctgcaaacagtacagacattgcacctccagatattccggtaggttttgccgccgttttcaatgcagatgaaatgaaatgggatctggtggaagaccatcgcggaaagactgtctatgaaacaaaaacaggagcagccatttatatttctgaacttggctcattaccatctgatgtaacaacaatttccccgaccggcaactatcagaaatggaacgggaatgcgtgggtggacgatgagagcgcagagcgtgatgcgcttgtcagggaggctgagtctcagaagaaagagcagaccgcatatgcaggcgaaattattgccactttgcaggatgcagtcgatttagatatggctaccgaagaagaaaaattaagtctgacaaaatggaaaaaataccgggtattacttaaccgcgttcagccggaagatgctccgaatatagaatggccggaactaccgcaataa

SEQ ID NO: 398911 - DNA, 279 bp, Salmonella enterica; identical to SEQ ID NO: 376844

SEQ ID NO: 398912 - DNA, 414 bp, Salmonella enterica; identical to SEQ ID NO: 376887

SEQ ID NO: 398913 - DNA, 369 bp, Salmonella enterica; identical to SEQ ID NO: 381619

SEQ ID NO: 398914 - DNA, 429 bp, Salmonella enterica; identical to SEQ ID NO: 377165

SEQ ID NO: 398915 - DNA, 1599 bp, Salmonella enterica
atgctcaattcaagaacctacctttatcagcgtaacggtgtcttttacatccgtctcaggatgaagaccactggtcgcctgaccgcttcgcttccttctcacaaccggtataaactagcgtcagtatcactacggactaaggacagacgtaccgctatggctcactcacggcacatcaagtcagcacttaaagcaatacacgcagacaaccctagcgcatcatatgaggaactacgggagcacctgaagaccattgttgagtgggaacttgatgtcagccgtgatgaccttaacgacccggagtcctaccagctttatgttgaccagtacgacgacattaagtccaaccttcgggaagctgtagcaactgagcgtctgactgtagaccagcatcgctatatcaatgacgttatcggtgtgcttaaagcctgtcaggatagactcaagggcgatagctctggcctgttgtcttaccttgagcctgagactggcagtctaagaccgtccgtctccctatctgtagtggcggagcctgaagtccctgagcctaaagcactgaccctcgcgtctctcattgagcagtacgagcaggagaacgcccagaactggaagccagcgaccctaagcgagaaccgagcgtcacactctacgttaatcgagatattcgactatctggatattcaggatgtcggcaaggcgacccgttcagatatgcttagggtccgtgaagtcctccaactgttaccgaagaaccgcaagcaacgctttaagtctatgccgctgtctgacctgctgaaccgggagtctaagactgactgtcttgatgtcgttaccatcaacaataaatatcttatcaagatggctgctgtctttaagtgggcggtacgtaacgacctgatagctaagaacctgaccgaaggtcttgagctgaaagtcccgcagcgtaaagcctccgacgctcgtgatgctttcagtcctgagcaggtagggcaactactggtcgccgctaaagcgtactctcagaagaccgcaggtaagccataccattattacgtcaccgctctggctgcgattacaggtgcgagacttaacgaggtggcccagctacaggtcaaagacatcaggaccactgaggccgggaccgtgtatatccatatcaacgaagacgatagcagcctgccgggtaagagcatcaagaacgcccatagtgaccgctgtgtcccgcttgtcgatggcgcttatggttttgtattgtctgactttatgtcactagtggaagaccgtagaaaggctaagggtgataatgctatggtattcgatggcctcaagctgatgaagaacggctacggtgagcaggtgagcaaatggtttaacagaacgttgctacctaaagtcctcgctgaccgtagcggcttagcgtttcactcgtttagacatacagttgcgacccagttaaaacaacatggggtcgagttagcgtatgctcaggcgattatgggtcatagctcagggtctataacttacgaccgttacgcgaaagaggtcgaggtagatagattggttaatgtgatggctgatgtttataaggagactaactag

SEQ ID NO: 398916 - DNA, 654 bp, Salmonella enterica
gtgacgacgccctatacaccagcagtatttaaaaaagaagctttcaattgcccctattgtcatgcttttgccaagcaggaatggaatcagctatatgcgtattacgacgaaacagagtttccaatgtttgtatcgcaatgtgaacattgtaaggattacgcttattggtatgaatcgaccatgattattccagcatcagcgagtgtcgagatgcctagcccagacatgccagaagactgcaagtccgattacatggaagccagaagcattgttaatctttcccctaagggcgctgctgcacttctgcgcttatgtctccagaagctaatggtccatctcaaggagccgggtgaaaacattaacactgacattcggtctctcgttaagaaaggactccctgttcgtatccagcaggccgcagacatttgccgaatcgttggtaatcaggcagtccatccgggagagattaaccttgatgatgacccgaagttagctcatggtctctttaagttactgaacattattgttgatgaccaaattacgagaccgaaagagcttgaagatatgttcctaagcatgcctgaaggcccgcgccaaggtattgagaatcaggataagaaggcgagggaacagcaacaggccgctaacgagtag

SEQ ID NO: 398917 - DNA, 729 bp, Salmonella enterica
atgtcccaacaagaaatcagcgtcattaacctcgaccagcttgtctccatgacctcagttgaaattgctgagctgacaggcaaggagcaccgaaatgtccttcgtgatattcgcaatatggttgaggagcttaacgcactcaaaactgagcactgctcaaaactgagcagtcctataggggtgattgaagatgtctatctaaatgcgcaggggaaacagcagcctctgtaccgtctcgaccgtaagcatacttttattctggtcgctggctattccgttcacctccgcgccaagtgttacgaccatattcagacgttagagcgtcgagtccttcaactggaagaccagaagaagcgagcagccattcagtccgctaaccgccgaggcgtgacttggggcgactactgcaaaacctatggtctgcccgctcagaagctaataaccgcacttctccagcatcgtggcctctttcgtaagaacccaatcagtaacgagtggtctgtaaatccgaagtattccgactgctttcgtatcattaagccgtcagaccagaagttctcagcaggtgggtataacttccggttcaacgctaaggggctggaggtcttcggtaagcctgagatggttgacaagatgcgaggcatccttattgcattcactggcaccgaccagcagaagcaagagcacctcctgaagctggcacaatccggtaaggtggagggaatctaa

SEQ ID NO: 398918 - DNA, 177 bp, Salmonella enterica
atgatgattgacccgcgcacacctgaggggcgcatgactctccgttaccgtggctaccggactgaggtcatcctgaaggagcttggtctagacccggaagatgggacccgccagcaccaatcacgagacgagctaatagccaaactggtcgctatgaaactgtcgcctaaccgttag

SEQ ID NO: 398919 - DNA, 492 bp, Salmonella enterica
atgttattcaacaacaacgactggaaactgtcagtcaccgacatcaatccctacgaaaatactgtgagtctggacggtcagtcctatccgctgtctctggcgattaagaccctgattccgggctacctgtcaggcttaccgtccaccagccgcgaggcgatggagttactggaagctctggctgaagctggcgtgaccattggtaacttctttagtaatgaactgctgaccgcctaccaacgccgccagatgaataagcgtgtcgaggctgagcgtatcgctaaagagctggcgtctcagaaagagcgtacccgcgaaatgttcatgaccgaagacgaatggcagaaagagctacagcgccgtgaacagctcaaagctgaacgccggacctatggtgagcacctccgcagtgctacccattccgctggtcgctcacgtgcatcaattatggctgacctcgatagtggcgctaactggatggacagcttgtaa

SEQ ID NO: 398920 - DNA, 981 bp, Salmonella enterica
atgaccatgacaaaagacgctttacagtttggcattgagccagttcgcattactgatactgacaacattcaggtaaacgaaggtcttccgactaacgccgaccctcaggtctatgccttccagttagctaagctggtgaagaccatgctcaattctgtacttaaagacgctcaggataacattccgttccctgtagaagtcctgccgacccgtaacagcttaccgacgccaatcatcgctcacacgctggctgaccgctctgtggtcgttcctgtccgtggtggcaagcgacctgaagtcgtgaccgctccgtccggcactgaaatcaccgtggagccgattgaacaggccatcctcgtatcgcatcaaaccaagctgtgggacgctaagtcctcaactggtttcactcaggggacgctccagcaggacgctctgaacatctgcgataacgtggtccgtaccattaactctaagatggttgacgttctggagtcttccaagctgctgaagaccgtagagcttccggtcctgactggtagcctgaccgctaaggcagacgctatcatggacgctctgtatgagaacaccgagtcttctttcggttctgaggttactgactatggcgtcatcgcccatgagtcacacctcaaggctctctcccgtctggctgctaagcagggctttggtggtgaggacgctatcgtcgatatgctggggacagacatcgcctattacaacggtgaagaccgtggcgtcttcatgatggctaagcgcttcacggctctgagcttcggttgcttccgtcatgatggtgagaatattactgtggtcctatcacgtgatggcgactctcagtcccatgaccttgagattctcggtaaggtatacgtggtcgctgaggctgcaacgactgttaagatgggtactggctcggctactgctgtcctgcctgtagtcaaacgcctgagcttcactaaatga

SEQ ID NO: 398921 - DNA, 1389 bp, Salmonella enterica
atgagtggggggaaattgccggaggggtgggtgacaacccatctttcagaaatatgcagtaagcctcaatatggctacacaactaagtcaagctctatgggggatgtaaaatttttaagaacaaccgatattacaaaaggagcggttgactggtccagtgtaccttattgcatggatgccccggaagatgtttcaaaataccaattacaggacagagatattgtgatatctcgagccggttcggttgggtttagttttttggtacaaaaccctccaagccaagttgtttttgcttcataccttattcgatttaaaccagttaattatttttcagaatattacttaaaacgttttttagagtcgagtgactattggaatcagctgtctttaatgtcagcagggaatgctgtacaaaatgttaatgctcaaaagttatcaacacttacagtaccaataccacctatagccgaacaaaaaatcatcgccgaaaaactcgatacgctgctggcacaggtagacagcaccaaagcacgtcttgagcaaatcccacaaatcctgaaacgttttcgtcaggcggtgctagctgctgcggtaagcgggttgttaattggttcaaataaaagaaaccaccatccattatgtagtgaatggcaatggccagacctaccatcaacttggagtgttcataaatactctgaacttgttgatagcagactaggtaaaatgcttgataaagctaaaaattttggctctgcaacaaaatatcttggaaatataaatgttcgctggtttagttttgatttagaaaaccttcaagatatactaatttcagatatagagcgcagagaattatcactcaagcttggcgatgttttaatatgtgaaggtggtgaacctggtcgatgtgctatatggagtgaacctcaggacatacctgttattttccaaaaagcattacatcgagcacgggtaaaagacaaaatcatccccgaatggttagtttataatttgaaaaatgattcaaataacattagcttatctcagctctttacaggaactacaattaaacaccttacaggaaaagcactagcaaattatcccatcagagttcctccattagaagaacaacacgaaatcgtccgccgcgtcgaacaactcttcgcctgggccgacaccattgaaaagcaggttaacaacgccctgaaccgcgtcaacagcctcacccagtcaatcctggcaaaggccttccgcggcgagcttaccgcccagtggcgtgcggaaaacccaagtcttatcagcggtgaaaacagcgccgccgccctgctggaaaaaatcaaggccgaacgcgccgccagcggtggtaaaaaaacctcgcgtaaaaaagcctga

SEQ ID NO: 398922 - DNA, 969 bp, Salmonella enterica
ttgttaaactcatttaaactttcgctacaatacattctgccgaaactatggctcactcgcctggcgggctggggcgcaagcaaacgagcaggatggctgacaaaactggttatcgatctcttcgtaaagtattacaaagtcgatatgaccgaggcgcaaaaaccggataccgccagctatcgtacgttcaatgatttctttgttcgtccgctgcgtgatgacgtgcgtccgctcaataccgatcctaacatcctggtgatgcctgccgacggcgtgataagccagttgggtcgtatcgaagaagataaaattttgcaggccaaaggccataattacagccttgaagcgttgctggcgggtaactacctgatggcggataagttccgcaacggcacgtttgtgaccacttacctctcccctcgcgactaccatcgcgtgcatatgccatgcaacggcatcctgcgcgaaatgatctacgtgccgggcgatctgttctccgttaactatctgaccgcgcaaaacgtccccaacctgtttgcccgcaacgagcgcgttatctgtctgtttgataccgagttcgggcctatggcgcagattctggtcggcgcaactattgtcggcagtatcgaaaccgtctgggcggggaccattaccccgccgcgcgaaggcatcatcaagcgctggacctggccagaaggcgaacatgaagggtctgtcgccttgttgaaaggccaggagatggggcgctttaaactgggttccacggtcatcaacttatttgcgccggggaaagtgaatctgatcgcgtcgctggcaagcctgtccgttaccaaaattggccaaccgctggcgacgtcgaccgaaacattcgtcgcgccggaggtggaacctgctccgctgccggcagaagaaattaaagctgaacacgacgccagcccgctggttgacaataaaaaagacgacacctaa

SEQ ID NO: 398923 - DNA, 150 bp, Salmonella enterica
atgccgacgcatttgtgcccgcaaatcatcagggccttgctcttccttgtttctgtaacgttggtggttgacaaggaaactcgcccacaggtcaacgttatctgcttcaaaagccagattgaggataaatttatagtcattcctccataa

SEQ ID NO: 398924 - DNA, 252 bp, Salmonella enterica
gtgaacagtgagtcgtggcgtgaaaccagcccggcgatagcgcacgttgctatcgccggattattgtctatggaaaacccccagctaggctgggggttccggaaagctttcagctttaagccagttattaaaaccccttttgatttgttaaaacatcttgcggtctggcaactgcaaaagttcaacaagaaatcaaaagggggtcccaatgggggacgaaaagagcttagcgcacacccgatggaactgtaa

SEQ ID NO: 398925 - DNA, 141 bp, Salmonella enterica
gtgttagccgcagaagcgatgggcgagctggtgcaggcgctgggcgagctggatgcactgatgcgagagctgggcgcgggcgatgaggcggatgcgcagcgccagttgctggaagaagcgtttgggggggagaaggaatga

SEQ ID NO: 398926 - DNA, 156 bp, Salmonella enterica; identical to SEQ ID NO: 381860

SEQ ID NO: 398927 - DNA, 513 bp, Salmonella enterica
atgataaataaaataaaatcagtagaattaattgaggagaatatgttgcagcaaataagcaaagacatatttttagtaaatgcaataccacctaatacatttgcaaacgggaaaggtattttaatatcaaatcctcaatggcttacagaaaaactactatctgtatcagcgggagttagtaagggaaaatatacaatgctgtatgtggctttacttgttgaaatggtggaaaaaatcaaatctatgagctccgatgagaaagatagaacttttaaaattttaaagcaaaaagaaaacgatcttaaattttcggttacatgcggaatggaaaaaaagaaaatacaattattagttcctgaaaaaacacttgatgatattaatgggttaatgcctgatagctttaagtattatatgattccagcattaattgaccatgctattaatttaaaagaacaaagcggaaatgtgtttttgtttgaaagcaaccatgaaggagagcattatgaaaactaa

SEQ ID NO: 398928 - DNA, 1935 bp, Salmonella enterica
atggcaaaagttaatgcaaaaggtttaaaaacatataaccatcagggttttttaacttcaaactcaggagcaaacagcagtgatagtcctctatacccaacacaagaagatgcttattatatcgatgcctggtcaggtatagagattacagatccaaatcctgcaaaacttgttaaagatatagaggaaggtgtatacgataaagttcatttccctacaaaaagatttcttaacgatttaaaagtgaaagatcttgcaggtggtttaaagaaatttaataagcttcacgagcttgatgaacaaccggaaggtgagcactttgtcttttatcttgatggtgttcctaagcacctacaatcaaaaaccagggaaattatcataagagaaatctctcaccccgattttatattcagaaaagaacagaatagcggtagaaaaccacagattatagtcaataaaggtctgcaaagtgtgcttgcctgggggattcaccgcaaccagacagatcatttgggaaatgtaattccagaccatttccacctcttccgttctgctcattgtatcactgataagaattatggtgtttcaacgaatgataaaggagagtttattccatttataaatgcagcaaatcctaataaaagaattgtcaatgctgctttattactaaaagataacaaagtaagaacgattgttgaaaaccagataaatatggctttggcagcggctgggatagaagcaacggtaacccttggttctttacaagaggaaattggtgcgacagatgaaattaaatcagaaaaattaaaaaaagaagcagaagaaaataataagcctcttgctgatgtagcacaagaacatatcaatgacgaatctcttgatgatgaagaaatttccgactctttaatgcaacatggaaatctttcagaacaatccatagaaaaacttgagtctataattaataaaacagcatttgacagtaatgaacaagtaagaagaaaacaggctcagataaaagagctaatggctgaacttgtcgaaagagaacaggaattacaagctattaataaaggtattctttatgaagcaaaatatattcaaactaaaaacctgttgaatgaaacttccagaaagcttgaatctgtaaataaagaacttgaagaagcaaataaactaaatgacgatttcaatgaaaaaataattgaaaacactaatactatttctaatcttaatgatgaattagcgagagaaagaaaatataacgaagaacaagaattacaacttaaccagttagaaaaagaacttgaaaccgaaaaaaatataaatgcggaaaactcagcactcattacaacccttaccgacaagaatactgttttagcagctaaccttgaacttgagcaaggtaagacggcagaactgacagccgaaaatgcagaacttaaagagaagcataaagttgagatcgccactcttcgtagtgagttcgctcagaaactggttaaataccgtaaaaactttgtggctcgtgttaaaaacaaagtggcaacggctgttgaacatgcaatacaggcatttagagataatgaattaccttcattacttaaagatgcaacaaccaaagctgttagtgaatataaattaaaagaattgcctggaaaacttagaaaagtaagagaggaagaagccaaaaaatcagagaaagaaattaaagcattaacaaacgatgtttcaacattgaagactaatgtaaatactttaacggctgataaagatacattgcagaaagattttgacgaattgtttaatgcaagcaaagaaaaagcaacggaaatgaataatgaaattgctcgtcttaaagaaattcttaaaagcaatggaataaaccctgatggtgataactcaccaaaaaagcctaaaaatgacaataagatataa

SEQ ID NO: 398929 - DNA, 525 bp, Salmonella enterica
atgaatgatatctcatatggtcgagaagcggaaaaatggccccgtgaatattctacgcttgctcgcaggatacaatttctacgcttcaatgattatcctgtaaagttggtaagcggcaacgggcaatcaataatcggttatatttcaaagtttaatcagaaagaaaatatgatcttggcatctgatgaagctaagggaagcaataggattgaggtaaaacttgagtttctcgcatcactcgaagaattgccgattggcgaaagtttaaccgcaagacttattgctgctgatgtttttaatgttcagccatgtgacccaacaaggaaagactttttctctatctgcaataagtgctttaaacaaggggtgggtataaaagtacatatgctagatgggcgtattctgataggggaaacaactggcgttaatgcttgtcaagtcggaatgattagacctaatggcaaccatatgcagatcatgtttgactgggttagcagaataacctcctcagattactctggttaa

SEQ ID NO: 398930 - DNA, 1467 bp, Salmonella enterica
atggcacaagtcatcaatacaaacagcctgtcgctgttgacccagaataacctgaacaaatctcagtcttccttgagctccgctatcgagcgtctgtcttccggtctgcgtatcaacagcgcgaaagacgatgctgcgggtcaggcgattgctaaccgcttcacctctaacatcaaaggcctgactcaggcgtcccgtaatgccaacgacggtatttctgttgcccagactacagaaggtgcgttgaacgaaatcaacaacaacctgcagcgtgtacgtgaactgtccgttcaggcaactaacggtaccaactctgacagcgatctgtcttcgattcaggctgaaattactcaacgcctggaagaaattgatcgcgtttcagatcagactcagttcaacggcgtgaaagtgctggctgagaataacgagatgaaaatccaggtaggcgctaacgatggtgaaactatcacgattaatttggcaaaaattgatgctaaaacacttggattagatggtttcaatattaacggtgctacaaaagcaaccgctagtgatttagtttctaaattcaaagctaccggtactgacaactatgatgttgctggtaatacttatacagttaacattgaaagtggtgctgttcagaatagcaccggtaattcgatgtatattagcgcagtagatgggtcactgactacttcaaacgatactaaagtcttgggtcaaggcgttgatgctacagcattagctgctgctggtcagggtaaagctcaggacgcaactttcaccctcaaaggtattgaatataaggtaacaagtgctgctaccacgaacggtaatggtacatatgaagctacaatcaataatgaaaaagtagtatttactatctcaggtagtacggctactacagggacagccgcaagtttggctacagataaacctatctataaaacagcggctggaacgcttactaccgaacaagtaagtaataaagctgcaacggtttctgatcttgatatcaaaaatggcaagaaaaccggtagttctttagtcgttgatggacaaaactacaaagtaagcaaggacggagtggtaacagatgctgttgataataaagttatgtatgtaggtaagtcgcaaggtggtagcccaattcttgtcaatgccgatgcagctaaaacgatgcaatcaactgaaaagccgctggaaaccatcgataaagcattagcaaaagttgatgcccttcgctctgacctcggtgcggtacagaaccgtttcgattctgctatcaccaacctgggtaacaccgtaaacaacctgtcttctgctcgtagccgtatcgaagattctgactacgcgaccgaagtgtctaacatgtctcgtgctcagatcctgcaacaggcgggtacttctgttctggcacaggctaaccagaccacgcagaacgtactgtctctgctgcgttaa

SEQ ID NO: 398931 - DNA, 261 bp, Salmonella enterica
atggacttcctgttaacagatagccacacacagttgaagctggacgacagatacggggagatagctgatacagggcatatgttcgctatcctggtagaagatcactacaagaagaagtttaaggacataacaagaaaggggaatgtagtaacgggaaaggtagcaagagacatactggtagggttcaggttcagctactcgccaggttctctatggagggtgcgaataagcaccctccacaacgaaactgaaaaaaattag

SEQ ID NO: 398932 - DNA, 594 bp, Salmonella enterica
atggcgaaatttaatctcattggtaaaaatcccgaacaagcccaaaaatactttaccttctggactattgcaaatactggggaaaaggaaaaatatcaggaagctataaaattgtctcttgaacctggatttagcataaacaagaaaaaagttaacggactcttttttatggaagacttgactctttcttgtcataaggaacttttctctctgtttatggataaacaccgtcaaacggtcaaataccacttatcccgccgaactatcactatcccggaactgatcattgcaaggtatatgggaagctacaccaggttcgccagggacaaagaagtgatagatcacctgaccgctaacattgtctgcttcctcgatgccatgttggccaccggcacacataagcgattacagcacctggacagctacgagaagcttttagcaaaggtggaagagtattacatgggagataaggcagatttgccgtctgtaaggctctatgaggctctcaaagcgaaagttgcaggtaatgagcaagcggagttgcaggaagtcatagcagcgacgacaggaacgacaaagaagagaagactgtaa

SEQ ID NO: 398933 - DNA, 537 bp, Salmonella enterica
atgattttaaaagaaagagatttagtggggtttaaactcattctcaatcagaacaaaatatcatcaagcctggttaattataaactttgcattgtagaagctgacaaagtaataaaaagaatcttatcaagtaatgcttttatatacgaagatgtgacttgcaaacagtatagaaacaaaaaaacaggtgaatataagttaagtgttgaagcacaagaaactatcgacaggatgcaatctgtattcactaacacaaaagaaatttgcaaaataatgatccagtattttataagtcagacaaaccgacctgaaagcatgaaagaagaattaaaatcagttactacggaaatcactgaaaaggtttttgataaagtaaaagcagacgaccagactttaatacttatcacttaccaggaagttatgaagcatttaataaaaatggattggtggaaagataatgaagttaaaagaatggaaatacttaaagaaatagaaatgagaaaagagcatttagggggtgtttatggcgaaatttaa

SEQ ID NO: 398934 - DNA, 159 bp, Salmonella enterica
atgaaatatttcctttcggaaagtggtatggaagagcttcaggatagatttatgaactcatcatcgactatgtatcgctggagaaaagaattggcagtaaaatttggagtacgtgagccgcgctatctgttattgccggattcagttactttactgtaa

SEQ ID NO: 398935 - DNA, 501 bp, Salmonella enterica
atggaaaaacaatttaaaaaaacactggcaagcattcaaacccgttccaaccgttcaagctctgatacagtcagagagttctttaattgtgtgtcttacacaatgataatgaatagtcttttccagttagaacgaagagagttattctattcaggaagtaatatatatggtttcaaccagcttgctatacaagctggttttattgagaaatcaataatgttaactgacaggcataaattcagtattgaagaaaaattttataatcagtttgatactgaaattatagatacagctaatctaatctcgcttgaaatacaaaaacaacctttaacagatgttttcaatagaatatttgaagattgttatttaacaggaaaaaaaggtgaatggctggggcagtttttaacacctaacaggcttgcagaagcaatttctagatttgtaggctgggaaaaggatattaaatacaatattggcgataatggggtaggattccgataa

SEQ ID NO: 398936 - DNA, 195 bp, Salmonella enterica
atggcacaattgtttatggctcagatattaaccaacatgacttatcataatctcgattttaaatctcttcatgtttatataggtaatgcgattacagaatatgatactgtaagcactctttttttgagatttaagcaaaataaattagtagctcaacgggtattagaaattgataaagaaaagaaagcagcataa

SEQ ID NO: 398937 - DNA, 231 bp, Salmonella enterica; identical to SEQ ID NO: 20732

SEQ ID NO: 398938 - DNA, 357 bp, Salmonella enterica
atgcgactttttggttacgctcgggtctcaaccagtcagcagtctcttgatcttcaggtcagagcactcaaagacgcaggtgtgaaagcaaaccgtatatttaccgataaggcatccggcagttcaacagaccgggaagggctggatttgctgaggatgaaggtggaggaaggtgatgtcattctggttaagaagctcgaccgtcttggccgcgacactgccgatatgatccaactgataaaggaatttgacgctcagggcgtggcagtccggttcattgatgacgggatcagtaccgacggtgatatggggcaaatggtggtcaccatcctgtcggcggcactgttgcaaagttag

SEQ ID NO: 398939 - DNA, 333 bp, Salmonella enterica
atggcaattactgaagttttcacacacaagcagccgctcggtaacagcgacccggcgcacaccgcgtatggtcctggcgaactgacggcatccacgccagccttgacgccgctcatgctggacactacatccgggaagcttgctctctggaatggtactaatgcgggtgctgctgtcggcatcctcgccattgccgccgaccagaacagcacagagttgtgttattacaaatccggctctttccgcattgaagatgtgctctggccagctgccgtcaccgacgaaaacatcaaacgtaacgcgttcgccggtactgcaatcagcatcgtttaa

SEQ ID NO: 398940 - DNA, 1344 bp, Salmonella enterica
atggcgcacgagctgcgtaatcttccgcatattgccagcatggcctttaatgagccgctgatgcttgaacccgcctacgcgcgggttttcttttgcgcactggcaggccagctgggtatcactcggctgacagatactgtcgctggcatcacgcttgatgccggacaaattgccgaaccgctggcgttatttggtgatgatgatgacatggagccccgtccatcacgcagttatcaagtggcaaatggtatcgcggttttacccgtttccggcacgctggtcagtaaaacccgctcgctgcagccttattccggcatgacgggttacaacgggatcatcgctcgcctgcagcaggcaatcagtgaccccggcgtagatggcatcctgctggatatggatacgccgggcggaatggtgtccggggcatttgactgcgccgacattattgcccgtatgcgcgatatcaaacccatctgggcgctggccaatgacatgaactgcagcgcagggcagcttattgccagttcagcatcgcggcggctggtcacacaaacggccagaaccggatccatcggggtcatgatggcgcacagcaactatggtgctgcgctcaaaactaacggcgttgaggtctcgctgatttacagcggcgatcacaaggtcgacggcaacccttacgaaaaactaccagaagatgtgcgtgctgatttccagacgcgtatcgatgccactcgtcagatgttcgccgaaaaggtttccgcttataccggtatgtccgttcaggacgtactggacaccgaagcggcagtattctccggccaggagtcagtggacaacggtctggcggatgaacttgttaacaataccgatgcgctcggcgtgatgcgtgaagcactcgacagacgcaaaaaaataaccattggaggaactatgccatcaccttctgcatcagctgtggccactaagccagctgaccaggcagcaactcagacaattgcctcagctgaacaggtcactaccgttgacacgaccattgcttccgtagcggcccctgtagatgtcagtgcgcaggtcactgcagcagtagctgcagagaatagccgcatcatgggcatcctgaactgtgaagaggcgaaagggcgtgagtcacaggcgcgtgcactggctgaaacgccgggtatgacggtagagagtgcacagcgcattctggcggctgcaccgcaaagtgcccaggcgcgtaccgacacggcgctggatcgcctgatggaaacagcaccaggcgcactctcagcaggcagcgcatcttctgatgccgctgacgatttgttaaacaccccagtttaa

SEQ ID NO: 398941 - DNA, 1842 bp, Salmonella enterica
atgacggctgtcgaatgggccgatacgcattattatctgccgaaagaatcatcgtaccaggaggggcgttgggaaacgctgccatttcagcgagcaattatgaatgcgatgggcagtgattatattcgcatcgttaatgtcattaagtctgcgcgtgttggttattcgaaaatgctgctcggcgttattgcttatttcattgtgcataaacagcgaaatgagttgctttatctgccaactgatggcgacgcagagggcttcatgaagtcgcacgttgagccgacgatccgtgatgttccctctctgctatcgcttgctccgtggtacgggaaaaaacaccgcgataacacgctcgaattgaagcgcttcactaatggccgaggattctggtgcctaggtggtaaatcggcaaagaactatcgcgaaaaatctcctgatgttgttggttacgatgaactggcagcttttgacgcagatattgaaaaagagggctctccaaccttcttgggggataagcgtattgagggttctgtctggcccaaatcaatacgcggttccactccgaaattgcgtggaacttgccagattgagcgagcagcaaaagagtccgagcattttatgcgatttcatgtcgcatgcccgcattgtggggaagagcagtatcttaaattcggtgaccgggatacacctttcggcttcaaatgggagcctgagcaggccgaaacggtctactacctctgtgagcataatgcctgtgtcattaagcaacacgaactggacttttccaacgctcgttatatctgcgaattgaccggaatatggacgcgcgatgggctttgttggttctcatcgtctaatgctgaaattgacccgcctgaaagcgtaactttccacatctggactgcttatagcccgtttactacctgggtacagatcgttaaagactggttcaaaacgaaaggcgatacgggtaaacgtaagacattcgtgaacaccaccctgggtgagacatgggaagcgaaaatcggtgatcgccccgatgcggacgttttagcggaacgtaaagagcactttgatgcggcggtgcctgagcgagtggcgtatctgacagcgggtattgactcccagctcgaccgttacgaaatgcgtgtatggggatggggaccgggtgaggaaagctggcttatcgacaggcaaatcatcatgggccgccatgatgaagagtcaacgcttgcccgtgtggatgaggcgattaacaagacatataaacgccgtaacggtgtagaaatgtctatatcccgaatctgctgggatatcggtggtattgaccccactatcgtctacaaccgctctaaaaaacacggtctgtttcgtgtgatcccgataaagggtgcgtcggtttatggaaagccggtggcgaacatgccccgcaaacgcaacaaaaacggtgtttatctgacagaagtgggtactgataccgcaaaagagcagatttataaccgcttcacgctgaccgttgaaggtgatgagcctctggccggtgctgttcacttccccaataaccccgatatttatgatctttcagaggcgcagcagctgaccgccgaagaactggtcgaaaagtgggttgatggtaagagaaaaatcatatgggacagcaaaaaaaggcgaaatgaggctctcgactgctttgtttacgcactggcggcacttcgtatcagcatatcccgctggcagcttaaccttgattcacttcttgccagcctgctggaggaagaaggcacccgtaacaataacaagaccctggcggattacgcgcgggcattgtctggagaggaataa

SEQ ID NO: 398942 - DNA, 507 bp, Salmonella enterica
atggccgtgctattgaataaatctgatatggcttcctcgctgggaatatccgtccaagcctttgataaatggggtgtccagccagtagaaaagagagggcgagaagtcttctttgacgttcgttcagtcgttgataaccgcctcgaaaaccagagccgaaaactacaaccatctccgggtgaagatgatgaaagcgtcaatattgattatgagcgttggcgcttaactcgcgctaatgcagatgcgcaggagctggctaatgagaaaaaacgtcgcgaggtcgtagagaccgctttttgtaccttcgtgttatccagaatagccgctgaaatatccagtatcctggacggtattccgctttcgatgcaacgccggttcccggagttggaaaatcggcatatcgagttcctgaaaggggatgtagtaaaggcgatgaacaaagctgcggcgctggatgaacgaattccggggttgctgaatgattatatcgaccagtcaggtagctaa

SEQ ID NO: 398943 - DNA, 840 bp, Salmonella enterica
atgaaatatttatcgctacaacaggcgatgctcggcatgcgcgtaacaatgaccgacgacggcctgattctcaaaagtcctgcaggtagcgcacactacgatttgaaaggtcgccgccataccgtttggggtgatgcttctttcttccctgaacatctacgcgtgaaagataagcgcaaaccaaaaggtggccacgtcagttacggcaatggtgaaatcgttggccatcgggctgatggttctgtggcatggcgaatggggaatatcgaagagtctacaaaaacgcctgatgctgcattaggtgatctctcggctatttacacccttccacgttacagaattagtagcgacatgaagaggcaggagctgattgctaatgctcttgatgaagcaaagcagaggtccaaggaagtatttggcggatttccagcagataaaacagcggtggttttcttggctgatcgctgggtagctattgaaggaggctatacgccagatgaaattcgcgatgctgttgaacacatcaagcacagacgtctgacgaaggaattttgtaaggggctcgctgatttatctccatttgccgtgaaggacggacaggtatttatcaaggatgcggttatcccgaaagttcagttgagccgtactgaaacggacccgcgaaaagggtatgccatcaatgttggcatcggtcccgaaattaagagcagcgtgaagctaactcctgaaatggaaaaagcgatttcagatgtggtgtctgcgcaactgaaaaagagtcttcagccaggtggcgcgttatggtcatgcctgcagtgtactaacaggcgtttaggtgtttag

SEQ ID NO: 398944 - DNA, 312 bp, Salmonella enterica
atgaaagtttatatcgctgggccaatgacaggccgtgaaaactttaatcgtgaagctttcaataaagaagcggagcgtctgaaacgccatggccacaccgttctcaatccagccagcctgcctaatggtctggagcaacgtgaatacatggacatctgctttgcgatgctccgttgtgctgacgcgatcttaatgctccctggctggcagacgtcatccggtgctacagcggaatatcattacgcgtacaagatggaactgccggtttactcaacgctccattatccgccagtggccgaagtagcaggctaa

SEQ ID NO: 398945 - DNA, 204 bp, Salmonella enterica
atggcgaaaatcaaactgacactcgaacagattaaggctctggccaaatttgcggaagaagaaggccagcctgagtatacgatttgtcatggacaaattccgggtttcgataactttcctgattacgatggattgattgcgtattcggggtcagaagaacacagcgttctggctttggaagataaagggcagggcgatatctga

SEQ ID NO: 398946 - DNA, 255 bp, Salmonella enterica
atgctcaagagaaagcagctgccgcgcgtgatgtttctgcccgtttgtctggcactgttagccagctgcagcaacaggcaagaaaactcgctacccgcctggaagccgcaaagcacaccgcagatcttgccgcttccgtcagaggcaaaacagccggagccaacgccacaatgctcgccgacatgctcggaagtcttgcagcagaagctaaatattatgctgaacgatctgacgaaagctatcgagcaggaatga

SEQ ID NO: 398947 - DNA, 549 bp, Salmonella enterica
atggctacttctccagcattgagaaataagctaagtgcagcagtaatcggcctaattcttgctggcgcttcggctccaaaaattctcgaccagtttttggatgagaaagaggggaatagtcttaccgcgtacaaagatggcagtggcatctggacgatttgccgtggtgccacaatggttgatggtaagccagttgtgcagggcatgaagttaacgcaggccaaatgcgacaaggttaatgccatcgaacgggataaggctctggcgtgggttgaccgcaatatcaaagttcctctgaccgaaccgcagaaagccggaatcgcatctttctgcccgtacaacataggcccaggcaaatgcttcccatcgacgttctataagcgtcttaatgcaggcgaccgcaaaggggcctgcgaggctatccgatggtggataaaagatggtggccgtgactgccgactgacaaagggtcagaagaatgggtgctacgggcaggtggaacgccgtgaccaggaaagtgcacttgcctgctgggagatagaaaagtga

SEQ ID NO: 398948 - DNA, 270 bp, Salmonella enterica
atgaccagaatgagcacgatttacagcagactttcatacggaacgggtacgacattggcgggctgtggtgtctcttcgaaggcatacgccgaaagctctaaaaccgcagcatggatgattgcagaaaaagtcgcaggtctgaccctaagcgactgggcaattattgtaggcatcgcctgcaccattattacttgcgccgttaactggtattaccgtcgtaaagaaagggaggaccgattaaatggctacttctccagcattgagaaataa

SEQ ID NO: 398949 - DNA, 420 bp, Salmonella enterica
atgccccccccgccgttcgatgtcgggtatagcgagcatgaaaagcagtatgccgatctgaaaaagcaatacgatgcggttaaagcgcaatacgatggcctcaaagctcagtatgaaagcctgcgccgcccgttctctgtgactgcagatgttccctatacggatgtttgggagttcccaccggtgcagtattacccagggaaacacccatgcgagaagccagcttcgatgatggaacatatcatcaggagcagctcccgccctggcgatgtagtcgctgacttcttcatgggctccggtagtacgattaaggaagctctgaagcttgggcgtaaggccataggcgtagaaatagaagaagagcgttacctgcagacggtggaagaagtaaaagaagtagtaaaaaaagaaggtagttga

SEQ ID NO: 398950 - DNA, 732 bp, Salmonella enterica
atgttaaaaactacacaaatcaatggagcgcagctcgtttgcgcagattctctgcaatttatcaaaaccatccccgataattccgtaaacctgatcgcgacagacccgccatattttggcgttaagtcgaacgactgggacaaccaatgggaaagtgacgcggactttttgggctggcttgatgagtttctggcggagttctggaggatactggccccaaatggaagcctgtatatgttttccggttcgcggcttgcggcaaaaattgaactgctaacccgcgaccgtttcaatgtcctgaaccatatcacctgggctaaacctagcggtgtatggcggcggcaaaataaagagagcctgcgtacatttttcccggcaaccgagcgcatcatattcgctgaacattacggcgcgtctggctatgcgaaaggtcagtctgggtatgccagcaagtgtgctgagttgcggaaagacgtattttctccgttgattggggcattcgtgtcagcccggcagcagctggggatttcggcagcggatatcaacgctgcgacagggaaaaagatgtgttcacactggttttcctcgtcgcagtggcagttgccgtcgctggaagacttcaacaagctgcatgggctgttcatgcagcgggcgcaggttctcggcgtagcatgccccccccgccgttcgatgtcgggtatagcgagcatgaaaagcagtatgccgatctga

SEQ ID NO: 398951 - DNA, 228 bp, Salmonella enterica
atgaacgcgaaagaattacgccggaatatgaccgaagcagcgttaagcgttgagttcgtaatgcgtgggcatccacgcattagcctggttgagctgagtgaagcttgccgcttaagccaggcatcaacagagtttattattgagcagatggtttgttttggtgtggcgcggcgcggcgctttcggaagatactcactaacaaaagagtatgaaaacggaattatctga

SEQ ID NO: 398952 - DNA, 222 bp, Salmonella enterica
atgaattatcaaggcaacgaaaaaatgcgcaaagacgcggcagatatttccaacgaactctatgagttgtggcaaaaagttaaacgctttgaacgtgaatacagctttaacagcaaggacctgacagagcgccttgcaggccgtcttgttggcacgatggaacctaaactggcggaactgaataaatttatggctgatgtcgattatcagttcgaagactaa

SEQ ID NO: 398953 - DNA, 312 bp, Salmonella enterica
atgtttaacgtgataacccacccggcagcgctggatgagcttaaagaattacctgatgagctacgcggtcgcatgacccggcttatcgagagactggaaagtgaagggaacaagctgaaaatgcctcatagccgcgttatcggcggtggccttttcgaacttagggtaggggataaaaacatagcgagaacgctgtacgcttacgcggtaggcaacgagatttatctactacacgcatttgttaagaagacgcaaaagacgcctgctcacgcaattgatatcgccagaacgcgtctgaaggagatgagctaa

SEQ ID NO: 398954 - DNA, 288 bp, Salmonella enterica
atgaaagtaaaaggcatcccgtttaaccaggtgaaagaagaactgctcaacaccccggatgctatccggggttatgaagacgccgacaaggagttggcgatggttgaaatgctatacgaaatgagggagaaagctggtctgacgaaatcagcgctggcagaacgaatggggttacaaccgtcagctattagccgtctggaaagcaaccctctcggtgccagtatgaagacgttaactcgatacgctaaggcttgcggtgcaagcattgatattcacgctgtgtattga

SEQ ID NO: 398955 - DNA, 216 bp, Salmonella enterica
gtgcaagcattgatattcacgctgtgtattgatttagacgagtttctgcaggtgaaggaacaagggaaaggcgagggtatctcgcctttcccttttttattcgccagcctgcctgatgagctcatccgcgacaacatccttgcatctgtggaccatattacgagacatgcgcagaagacgtgccgcctcattcatatgaaggctggcctctggtga

SEQ ID NO: 398956 - DNA, 222 bp, Salmonella enterica
gtggataaaaaagcattgttattcgaacgccttcgccagaggagtgaaagcagtctggccagcggcggtgatggttttatttttgcctcaatgctggcgttcgacatcggtcttaacacgagaacgatccgggggatgctggactcagccgtgaaaaatgggaccctggaaaaaatggaacgtggagctggccgtgcacataagtaccggacaattcagtag

SEQ ID NO: 398957 - DNA, 327 bp, Salmonella enterica
atggcactgacacctgcagaacggcaaagaatccgccgtcagaagctgaaagagcaaggaacgaccaggcgtgactgggttctggaaccggaggagctgcgtatgctcagtgaaatttgcacgcagcgtcggccagggcgagagccgtattccgaaaatgaggttataggcctcctgatccgcaagaactacaaagagcttcaaaagacgctgtctggtacatgcaaacggtgtggccagcaacttccggtatccgattgcctgttcgatggcgagagtacatgccagctgacgactcttagactgaagctggccattaaagcgtga

SEQ ID NO: 398958 - DNA, 249 bp, Salmonella enterica
atgggtacaaaaaccatttgggatggtaaagaccctccacctgtcgggtgtcaggttttaatccacctttcttctgtcgggatgcgtccatacgaggtcgcaggatatgaagtacgccgttctgttgatgaggctcaatatccgcactggttatacgttgtgaaaattaaggttaaatcacttgatggaaaatgcacaaacgaacggtttttaagtgaggttttcccattggactggagagacgaatag

SEQ ID NO: 398959 - DNA, 612 bp, Salmonella enterica
atgagcaaatcccctaaagaaagttatgccgttccggagtggatgcgtcagttcctgccgttgtttcaaaacacagggggtaatgacgtcgaggagctgctgcacgatgaagacaccaacatgtttgccaatagcgttcgctacatgtttatcgtgtcagcacgttctcagttcgccttgctgatggatatgtatagcaaaggcatcatcacaggcagaactggtgcagctaaatgttccgacacattaaccgatggtcagttactttttcgtttgcaggacttctatggcgcaggacaagacgccattgagattaacgatcacgaatatgctcaggaatgtactgacgttgtaagcatcattcgcgaggtcattgaatcacggaaaaaactgaaagctgcagagaaacagattgctgagcttgagcgtgatgaaacacagttaatcgaagagcgagacagcgcggagaacgctctcgctgatatgtatgaggccgcaatggggaatcgccctgaatggagcaacctattcgggtacgctgaagctattgatgatgtggcccagcatatcaatcttctcgatctcgctgctgctaccgggaaaggagactga

SEQ ID NO: 398960 - DNA, 243 bp, Salmonella enterica
atgaagctgaaaatgtacacgacaaacggcccggagattatcgactcttctgaagtcgcacagttttatccggatgcggccagcggcaatgtgttgaccaaaatcgagacgctctccgccacgggagacagaaaaacggtgctggtaaagcactctttccaccaggttgtgtgtgcgctggccacggcatggggaatcgatgagcaaaaggccgagcaacagcttgaaggagccatacgatga

SEQ ID NO: 398961 - DNA, 360 bp, Salmonella enterica
atgggagaagtgagcaacggtcctgtatcgacactgcctggccatgcttccagcgttcctgcaggtgctaaatgcgatgaacatccagagcgcgaagccgttcgtcgcgtccagggcgaaacagattcgttcggctgcgagtatcacgacatgtgtcaggaatgccacgatgagtatctgaccgaaagcaagaatgccgaccattctgggaaatgtaactggtgtggcaaccatgtggaccatctttacccgcaccgagatatcgaagaagggagccacggccgcgtatatgaggtgtgtaaaccatgtattgatgaggagcgtcagcgctgggaggaagaagatgaagaaaggtggtga

SEQ ID NO: 398962 - DNA, 915 bp, Salmonella enterica
atggtaaatatccaaaaaacgattttagcgaagattattcataaatggctgaagagcgatttagtagtcatcgatacggaaacgacagggcttgacgaatttgctgagattatcgaaattgcgatcatcaatatgcgcggcgaagtattgctggacaccctggttaagccaacccacccgatcccaccggaagtaaccgaaatcaaccacatcacaaacgaaatggtcgcgaatgcaccagcgtggcgtgatgtgttcccgaaggtactggcgatcataagtaaccacaaatggctggcttggaactctggctttgatgctcgaatgctggatcagacctgcgtaagcacaggtatttatgccggtcatcagacctattacgcagctttagtaacatcgcgcattcacacaagccatattgacgctaaagccgtttatgaccagtggtatggagagtttgacgagaagcgtcaggcattcaagcgtcaaagtctgacaaccgcagctgcgcgacacggcgtgtcggtagagggagcacaccgcgctctggccgactgcaaaatggttctggccgtactgcaaaaagtctgcgctcccgttcctcagattgaaagctctgtcgagaaagacctgccgccctgcccgttctgctatgggcctccgtctctgttcacaaagttcctttcagggaaagattacaaacctctctatcagcccgtaatttacggccacgatggtttgcacgtcagctcatttgtcttctgccacgaatgcggcgcacagggtgaagaaatcgaaggccacatctacgacgattcagatgttgaccagctcgaagctgcagccaggaatgtctggtctgatcgcaacgagcgccaccgcgacctttatgtctccagcctgggggatgagtga

SEQ ID NO: 398963 - DNA, 747 bp, Salmonella enterica
gtggaactaaatagcattcgggcctgtgtatccacggctctgtcagatattcattatctccagcgtggcatccttgaggtccagctggagcagctgcgtctcgcaagctctgaccgtttcactgacaaaccaaccagaacgatctgcatcggcgatacggagtcttatgaagtatctgtccctgccgagcccgttcgttatcacgttggtaaatccttcaaacggtcttcaatgctgctgacagaattagatttcatgactgccagctggcgacgtgccatcgagcagttaaacagtgaagaaactgcatggttgcattattgctacggatgcaaaccgaattataagaatgatgtgaccatttgccagtggctgtggcttgattttttaatcgctcattccagagcaggctttaagaaaatgaaagcctcaacaaaaaaaatcatgcagagattaacttactacggaatacagcaagttaaatgtgaaatatttcacgaagtgcatgattcagattttgataggacggagcgagacgaacacataagttctttagtgggtgtatccgtcgaaagctggcgtaaggattataaaaaacgctggttattactgaaatcacgatgcatgcatcttaacgataccgcgttattaaatgcggcggagaagcgctgtgaaatcatcgaaagccatcgtgcaagaagtgccgacctgcctgtgtcagcaggttatgttcaggaaaccagataa

SEQ ID NO: 398964 - DNA, 216 bp, Salmonella enterica
atgaaacccgaagaacttgtgcgccatttcggcgatgtggaaaaagcagcggttggcgtgggcgtgacacccggcgcagtctatcaatggctgcaagctggggagattccacctctacgacaaagcgatatagaggtccgtaccgcgtacaaattaaagagtgatttcacctctcagcgcatgggtaaggaagggcgtaacagtggaactaaatag

SEQ ID NO: 398965 - DNA, 609 bp, Salmonella enterica
atgattaagggtatgaaaacacgaggcgaacgactgaaagcacgccgtttagagctgaaactgacgctgaagcaagtggcagaagctgtaggaatctctcttccgggcgtccaaaacttagaacgtggcgacgtaatgccgtcgctggagatcgggctatcgctggcaaaatgcctgcgtaagcccgtgcaatggatactgtatggcactgaatctgatccagaccgcgttcctgttattggtacgacagagaccggaccggatagagactggcagcctggagaacctgccaacacagagcgattcctgccgttcgtgagtcaacggaacaccgtttacgcactgacagtcgggaaccagattcagcatcactaccagccaggagacgttatcctggtcgattcctcgcttacgcttgtgcctggggaggatgtgctggtttgtgataataacggcgagatcacaattcaacgattagcccgttatgacgagcagcattactaccttgatagtgctaactctcaacgggttatccatgataaaagtgatcttcaatttgtgcaccaagtagtcggtacgatcaaatcgttcatggttgagggtagatga

SEQ ID NO: 398966 - DNA, 3975 bp, Salmonella enterica
atgaccttacaagaattctacgcggagcgctttggcagcgatccgttttcactgcttgacgcggcacgtgatgagctgactgagctggcgaagatggccggtatcaactggcctgcgtgtgctgataagattcagctcaatccgcgcggtggtgtagagcgctataccacctacaataattcctccccggaagctctgcagaagagccttaaaggccgcgtggaaatctattcacgccttgagcagagcaaagatggcatcagttatcctttcgttaacttcgttgaaaaagcgcatgacgctggctcctggagtggcttttcgttcctgttttcggagtatcgtcgtgaacagcaacgaaatggtgcgaccgtggtcgctcagccggaagaagaacgtgcacgcatggagcgccaggctgaagcacgccgcctccgagctgaacaacaacgcgttaatgatttaaaaaacaatcagatggagcaggagcgcctgcttggatggctggctttccatcgcgcctgggaacattcgccagctgaggacggttcatggccgtatgctgtaaaaaaagggattcgtgacgtatttagcgcttgtgatatacgtcgcgtgaccagtcacgacagtgcgaaatggagccgtggaccaacaacttacatggcgatacctctgtcccacctggacggaagaaaagacgggcggattgttggctggcaacgtatcgatctgaatggtggcaagttccagaccagcgccatcactaacggtgatttcgtcggtgcatgctttgttattggcgacctgcagggggcgcaaaaaattgcgactgcagagggtttcgccaccggggcatccatctggctggcgaccagaaacgacccgaaaaaacgctttgacgcggtagtcattgcggtttccgctaacaacatgattcacgttatcgagcagctggtgaacatgtacccggctgcgcaaatcacttgcgctctcgataacgaccgcaaatcctcagctgaaggaaaaggcaacacaggcctccgcaccggatacgacatcatggagaagttttccggcgtcaaatgtgtttacccaacttttgaggatgatcctgagctggaatgcagcgattttaacgacctgcacagcctgagagggctgaaggaagtcgctcgccagttaacgaaaaatcatctgagccgtgcaaccgacctgttgtcgatcacactgaataagctgcgtactctcccgcgtctgaacagacgcacttttgccaaagaactgcttcgcgccgttgatattggcatgctgacatgcccggtaccaaacagcccgaaagaacttatgcgccttttcagcagcacgctgcgggatatgggtatcgcagaaatttataacggtaccgttaaagatcacattacgcgccggttgaatcgcaaatgccgtgccgcgcaaacatcacgttcgttcagtgaacgcatcaccaacccaaaccttcgcccgtcacacatcacttacaaacggtttgaaacctccaggatgaccgatgaggtgatgacatacgccgcacagctgcagggcatcgttattgtccgcgccgggatggggtcgggtaaatcgacaggcctcctgcgtccactgatgctgcagtccacgcgtggcgtttccgtcgcgcaccgcgtatccctgataggcggcctgcatgaaatgatgaccgaagggaaaggcgcgaaagccgacattctgcactatcaggatcctggctatcaggaaatggcgccatatgccaacaagctgactatttgcatcaactccatacttaaaggctgctggcaacctctgatgcgccagcatgacttcttcggcttcgatgaagcaacacaaggcctgcgtgccattttggccgggcgtgcgatggaaaacccggtaggcgtattcaacacgcttatcgacgcgctggcgcgtactgaagagcatgccattatggtggatgccgacgccaacgatctgcttgtcgaccttgctgaactggcgatgaagcgacgcgaggagctgggcctacctgcctggctgcaaattcatgtgattgaacttccggtcgacgttcgcaaccgcgaaaccaacaagcctatccgcgtgttttataccgagaaaaatcggatcatgaccgaggttatcgcagcagtgcaacgcggcgaacgaatcatgctggccaccgacagttcgacgttcgccgaagacgttaccatgcagctgaggctccagttccctgacaaaaagtttctctgcgttaaccagaaaaacaaacaggagaaggaagtcgacgatttcaccaaccagcctaaagtgatggtgaaaaaatatgacggcctcatctacagcccgtcgatatcttcaggtgtatcaattgaggagaaacacttccaccgccatttcggcatgttctgcggggaagtggtccccagcgacgccatccagatgctgcgccgcgaccgtacagctcaggaatacatcatcggtttcgataagctacgcggtaaacgtgaaaccgatccggaaaaaatcaaacgcgcctacgcgcaggccttgctcgaaacggctggccactccgggttgctgacagacgttgtctttgacggtgaccgaatttcactcggcgtggctaactcttcattcatgcagctcaaaataaaagccgccgcgctcgaggcgtcggccagaaatgattatgccagcaacatgatttgcatcatgcatgatgatggctatcaggtcgcgcctatggccaccgacgcgcttgcaaacagcatcggtaaggatttacgtaaagaagcccgtgaactggtctttgagcagcttatggagcgccacctgagtgtcgatacccctgaccagggcgaacacgatgagttgataaaaaaacgcaccctgtctctggatgagcaggcccagctggtccgctgggacatcgaaaaggagctgcagctggatgtcgacgaggtggctttaaaattctatttcgacggcggcctgaaaaaagtgcgcctgtttgaaaccatgcagctggatgagataaccgcccgtcgccttgaccgtgaagaagcgttgattcactttacctacgcttatcgcgttgccggaagatggcagcagttcgtcactacggccatgacgcgggaacaggccgacgcagagttccaggctaaattcccggccataaccgattaccgagtgaaatcgacccctgctgttgagataggcatgcgtggtttctacaccctcaaatcggcgacgctgcagcagtacttccgcgactgcggtatcgatccaaaaaccctggaaggtgaagcagacatggacgccctcaaacgcgccagagataacctgctcaccccggaacggcgcgatctgctaaacaacgttttacgcatcggcggcttcaacacagagaaaggcaagaagaaagcgcctgcagacctctgcataggcatcctggagtcgatggggctatccagtaagaccagacgcgccagagacggcgatgcacgccccacgatgcgttctattgacccggactcggtcgagttcctcatgaatatcgtggagaagcgtcgcgaggccggtttatcaattcacgcacgtaaggtggaaaaaaccaccatcgaagtggatcgcgatttggatctaaatatagatatacatggtaaccctcgatccaaaacagagcacgttccggacgccccacaatcagtaattatccaggcactggaggctatcccggtggcggtaccggaggcgtgggcggagagcgcgttgccagcaaccgaaatggaggcggtacgcctgtggccagtggccagcatcgcgagaacgttcgcctcgctgtacatgactgaatttatggacctgctatcagtacgcgagataaggctgctgaaagcgtttctgagccagcggcaagccgtggcgatataa

SEQ ID NO: 398967 - DNA, 249 bp, Salmonella enterica
atgggaaaacaacgggaatgccttgtcctcgtggagggatacgacccttatgtggtcaaggtcagccacgacgcgacaagctatagcgattacaaaactggccgggaacttccattcacgataattcggatgaacgggttctcagatagtgagggcgtttattgctgcattgccagcgataagagcatggaaaaccacacagacgaagccagggcgcttctaaaagcatataaggtgaagccactatga

SEQ ID NO: 398968 - DNA, 330 bp, Salmonella enterica
atgatgtcgacaccggagttcctgaagcaactggattacgagcagctgaagcactgtcgcgagctgtgccataaccgtatccgggaaattgaagccgaagagaagaaggtcgcctgggccgttactgatggtgggcttaactacggctggttccgaacagaagactacctgaaagcggttgagtgcctggcttctttggctgctgaacggtgggaagaatcggataaggctgacccgtctgcacgtggctggcttaatctttccgtacagggcagtcgtttgccagcgtccgagtacgaggcgttatttgctgatggccagtggggatga

SEQ ID NO: 398969 - DNA, 393 bp, Salmonella enterica
atgatgatggttattgccgagtacaaatatcattcgcctcttgataaggggtacatccgggtcaaggtaagccgttcccagcacaaggcgatttttcgggcgcggagaatccgtttgtggagtgcgccaaagtatttctacaacggcgaaacggtcatcgtagagcactttaccgctggttggtacttggctctggtatttattccctgcttgttaattgggccattgctgtatgggataccacaaacctggaaagacctgaaacgcggaattttccagagaaaatacggaagtttttcgtcagacagctggagggttataccaggaaagcattcagtggatgagcagccgattatcgacgcatggttgagagaaagggccaacagcaactga

SEQ ID NO: 398970 - DNA, 333 bp, Salmonella enterica
atgaaagtagaattactcggtggatcgtatgatgggcaaaccgtgcatttaaatgaattgccaccagatcgtcgtgggccagcaccatatccaaatagtctggtgatggataatacaggcgagatttacatcctgcatagccggtctgaaaaaggccacctgcagtatcgctataaagatatgccccactttgcggatggtgggtactccagcacaccaccagatagccatgagccagccgctcaggtatcgcctggggtgatttacatcgacggcaaagaggtagtgggtgtgcataaggtgcaggctcctacaccggataacgataactga

SEQ ID NO: 398971 - DNA, 165 bp, Salmonella enterica
atgtttaaatacaggttcgcggcgatctgccgtaccgataaaaaatcccatatccaccgcctttccaccattgcatcatccgagcgagaagctcgtcgccagttcgccagccgttttgtcctcgttctgtcagcccgtatcccggtcagcgaggtgatcgcatga

SEQ ID NO: 398972 - DNA, 231 bp, Salmonella enterica
atgaaccagatgcagttaaacgcccatggcctgctggagtcgattgaggagcgcctggcgcaggtagaagcgctcgtatcctctgcccaccgtaccatctccagttatgaggccacgctgtacttgcaggaagcagcggaacttctacaggtcgcacgcgaactcacgcaggaagctcgcggctgttccctgtctttatctgagcagctgaaatccggggaggcacaatga

SEQ ID NO: 398973 - DNA, 783 bp, Salmonella enterica
atgaaggctctctccgtcttttcgtttcaggaaagccaccctgttcgggtggttcttgtcggtggtgatccgtggtttgttgctgctgatgtttgtaatgctattggaattatcaatcaccgtgatgctgttggtaagctggacgaagacgaaaagggtgtaggttcagccgacacccttggaggtaaacaagaagtgacaatagtctccgagtccggcctttacactctcatcctccgctgccgcgacgcggtgaaacaggggacgacagcctggcggttccgcaagtgggtgacgaacgaggttctgccagctatccggaaaaacggcgagtatgcttttgtggagccagagcctaagaacgccggtgaaccactggactggcggcagaaagaagaacttcggggcctgataaacgacatagcacaaagttttcagtaccgtaacgcatgggttagcggcgtctggatggctctccgccgcgcctgcaggaacccatcaccgaacccaatcaccgtggatgatctcccggcaatcatcgccgagctgcgccggatattaacggctgcagaaacggccctgggcaacatgcgtgtctacgaacgggagctgctgcgcgatgtagttcgtggcggtcgccggagtatgtcctgtggagagctgccgatcaccgatattgatacggaactggagaaggtgctgccagcacattttgagctggccattgaaaagctggaaacgctatccacgaaactaacatcgccagcgattgcagaaaaatag

SEQ ID NO: 398974 - DNA, 228 bp, Salmonella enterica
atgaagcgatttattgtttttgcatacgacacgtatgagcgtcctgcaggggcgcgagatatatttggactggcatcagaacttccagaggctgaaatgcttgtctctgcagccaaagatacctccaatgtagatcagattgaaatttatgatattcacaaggaagcgctggtaactgaatggacgaaaggaattgaccaaaagtggcgggaattcgagccagagtaa

SEQ ID NO: 398975 - DNA, 1896 bp, Salmonella enterica
atgagcaaagtaaaaatcggtgagttgatcaacacgcttgtgaatgaggtagaggcaattgatgcctcagaccgcccacaaggtgacaaaacgaagagaattaaagccgcagccgcacggtataagaacgcgctatttaatgataaaagaaagttccgtggaaaaggattgcagaaaagaataaccgcgaatacttttaacgcctatatgagcagggcaagaaagcggtttgatgataaattacatcatagctttgataaaaatattcataaattatcggaaaagtatcctctttacagcgaagaattatcttcatggctttctatgcctacggctaatattcgccagcacatgtcatcgttacaatctaaattgaaagaaataatgccgcttgccgaagagttatcaaatgtaagaataggctctaaaggcagtgatgcaaaaatagcaagactaataaaaaaatatccagattggagttttgctcttagtgatttaaacagtgatgattggaaggagcgccgtgactatctttataagttattccaacaaggctctgcgttgttagaagaactacaccagctcaaggtcaaccatgaggttctgtaccatctgcagctaagccctgcggagcgtacatctatacagcaacgatgggccgatgttctgcgcgagaagaagcgtaatgttgtggttattgactacccaacatacatgcagtctatctatgatattttgaataatcctgcgactttatttagtttaaacactcgttctggaatggcacctttggcttttgctcttgctgcggtatcagggcgaagaatgattgagataatgtttcagggtgaatttaccgtttcaggaaagtatacggttaatttctcaggacaagctaaaaaacgctctgaagataaaagcgtaaccagaacgatttatactttatgcgaagcaaaattattcgttgaattattaacagaattgcgttcttgctctgctgcatctgatttcgatgaggttgttaaaggatatggcaaggatgatacaaggtctgagaacggcaggataaatgctattttagcaaaagcatttaacccttgggttaaatcatttttcggcgatgaccgtcgtgtttataaagatagccgcgctatttacgctcgcatcgcttatgagatgttcttccgcgtcgatccacggtggaaaaacgtcgacgaggatgtgttcttcatggagattctcggacatgacgatgagaacacccagctgcactataagcagttcaagctggccaacttctccagaacctggcgacctgaaattggggatgaaaacaccaggctggtggctctgcagaaactggacgatgaaatgccaggctttgccagaggtgatgctggcgtccgtctccatgaaaccgttaagcagctggtggagcaggacccatcagcaaaaataaccaacagcactctccgggcctttaaatttagcccgacgatgattagccggtacctggagtttgccgctgatgcattggggcagttcgttggcgataacggacagtggcagctgaagatagagacacctgcaatcgtcctgcctgatgaagaatccgttgagaccatcgacgaaccggatgatgagtcccaagacgacgagctggatgaagatgaaattgagctcgacgagggtggcggcgatgaaccaaccgaagaggaagggccagaagaacatcagccagctgctccaaaacccgtcttcaagcctgcaaaaaataacggggacggaacgtacaagatagagtttgaatacgatggaaagcattatgcctggtccggccccgccgatagccctatggccgcaatgcgatccgcatgggatacgtaccacagttaa

SEQ ID NO: 398976 - DNA, 1896 bp, Salmonella enterica; identical to SEQ ID NO: 398975

SEQ ID NO: 398977 - DNA, 228 bp, Salmonella enterica; identical to SEQ ID NO: 398974

SEQ ID NO: 398978 - DNA, 783 bp, Salmonella enterica; identical to SEQ ID NO: 398973

SEQ ID NO: 398979 - DNA, 231 bp, Salmonella enterica; identical to SEQ ID NO: 398972

SEQ ID NO: 398980 - DNA, 165 bp, Salmonella enterica; identical to SEQ ID NO: 398971

SEQ ID NO: 398981 - DNA, 333 bp, Salmonella enterica; identical to SEQ ID NO: 398970

SEQ ID NO: 398982 - DNA, 393 bp, Salmonella enterica; identical to SEQ ID NO: 398969

SEQ ID NO: 398983 - DNA, 330 bp, Salmonella enterica; identical to SEQ ID NO: 398968

SEQ ID NO: 398984 - DNA, 249 bp, Salmonella enterica; identical to SEQ ID NO: 398967

SEQ ID NO: 398985 - DNA, 3975 bp, Salmonella enterica; identical to SEQ ID NO: 398966

SEQ ID NO: 398986 - DNA, 609 bp, Salmonella enterica; identical to SEQ ID NO: 398965

SEQ ID NO: 398987 - DNA, 216 bp, Salmonella enterica; identical to SEQ ID NO: 398964

SEQ ID NO: 398988 - DNA, 747 bp, Salmonella enterica; identical to SEQ ID NO: 398963

SEQ ID NO: 398989 - DNA, 915 bp, Salmonella enterica; identical to SEQ ID NO: 398962

SEQ ID NO: 398990 - DNA, 360 bp, Salmonella enterica; identical to SEQ ID NO: 398961

SEQ ID NO: 398991 - DNA, 243 bp, Salmonella enterica; identical to SEQ ID NO: 398960

SEQ ID NO: 398992 - DNA, 612 bp, Salmonella enterica; identical to SEQ ID NO: 398959

SEQ ID NO: 398993 - DNA, 249 bp, Salmonella enterica; identical to SEQ ID NO: 398958

SEQ ID NO: 398994 - DNA, 327 bp, Salmonella enterica; identical to SEQ ID NO: 398957

SEQ ID NO: 398995 - DNA, 222 bp, Salmonella enterica; identical to SEQ ID NO: 398956

SEQ ID NO: 398996 - DNA, 216 bp, Salmonella enterica; identical to SEQ ID NO: 398955

SEQ ID NO: 398997 - DNA, 288 bp, Salmonella enterica; identical to SEQ ID NO: 398954

SEQ ID NO: 398998 - DNA, 312 bp, Salmonella enterica; identical to SEQ ID NO: 398953

SEQ ID NO: 398999 - DNA, 222 bp, Salmonella enterica; identical to SEQ ID NO: 398952

SEQ ID NO: 399000 - DNA, 228 bp, Salmonella enterica; identical to SEQ ID NO: 398951

SEQ ID NO: 399001 - DNA, 732 bp, Salmonella enterica; identical to SEQ ID NO: 398950

SEQ ID NO: 399002 - DNA, 420 bp, Salmonella enterica; identical to SEQ ID NO: 398949

SEQ ID NO: 399003 - DNA, 270 bp, Salmonella enterica; identical to SEQ ID NO: 398948

SEQ ID NO: 399004 - DNA, 549 bp, Salmonella enterica; identical to SEQ ID NO: 398947

SEQ ID NO: 399005 - DNA, 255 bp, Salmonella enterica; identical to SEQ ID NO: 398946

SEQ ID NO: 399006 - DNA, 204 bp, Salmonella enterica; identical to SEQ ID NO: 398945

SEQ ID NO: 399007 - DNA, 312 bp, Salmonella enterica; identical to SEQ ID NO: 398944

SEQ ID NO: 399008 - DNA, 840 bp, Salmonella enterica; identical to SEQ ID NO: 398943

SEQ ID NO: 399009 - DNA, 507 bp, Salmonella enterica; identical to SEQ ID NO: 398942

SEQ ID NO: 399010 - DNA, 1842 bp, Salmonella enterica; identical to SEQ ID NO: 398941

SEQ ID NO: 399011 - DNA, 207 bp, Salmonella enterica
atggcaacacagactgaactggatgccgcgcgcgctgcgttacatgacctgatgatggggaaacgtgtggcgacagtacaaaaagacggtcgaagagtggaatttacagctacctcagtcagcgatctgaaaaagtatatcgccgaccttgaatcacaggtcggaaccacatcacgacgccgggggcctgctgggttttacgtatga

SEQ ID NO: 399012 - DNA, 1593 bp, Salmonella enterica
atgaaaataccatctttagtgggacctgacgggaaaacatcccttcgggaatacgcgggatatcatggaggtggtggcgggtttggtggtcagctgcggggctggaatccgccgagcgaaagtgcagatgcagcactccttcccaactattctcgtggaaatgcccgcgctgacgatctggtgcgaaataatggctatgcggcaaatgccgtgcagctccaccaggaccacatcgttgggtcatttttcagactcagttatcgaccaagctggcgttatctgggtattaatgaggaagattcacgcgcattttcgcgggatgtggaagctgcatggaatgagtatgccgaggatgacttttgcgggattgatgccgaacgtaagcgcacgtttacgatgatgatccgcgaaggtgtggccatgcatgcgtttaacggtgaattatgcgtgcaggcgacctgggacagcgattcaacgcgtcttttccgcacccagttcaaaatggtcagtccgaagcgcgtcagcaacccgaacaatatcggtgatacccggaactgtcgtgccggtgtaaaaatcaatgatagcggtgctgcgctgggatattacgtcagcgacgacggataccccggctggatgtcgcaaaactggacctacatccctcgcgaactacccggtggtcgaccttcgtttatccatgtattcgaaccgatggaggatggacagacccgtggggccaatgcgttttacagcgtgatggagcagatgaaaatgctcgacaccctgcaaaatacccagctccagagcgcgatagtgaaggctatgtatgcggctaccatcgagagtgagttggatacccaatcggcgatggattttattctcggcgcagataataaagagcagcagagcaaacttacgggctggctcggtgaaatggcgtcttattactcagctgcgccggttcgcctgggtggggcaagggttccacacctgttgccgggtgattctctcaaccttcagtcggcgcaggacaccgataacggctactcgacttttgaacagtccttgctgcgttatattgccgctgggctgggtgtgtcgtatgagcagctttcacgaaactattcgcagatgagctactcaaccgcacgcgcaagcgcgaacgagtcctgggcgtattttatgggccgtcgcaagtttgtggcatcccgacaggcctgtcagatgtttctttgctggctggaggaagcgattgccagaagggtggtcacgctgccttcgaaagcccgtttcagtttccaggaggctcgaacagcctgggggaacgccagctggattggctctggccgaatggcgattgacgggctgaaagaggtgcaggaagccgtcatgcttattgaggctggtctcagcacgtatgagaaagagtgcgccaaacgcggtgatgattatcaggagatttttgcccagcaggtccgggaaacaatggagcgtcgtgctgcgggtctgaaaccaccggcatgggccgctgccgcttttgaggctggactgaaaaaatcaaacgaggaggagcaagatggcgcacgagctgcgtaa

SEQ ID NO: 399013 - DNA, 1344 bp, Salmonella enterica; identical to SEQ ID NO: 398940

SEQ ID NO: 399014 - DNA, 333 bp, Salmonella enterica; identical to SEQ ID NO: 398939

SEQ ID NO: 399015 - DNA, 1026 bp, Salmonella enterica
atgtccgtttacaccactgcccagctgctggcggtcaatgagaagaaattcaaattcgatccgctcttcctgcgcatctttttccgcgaaacctatcccttcagtacagagaaggtttacctgtcgcaaattcctggcctggttaacatggcgctgtacgtctcgccgattgtctccggtaaagtgatccgctcccgtggcggcagcacgtctgaattcacgccgggttatgtgaagccgaaacacgaagttaacccacagatgaatcttcgccgcctgccggatgaggatccgcagaatctcgctgacccggtctaccgccgtcgccgcattatcctccagaacatgaaggatgaagagctggcgattgcgcagatcgaagagaagcaggctgttgcggcggtactcagtgggaaatacaccatgaccggggaagcgtttgagcctgttgaagtggatatgggccgcagcgctggtaacaacattgtccaggccggtgcggctgcatggtcaacccgcgacaaagaaacgtatgaccctaccgatgacattgaaacctacgcgctcaatgccagcggtgtagtcaacatcatcgtgttcgatccgaagggctgggcattgttcagttccttcaaagcagtgaaggagaagcttgatacccgtcgaggttctaattctgagctggaaaccgctctgaaagacttgggtatggctgtttcatacaagggtatgtatggcgatgtggccatcgtggtgtactccggccagtacgtcgaaaatgatgtcaaaaagaactatctgccggatctgacgatggttctgggtaatacacaggcccgtggcctccgtacctatggctgcattcttgatgttgatgcccagcgcgaaggtatcaatgcctcgacacgttacccgaaaaactgggtgcagtctggcgatcctgcgcgtgaattcaccatgatccagtcagctccgctgatgctgctgccagaccctgacgcattcgtctccgtcaagctggcataa

SEQ ID NO: 399016 - DNA, 444 bp, Salmonella enterica
atgacagaaaaagaaaagctgattgctcggctgaatgaacttggtacccagcttaaccgcgaagtcagcaccagcggcaccattcaagaactcactatgcgtattgctgagcttgaagaggagctggacggagacgctatctcgtttgacggcgaaagcgacgggcagaatgctgccgacagcaccgacagcaccgacagcaccgacagcaccgacagcaccgacagcaccgacagcgatgttacaggtgcggaaaaagtaaaagcggaagcaggcacaaagggtgaccgggtatcagtagaaacgctggccaccctgcatgttgaggcacttcatgccacgcgtaacgaatcggtatccatcgttgaacccggtgtgattatccgcgtatccgaacgggatgcagacgagctgatctcaaaggggctggctcgcgaagtctga

SEQ ID NO: 399017 - DNA, 354 bp, Salmonella enterica
atggctgatttcgacaatctctttgacgaggccatgtcgcgagcagatggtgctatccgtggtgtgatgggcacagaggcaaaggtgatgtcaggcactttgtcaggtgccaccctggtcggtgtattcgatgatccagaaaacatcgggtatgccggtgccgggattcgcgttgaaggtaccagcccgacgctgtttgttaaaacctccactgtcatccaactgcagcgtatggacaaactgacgattaacgggcggcaattctgggttgatcgtgttggtccggatgattgtgggtcctgtcacatctggctggctaacggctctccgccaccttcttcgcgtcgccgttaa

SEQ ID NO: 399018 - DNA, 555 bp, Salmonella enterica
atgtcaataaaaggccttgaacaggcgatagaaaaccttaacaacatcagcaaaacggctgtcccgcgtgcgtcggcgcaggctgttaaccgcgtggcaaaccgggccgtcagccgcagcgtggcggtcgtatcaaaagatacgcgcgtaccgcgaaaactggttaagcaacgcgccagggtgaagcgtgcgacggtcaataaacctcgtgcgcttatccgcgtaaaccggggcaatttaccggccattaaactcggtaccgcaagcgtgcgactttcccgcagaaaacgggacaagaaaggggccaacagcgttctgcgtataggaccgttccgttttccgggcggttttatccagcagcttaaaaatggccgctggcatgtcatgaggcggacgtcaaaaccccgctaccccattgaagtagtcagcatcccgctggcagctccattaactacggcgtttaaagaagaactgccaaagctcatggagtcagatatgcccaaagaactccgggcatcccttaccaaccaactcaggttaattctgacacgatga

SEQ ID NO: 399019 - DNA, 399 bp, Salmonella enterica
atgaaacacagcgatattcgcaaggtgattattgacgcgctggagagcgcgattggtactgacgccatttattttgacggcagacctgcagtgttcgaagagggtgattttcccgctgttgcggtttacctgaccgacgcggaatacaccggggaagaactggacgccgacacctggcaggccattctgcatatcgaagtctttcttgaggctcaggtacctgattctgagctggatgactggatggagacgcgagtgtatccggttctcgcagaggttccggggcttgaatcccttatcaccacaatggttcagcagggttatgactaccagcgcgatgacgatatggcgctgtggagttctgccgacctgaaatattccattacttacgacatgtga

SEQ ID NO: 399020 - DNA, 738 bp, Salmonella enterica
atggccacaccaaacccgctggcaccaacaaaaggtgctggtaccaccctctgggtttacaccggaaccggtgatccatacgccaatccgctttcagacgttgactggctgcgtctggcaaagattaaagacctgcagcccggtgaactgaccgccgaatctgaggatgacacctacatcgatgatgagaatgccgactggacatcaacgatgcaggggcagaaatcagccggtgaaaccaacctcacgctcgcgtggatgccgggagattccggtcagcaggacctggtgaactggttcgatgaaggcaccgtgaaggggtataaaatcaaatatccgaatggtgttgtcgacgtctttaagggctgggtgagcagtctcggcaagaccatctcgtctaaagaggtcatgacccgcacggcaaaaatcaccaacaatggcaaaccatcgctggccgaagacagtggtacagcgccgattgccgttacggggatcagcctggataaatccacggcggctgtggcggttgcagccacgacgcaactggtggtttctgtcctgccagcaagtgcttcagataagtctttccgcgtagccagctctgatccatcaaaagcaacggtcaccgtcagcggtaataccctgactgtcactggcgtagcggcaggcaccgtcgaaatcatcgtcatgagcaatgacggtaactttgtggcgatctgcaaagtcactgtttcctga

SEQ ID NO: 399021 - DNA, 423 bp, Salmonella enterica
atgtttctaaagagcgaactgcttgaatgcaacggcagcagcgtcacattgttccagctgtcagcgctacagcgtattgaacacctcgaatacctgaaacagctggaagcggttgaagtgggcgattttcaggcggccattacctttactgtgaagagtggagcgtatctcgtcgcaatgtcgctctggcacggacaccctttgaaaggctcacagggagaaaacgcggcggcggaagtggcaaagattcaggatgaggtcatgcagacatggccgaccgaactggttgccgaagcggaatataaggtgaaactcctgtccggaatgattgcgcctgtcattgatgaaccgacttcatccggtgaagaacgtaatgaacctgctgaacccgttactgcggaaaagccctcgccagtgagctga

SEQ ID NO: 399022 - DNA, 321 bp, Salmonella enterica
atgaaactggcgcgtgagttcggtcgcccggactggcgtgccatgcttgctggcatgtcctcaacggagtacggcgactggaaaatcttctaccaggacaattactttcatgatgcgcaactggatgctcatttctccggtttgctctacaccatctcaaccctgttttttgccgatccggaattatcaccggacagtttcagcatcctttcccctgcatcggatgccatcgacgtcgatgatccggatgacgatacgctgatggcgaaggctgcaggtatttcaggaggcgtgcgctatggcccagacggcagtcggtga

SEQ ID NO: 399023 - DNA, 2517 bp, Salmonella enterica
atggcccagacggcagtcggtgatctggtcgttaaccttgacgttaactcgacgaaatttaacgagcagctcaactacgtcaaaaaagaattaaagcagaccggtattacggcgaacgacgaagcgttacgtatccagcagtccttcagccgccaggagagcgccgcgcgtaaggcgggtatttcagtcggtcagtataacgcagcaatgcgaatgctccctgcgcagtttaccgatgtggccacgcagcttgcgggtgggcagaacccctggctgattctgcttcagcagggtggccaggttaaggactcctttggcggaataataccgacattccgggcgttgctggggactgtttccccgttgatggtcggtattggtgcactgtctgttgcaaccggcgcgcttttctatgcctggtaccagggctcttccacgctctctgatttcaacaaaacgctggtactgtcggggaatactgccggactgacagctgaccgcatgctggcgctggcacggaacggacaggctgcagggctgacgttcaaccagaccagtgaggccctgagcgaacttatcaacgcgggtgtgcgggctggttcgcgctttgatgaaatgagccaggcggtggcgcggtttactgatgcctccggcgtgccggtggagaaagtcgcagccgcatacggcaagctcacaacagacccgacgtcgggcctgatcgcaatggctcagcagttccacaacgttaccgcagagcagattgcccatgtggcgcagctgcagcgtgccggtgatgaggctggcgcactgcaggcagctaaccaggctgctacagccggattcaacgatcagaccaaagccatccgcgacaatatggggacgattgagtcttcagcagactccctgaagcgtgccttcaagtcgatgtgggatgcagcgcttgatatcggcagacctgataccgcacaggagatggtggcaaaagcccaggcagcgtttaaaaaggctgatgaaatctggaatctgcgtaaaggtgatcgttatgtgaatgacgaggcccgcgcccggttctggaatgaccgtgaaacggccagactggcgctggatatggcacagcagcaggcgggcattgctaaagcgaatgaagagaatgcctcccgtgaagcggcagcggagtccgatcgtcagaagtatgccgcgcaggcccaggccaactatgccaaaacccagactgcccttgagaaatatacggccaggcagagcgagcttaacaaggcgctgaaagaggggcggatcctccaggctgactacaacatcaacctggctgccgcgaaaaaagagtatgaggacactcttaaaaagccgacgaaaacccctgcagtcaggactcctgcaggtacccgcgcaaccgatgcggccagtgcccagacgatggagctggaagcacagctgcgtaccctgcaggagcataaggggataaatgacaccatcagccagcagcgtcaggagctgtggcgtcagcagtcccgttttacggttctggaagaggccgcgaagacccggacgctttctgccgaggaaaaatccctgctggccagcaaaagcgaagtgctttcccgcgcagagctgaacgcgaagcttggcgatcagatcgtggcgcaggagcggcttaaccgcctgcaggatacatcccagaaatacgtcacgcagatcggcgagaaaacacgagccctggctgatagcgctggtatgagcagtcgtgcggcccagcgacgaaatgaagaggcccagcttcttcagggctggaaaaatggcggcggttcggagaaagatgccggttatcagaatgagcttgatgcgctgcatgcgtattacgcagagcaggataagcttcggggcgactggcagtccggagccaaatccgcgtgggccgattatgttgactcggcttctgatgcttatgcccagatgaagtcctttgccaccagtacgtttgatggcatcgggcagaatatggcagatatgctgacgcgcggaaaggctgactgggctgactttacccgctctacgctctccatgctgacacaaattctgctgaagcaggcaatgaccggcctggtgggcgcggcctcatcggcgataggattcgcaggcggcggatttaccgggtctggtggaaaatatgaacctgcaggcgtcgtccaccgtggtgaatttgttttcaccaaagaggcaaccagccggatcggcgttggcaatctttaccggatgatgaaagggtatgccacgggtgggtatgtcggaggtaatggtaccggaccagctgcagcacctttcggtgtcaatgtgtatgcccctgtaacggtcgagaatgcctctggtggggcacagcagcaaaacgacggtgacaggcttggaaaggcgtatcagcaggtgattaataaatcagtcaatgagggtatcgctaaggctatccagcctgggggactcatctggaatgcgacaaatcgcaggtaa

SEQ ID NO: 399024 - DNA, 348 bp, Salmonella enterica
atgacgatagagacattcacctggggaattaaggtctccagccagcccaccgagggaagtaaagacacggtcagaaaggtccagttcggcgatggatatgctcaggtgagcggttcgggtctgaatgatgaaattcgcacctatgaatactctttttcaggggatccgaatacagcaaatcaaattcatgccttcctgcgccgccacaaggtgaagtcgtttattttcaccccacctttcggcgatatggcgctgtggcgtgtcgaggctgacacccttaaaaaagtggttaaaaacgtaaaagtggtaaccgtaactgcaacgtttgaacaggcatttgcaccatga

SEQ ID NO: 399025 - DNA, 756 bp, Salmonella enterica
atgagccttaatgctgattatcaaaaacttgagccgggcaatgaagtccggcttttttctgtcgatggcacggcgtttggaatgtcagatgtgctttttttccacgcccataacatcgcgcataccccggaagaaattgaagctgcaggcggggatgagaataagcttccggcgaagtccatctggtggcaggggcaggaatataaagcctggccctgccagatagagggtattgaggcaaccacggacggtaccagtccacagccaaaactgacggtggcgaacctcgacagctctatctcggcgctttgtctggcgtatgacgatctgctgcaggcgaaagtcactatccatgacacgctggcgaagtatctggatgccagcaactttccgcagggtaaccccaccgcagatccgtcacaggaaaagctgaaggtcttttatattgatgccagaaacaccgagacggatgaagtggtggaatttattctttccagcccgatggatttacagggccggatgataccgacccggcagctgcattctctgtgttcctggtgcatccggaacaaataccgtaccggcgacggctgcgactacgccggaacgcgctatttcgacaagcacaataatccggttgacgatccttcgctggatgaatgcaacggtacgctgacggcctgcaagctgcgtcatggagacagcaacgagctgccgttcggcggtttccccggtacatcccttatcaggagctga

SEQ ID NO: 399026 - DNA, 732 bp, Salmonella enterica
atgcgccagaaaaccattgatgccatcatggcgcacgccgctgcggaatatccgcgcgaatgctgcggcgtggtagcgcagaaaagccgggttgagcgctatttcccctgccgcaacctctcagccgagccgacagagcattttcacctgtcgcccgaagattacgcgaccgcagaagactgggggacggtggtggccattgtgcacagccacccagatgcgacgacgcaggccagcgagctcgataaggcgcaatgtgatgcaacgctgctgccctggcatattgtgagctggccagagggggatttacgcactatacagccacgcggtgaactgccattgctggagcgtccgttcgtgcttggccacttcgattgctggggtctggtaatgagctatttccggcagacccacggcatcgagctccatgattaccgcgtcgattatccctggtgggaaaacagctatccggacaacttctatcaggactgctggtacgaatgcggattcagggagtttgaaggtccaccccaggaaggggacctggtcatcatgcaggtgcaggctgataagtggaatcacgccgggattttgctggagggtaacatgctgctgcaccatctttatgggcatctgagccagcgtgttccctatggagggtactggcaggaacgcacgatgaaaatcgttcgctataaagatgtaaggggtaatgaagcatgcaggaagtga

SEQ ID NO: 399027 - DNA, 588 bp, Salmonella enterica
atgagccgtattgagcttggcggcgtgctcggaaaaacgttcggcaaagttcaccatcgcctgatttctcgcgtgagcgaggcgggtgttgcgcttgcaaagaccattccgggatttgagcagtttatgatttccagccagcgtcgcgggctcacttactcggtctttaaagggaaaaaaaacatcggtgaggatgaccttggcttcccggttacaggcgacgttatccgcattgttccggtggtcattggcagtaaaaaagcaggtgtactgcaaactatcctgggtgctgtactggtcgtagtcggtgtggccataagttacttttcaggaggctccctttcagccgttggtattggtgttgctaaatttggtgctgcggtgatgatcggcggcgtggtgcaaatgctttctccccagcccggagggcttgccagcaaacaaagctcagataaccgcgcctcctatgcgttcggcggagtaacaaacaccgccgctcagggctacccggttccgctgctgtacggtaaacgccgtatcggtggcgcggtcatttcagcaggcatttatgtcgaagatcagcagtaa

SEQ ID NO: 399028 - DNA, 3441 bp, Salmonella enterica
atggtcacatctactccgattagaggacgcaagggcggcagctccagttcccgcacccctaccgaacaaccagatgatctccagtcagtagcgaaggccaagattcttgttgcgctgggagagggggaatttgccgggcagctaacggctaaagatatctatcttgatggcacaccacttgagaacgctgatgggtcgcagaacttcagcggcgtggcgtgggagttccgtccgggtactcaggctcaaaactacattcaggggatcccaggtactgagaatgaaatcagcgtcggtaccgaagtttcaagcgctaccgcctggacgcacacctttaccaacacccagctgtcagccgttcgtctgcgtctcaaatggccatcgctgtttaaacaagaggacgacggcgatctggtcggctattcgattaactacgccatcgacctccagaccgatggcggaacctggcagacggtgcttaataccagcgtaaccggaaaaacaacctccggctacgagcgcagccaccgtatcgacttaccgcaggcgggaagcacatggacggtacgcatccgcaagctcacggcagatgccaatagcgcgaaaataggcgacaagatgacgctgcagagctacacagaggtaatagacgccaaactgcgttatccaaacactgcgctgctttacatcgaattcgactcaagccagtttaacggctccatcccgcaaatttcctgcgagccgcgcgggcgtgttatccgcgtgccggatacttacgacccggaaacccgcacctataacggcacttggctggggacgtttaaatgggcatggacggataatccggcctggattttttacgatctggttgtgagcgaccgctttggcctgggcgactgcctgacgacagcaaatattgataaatggacgctttaccaggttgcacaatattgcgatcagccggtaccagacggaaaaggcggttccggcaccgagcctcgctatacctgtaacgtgtatgtgcaggaacgtaacgatgcctacaccgtactgcgagactttgcggccatattccgtggcatgacgtactggggcggcgatcaaatcgttgcgctggctgatatgccccgcgatgtggattacagctatacgcgcgctaacgtggttgacggccgttttacctattcgggcagcaccacgaaaacccgttacaccacggcactggtttcctggtccgatccgggcaacgcctatgcagacgcgatggagcctgtatttgaacaggaactcgtgtcccgctttggttcaaaccagctcgaaatgacagctattggttgtacccgacagtcggaggcaaaccgtaaggggcgctggggtatcctgaccaataataaggatcgcgtcgtatcgttcaatgttggtctggacggcaacattccacagcccggttatattattgcggttgccgatgagctgttgtccggaaaggtgatgggaggacgtatcagtgcggttaatggtcgcgtcattactcttgatcgtgattctgctgctgcagccggaagccgtcttatggttaaccttccgtctggcgcatcacagagcaggacgatacagagcgtaaacggtcgggttgtcaccgtgaccacggcatacagcgaaacgccggaagtggaatcggtgtggattgtcgaatcagacgagctttatgcgcagcaatatcgcgttatcagcgtcgctgataataatgatggcacgttttcgatttcgggtgtttttcacgatccggataaatatgcccgtattgataccggcgcaatcatcgaccagcggccaataagcgttattcctccaggtaaccagtctgcgccagccaacattgtgatcagctcgttctcggtggttcagcagaatgtcagcgttgagaccatgcgcgtcagctgggaccaggcgaagaacgcaatcgcctatgaggcacaatggcgtcgcaatgacgggaactgggtgaacgtgccgcgcagctccaccacatcattcgacgttccgggtatttacgcagggcgctatctggttcgcgtgcgtgctatcaatgccgccgagatttcatccgggtggggctattcagaagagaagacgctgaccggcaaagtcggcaatccgccaaagcctgttggctttattgcttctgaaaacgtggtgttcggcatcgaactgaactgggggttcccggagaacaccgacgatacactgaagacggagattcagtacagcctgaccgggacaggggacgatgcgatgttgctggcagatgtaccatacccgcagcgtaaatatcagcagatgggactgaaggcaggacagattttctggtaccgcgcgcagctggtcgacagaacgggcaacgagtccgggtatacggattgggtgcgcgggcaggccagcatcgatgtttccgatatcaccgatgtgatcctggaggagattaaagactccgacacgttcaaagacctgatcgagaacgcggtggacagcaacgaaaaagttgcaggcatggctgatgacatcaaaaagcatgccgacgaactcgagcagcaggcgaaagacatccaggaaaacgctgacgggctggcgcaggccgaagtgaagatagacgagatttctgtgtcgatggacggcatgacaggaggtgtgaagaactcggcaattgcgataatccagaatgggctggcgcaggttgtcagtcgtcgttcccagacggcaacaaacgcagggaacagcgccagtatagaccgtgtcgatactacgattgctgatgccagccaggcggttgcccgcgcgctggttacgctggatgctgaagctggcggcaatatttctaactcaacggacctgacagaaactcttgctgatttcacccaggcttcggcaacaaaaattaacacactgacagtgaaatccggcgaaaacagtgccgcgattaacgttaacgcgcaggcaatagcagatgtcaacggtgacctcagcgcgatgtataacatcaaagtcggggtaacgagtaatggccagtattacgctgcaggaatgggtattggtgtggaaaacacgccatccggcatgcagtcacaggtaatcttcctggccgaccgctttgccgttaccactgctgccggaaacagcgtggcgttgccatttgtgattcagaacgggcagacgttcatcagggccagcttcattcaggacggtaccattgagaacgccaaaatcggtaactatatccagtcgaataactatgtggctggctctacaggctggaagcttgataaagggggaacgtttgaaattaacggtgtaggaggcggcggcaggatgttgatatccagcacgctcattcaaatctacgacagcaacaacgtgctgcgtgtcagaatggggttatggtaa

SEQ ID NO: 399029 - DNA, 297 bp, Salmonella enterica
atgccacaggggttacagtgttgggacggcgcggggcgtattgccgttgatttaagtgattacgctatccgctatattggaagcacaacagtaacatttgctgccggggaaacggcgaaagacgtttcatatcccggcattacccaggacggtacctttatatcaattgttacggctggcgttactgcaaacgaatattactgccgtgcttataatggcggctttactgcattctatttgcctatcaccggtagtccggcattcacttttaatgttgaggtttataactttcaatga

SEQ ID NO: 399030 - DNA, 642 bp, Salmonella enterica
atgagtggattcgaagtttacaacagtgctgggaaattgcttgttgactcgcaaaacaggtcaacccttttttatgatcagcgctctctgggggctgtgactgaaaaagggttttacagtgtagacagcccgtttggagacggaagcacgctgggatttacccagcaacaattctggaatgatgggaatttgcgctggcttcaactggatgcaaataagtatggtttacccggtgccgaccttcttgaagataatgcagggaggatgatacgcacggcgcgaaacattggcatgcagagcggttacctggatgtgttcgacgcaggaggaaaccttatctggagcgctgcatcagcatcgaaaatgcccagggtagttggtttttttgacgtgccagcgagttatgatctgcagaacaacacctttgcgataaacctcggctttaacccgtggattctggttaacaactgtccgggaaatctaagtgatgatggcgtggcgacgggttactcagggatcgctttaaaatggactggctcacagctgcagggcaggtatatatccaaaaatcagcgcaactggagccagacacttcaggggcgagggttacgaattcccattgctcagtttgtcggaatttga

SEQ ID NO: 399031 - DNA, 363 bp, Salmonella enterica
atgaaacgattattcgctgcagtatttttgctgctggctggctgttccagtaaacacacagacaacacattcagaatggattacccggttgatgccgcccgtttatcactgggtggtgatattcacgtgaatattgactgcgctaccaggaaagttaacgtaatttcagacagcagcaatggcatcttcagccgacatataaataagcggctcagcaatatctgttataagaaaacggataagcttgatgtcgtataccgcttcgaacctgcaaagggtgttaagcaagacatgatcgctactcattacccccgcgtcccgccagtatcaaattccgacaaactgagcaatgggaattcgtaa

SEQ ID NO: 399032 - DNA, 1260 bp, Salmonella enterica
atgctttataacactggcactatcgcaattaatggaaatattgcaaccggcacagacaccaactggacggcaccagccagccagattcgtgctggccagacgataatagtcctgtccagcccggttcaaattttccagatttcaagcgtggacagctccacctctatgacggttacaccagctgcatcaccggcactgagtggccagaaatatggaattctggtgtcggacattatctcagttgatggtctggcccaggccatgtcgcagctcatcaaagagtatgacgagaatattggcgcctgggagacgttcgccacaacctcagccaaccagaacattaccgttacgatcaatggcaccagtttatcaatcccggccattgggaaattactgcagaaggggagcaacggagctttgccggttagccagggcggtaccggcgcaacgaagatggaagatgctcgcacaaacctcggtttaggaaacagcgccaccaggaacgttggaacaacatctggaactgtggctgccggggatgattctcgcctgaaaacgatagatggaaaaactggtggaatagttaacggagagatttccctcactcgttcagcagcagaaaatatttcaaacagaattgtccttactaccattgattccgctgaggggattactgtatcagcagatcgccaaaattttgcagatggaaccaatcggcagatcctcaacttaggatctgtatctggttcgcgcaaagctgtacttcatgcggatgggggagttctgtgcagagctgggatgaacaacttttcagcattgcgaactggttattttatcgactacgagtcaggtccaatcgccctttacatagactctacgcgtgtaggaacaatacagctatcatcgacatctgacaggcttttgaagaaagaaattgagtatttatcggatagggatggatctgagccttctgccagtgcgctaaatgaagtccttcaatggaaccctgcaactttcaaatataagaaacgcggcattatcccggaaagcgataccaaccttgggttcatcgcaaatgatctggtagaagtctcacctgaatgtgtgaaggggaaagggctggaagatggctatgacgagaacaatacagcggatgcatattcgctggatcaggtggcgatgattgcaaaactagctttatcaattcaggcgttgcaggaaaaaatttcagtacttcaggccaatagcgttggaagctga

SEQ ID NO: 399033 - DNA, 387 bp, Salmonella enterica
atgggattcccgagcccggcgcaggactacgttgaagaacgaatatcactggacaagctcctcttgactaggccatcggctacctacttcatgcgcgccggtgccactcactatcaagaaggtatcctgtacggtgcgttgctggttattgatgcgtcacggacaccatgtgacggctcgttacttgtttgccgtatggatggcgaacttaggataaagcggtaccgtaagtcaccaacccctcatcttgaggatttgcaaacaggaagaagggaagagataccgaaatatgatgatgaaacgagtccggatgcaatatttggcgtgatcacctacagcattaacgacatgaggtcaggtgaatttgatgattgcccagtgttgtaa

SEQ ID NO: 399034 - DNA, 1029 bp, Salmonella enterica
atgaagaatcgctctatgttaaaaaatgcgcccaacatcgaaacgttcatgagcaataaccataatgcgccgcaaaaagcgccgtcggtttcgccgatggttggtgacttacagagcaaattaagttcgttgtccgggaatagcattacgctaccggtttgcggccgcaacgtgacttttaagctggaaaccattcctgctgataaagtcgaaaaggccacaatggtttggctcggtaatgaacgtgatcaggaattgctgaacgaatcagcgctggccgaccttatcccttcattcctcacttcaggacagcagaaccccgcgttcgccagaagaacgtcaggcattatagaaattgccgatggctcacgccgccgcaaaacagccatcatcactggtagcgattatcgggttctcgttggagagctggatgatgaacaaatgcagcagttgtcgcagttgggtaacgactatcggccaaccagtgcatacgaacgcgggaagcggtacttgcgccgactgaaagaatttgatggtaacgttaaagccttggctgaagcagagggcatcgaccgtaatatcgtgaaccgctgcatgaataccgccggattaccgagggagatcctgtctatcttcaaacatccgggagagctatcagctcgcgctggcgatgctttatctaaagtgtataagggtaacgagcagactatgctcgatggtgcgaagcagctgcttcgtatgaagcaagctggagaggatttcgagcccgcaagaattattcaggcactacaggactttattcttgtcgataaggaagaaacgccaaagaccgagaagaaatatggtgaaggtgttgtagctaaatacaagggtagttttgtcactttgaaagtagatagccgtaaaataccctctaatttaataaagaaaatagaagcgttattggaggcagaattaggtgcggctgagcaggttaatcgcgacctcgataagttggaaaatattataaaaaataaagagaaaaaatag

SEQ ID NO: 399035 - DNA, 1164 bp, Salmonella enterica
atgtcattaataaatttgcttaaagactgcatcaatcgcggtcaggaaatgacccgcgctattgccatcgcacagttcggcgatgacagcccggaagcacgtcgtataactcgccgctggggcataacagaagttgcagacctaatcggcgtaacaccgcaggctatcagagatgctgaaaaagctggccgcctaccggctcctgattttgagatgagggggcgagtggaacgtcgcgctggctacacaattgaccaaattagccatatgcggagcgtgtttggtaacccaaaccaaagacccgacgataaaaacccggtcgtactttccgttatgtcacacaagggaggggtttataaaacctcatctgcagtacaccaggcgcaatggttagccttgcaagggcaccgcgtcctgctagtggaagggaatgacccgcaggggactgcctctatgtaccacggttacgttcctgatttgcacattcacgcagatgataccctgcttccgttttacctcggcaaacgcgacaacgctgaatacgcgataaaaccaacatgctggccgggtctcgacatcatccctagctgcctagcccttcaccgcattgaaacagatctgatgcagtaccattccgaggggaagctacctcatccccctcatctgatgcttcgtgctgctatcgagtctgtatgggataactacgacattatcgtcatagacagcgctccaaacttgggtacaggaactattaacgttgtctgtgctgctgacgtcatcgtggtagcaacccctgcagagctgttcgactatgcatcagttcttcagtttttcaccatgctgctcgatctgcttgaaaccgtcgatttgggcggctttgaacctgtcgtccgcctgctcctgaccaaatacagccttactaacggcaatcaatcccggtggatggaggagcagattcgaaatacctggggagctatggtcttgcgacaggtcgtgcgggtcactgatgaagttggtaaaggccagatcaagatgcgcaccgtatttgagcaagcagcaaatcaacgctcaacgcttaatgcctggcgaaatgcagtggaaatctgggagccagtctgcaaagaaattttcgaagatctaatcaaacctcgttgggaggactaa

SEQ ID NO: 399036 - DNA, 1164 bp, Salmonella enterica; identical to SEQ ID NO: 399035

SEQ ID NO: 399037 - DNA, 1029 bp, Salmonella enterica; identical to SEQ ID NO: 399034

SEQ ID NO: 399038 - DNA, 387 bp, Salmonella enterica; identical to SEQ ID NO: 399033

SEQ ID NO: 399039 - DNA, 1260 bp, Salmonella enterica; identical to SEQ ID NO: 399032

SEQ ID NO: 399040 - DNA, 363 bp, Salmonella enterica; identical to SEQ ID NO: 399031

SEQ ID NO: 399041 - DNA, 642 bp, Salmonella enterica; identical to SEQ ID NO: 399030

SEQ ID NO: 399042 - DNA, 297 bp, Salmonella enterica; identical to SEQ ID NO: 399029

SEQ ID NO: 399043 - DNA, 3441 bp, Salmonella enterica; identical to SEQ ID NO: 399028

SEQ ID NO: 399044 - DNA, 588 bp, Salmonella enterica; identical to SEQ ID NO: 399027

SEQ ID NO: 399045 - DNA, 732 bp, Salmonella enterica; identical to SEQ ID NO: 399026

SEQ ID NO: 399046 - DNA, 756 bp, Salmonella enterica; identical to SEQ ID NO: 399025

SEQ ID NO: 399047 - DNA, 348 bp, Salmonella enterica; identical to SEQ ID NO: 399024

SEQ ID NO: 399048 - DNA, 2517 bp, Salmonella enterica; identical to SEQ ID NO: 399023

SEQ ID NO: 399049 - DNA, 321 bp, Salmonella enterica; identical to SEQ ID NO: 399022

SEQ ID NO: 399050 - DNA, 423 bp, Salmonella enterica; identical to SEQ ID NO: 399021

SEQ ID NO: 399051 - DNA, 738 bp, Salmonella enterica; identical to SEQ ID NO: 399020

SEQ ID NO: 399052 - DNA, 399 bp, Salmonella enterica; identical to SEQ ID NO: 399019

SEQ ID NO: 399053 - DNA, 555 bp, Salmonella enterica; identical to SEQ ID NO: 399018

SEQ ID NO: 399054 - DNA, 354 bp, Salmonella enterica; identical to SEQ ID NO: 399017

SEQ ID NO: 399055 - DNA, 702 bp, Salmonella enterica
atggctaattctcaaaccgcagtctttaagttcgaatctgataaccctatccgatcagtcatcgtcgctggcgaaccatggtttgtagcccaggacgtttgcactgcgctacgaatccagaacgtcacccaagcactcgaaaaacttgatgatgatgaaaggtctatgttcaacatagggcatgaacatcgtgcaatttttgatagccgagtaaaagagataaacatcatctctgaatcaggcctctacactctgatccttcgctgccgcgatgcggttactccaggcactatcccctaccgcttccgcaaatgggtaactggtgaagttctcccgcagatccgccgcaccggtcgctacgttcgtgaagaattatccccggcagataaagcgcaaaaggttgtggccagcttcatgcccgccattctggaagcaatgaaggcgggagaaaagcaggaatacagcgccccactcaaaccgaactatcttgaacacatccattcacctgaaggtgttcttggccttacggagcggtcaatgctgatggacctgctgcggaagatggacgccgacgggcataatgttgaaggtgctttttcagaggttacggcgatgatgaactacattgtcggtgccagtaaatgcctgcgcgatatccagactcatgcacagtacatcaacagcatggctggtaagttctga

SEQ ID NO: 399056 - DNA, 1467 bp, Salmonella enterica
atgctacgtatcgctaaagaagccctgacgtttgacgacgtcctccttgttcccgctcactccaccgttttgccgaatactgccgatctcagcacgcagttgacgaaaactattcgtctgaatattcctatgctttctgcggcgatggacaccgtgacggaagcgcgcctggcaattgccctggcccaggaaggcggcattggttttatccacaaaaacatgtccattgagcgccaggcggaagaagttcgccgcgtgaagaaacacgagtccggcgtagtgaccgacccgcagaccgtcctgccaaccaccacgttgcatgaagtgaaagccctgaccgagcgtaacggttttgcgggctatccggtggtgactgaagataacgagctggtgggtatcatcaccggtcgtgacgtgcgttttgtgactgacctgaaccagccggttagcgtttacatgacgccgaaagagcgtctggtgaccgttcgtgaaggcgaagcccgtgaagtcgtgctggcaaaaatgcacgaaaaacgcgtagaaaaagcgctggtcgttgatgataacttccatctgcttggcatgattaccgtaaaagatttccagaaagcggaacgtaaaccaaactcctgcaaagatgagcagggccgtttacgtgtcggcgcggcggtcggcgcaggcgcgggcaacgaagagcgcgttgacgcgctggtggcggcaggcgttgacgtactgctgatcgactcctctcacggtcattcagaaggcgtgttgcaacgtatccgtgaaacccgtgctaaatatcctgacctgcaaatcatcggcggcaacgtcgcgacaggcgcaggcgctcgcgcactggcggaagccggttgcagcgcggtgaaagtcggtattggcccgggttccatctgtaccactcgtatcgtgactggcgtgggcgttccgcagatcaccgctgtttctgacgcagttgaagcgctggaaggtaccggtattccggttatcgctgacggcggtatccgtttctccggcgacatagccaaagcgattgccgcaggtgcaagcgcggtaatggtgggttccatgctggcgggtacggaagaatccccgggcgaaatcgaactctaccagggccgttcttacaaatcttaccgcggcatgggctcgctgggtgcgatgtccaaaggttcctccgaccgttacttccagagcgacaacgccgctgacaaactggtgccggaaggtatcgaaggtcgcgtagcctataaaggtcgcctgaaagagatcattcaccagcagatgggcggcctgcgctcctgtatggggctgaccggttgtgctaccatcgacgaactgcgtactaaagcggagtttgtgcgtatcagcggtgcgggcattcaggaaagccacgttcacgacgtgaccatcaccaaagagtccccgaactaccgtctgggctcctga

SEQ ID NO: 399057 - DNA, 1350 bp, Salmonella enterica
atgttatcctctcaaacttcctcaatttttaccgtaagccgccttaaccagacggttcgtctgctgttagaacaggagatgggacaggtatggatcagcggcgagatttctaatttcacgcagcctgcgtcgggccactggtactttacgctcaaagacgataccgctcaggtgcgctgtgcgatgttccgtaacagcaatcgccgggtgacgttccgcccgcagcacgggcagcaggtgctggtacgcgccaacattacgctgtacgagccgcgcggcgattatcaaatcatcgccgaaagtatgcagcccgcgggcgaaggcttgttgcagcagaaatatgagcagctaaaagccaaactgcaggccgaaggcttgttcgatcagcagcataaacagccgttgccctccccggcccactgcgttggggtgatcacttcgaaaaccggcgcggcgctgcacgatattctccacgtgctaaagcgtcgtgacccatccctgcccgttattatctatccaaccgcagtccagggcgacgacgcgccggggcagatcgttcgtgctatcgaactggcgaacgcgcgcggcgaatgtgatgtactgatcgtcgggcgcggcggcggttcgctggaagatttgtggagttttaacgacgaacgcgtggcgcgggcgatttttgccagccgcattccggtggtcagcgccgtcggtcacgaaacggacgtcacgatagctgattttgtcgccgacctgcgcgcgcctacgccatcagcagcggcagaaattgtcagccgtaaccagcaggagttgttgcgtcagatccagtccgcccagcagcgtctgggcatggcgatggactactacctcgccaatcgcagccgccgtttcacgcagatttttcaccgtctgcaacagcaacatccgcaactgcgtctggcccgtcagcaaaccgcgctggaacgtctacgccaacggatgggatttgcgcttgaggccaggattaagcaggccaatcaacgccaacagtgcgtaagtcaacgcctgagccagcaaaatccgcagccgcgcattcaccgcgcgcagtcgcgcatccaacagcttgaatatcgtctgacggagaatatccgctcacggttaagcgaacagcgcgagcgttttggcaacgcggtcacgcatctggaagcggtcagcccgttagccacgctggcgcgcggctatacggtttcgacgacaacggacggcaaggtgctgaaaaagatcaaacaggtcaaagcaggcgatatcatgaccacgagactggaggacggctggcttgaaagtgaagtcaaatccgtcacgccgggcacgtaa

SEQ ID NO: 399058 - DNA, 6153 bp, Salmonella enterica
ttgaacaggacttacagtattgtctggagcgccgtgcgaaatatgtatgtcgtggcttcagaactggcgcgaggccacagcaaagttaaagcgcaagtatgcgcgagtgaaacccattctccaaaccaaaagtccgaatatggacaaataataaaagcaacgcgcgcggcgctggcttgcgccgtggctgcggcgctcggatttttcagcccgctggctatggccgataatcaggtatcatatgctgatgcgcagccccacgttctggatgcgtcaacgccgccgataagctattcgggcaccgatgaaggcgcggcgctatatgtctcgggtgtcgccaccgtcggctggcagcccaccacggtcacagggacggggctcgtcattgaaacaagcggaggcggggctgatgatccggatggcggtaagtatgtttccaacgccatttcgctggatcattacgctatccttgagcttaccgacgcgaagataaccactacgggtatttatacccagggtatttccgcagcggatggcagcacactgaggttaacagacagtacgctaacgattgacggcaatttcggcgtaatgacgttgtatacgggttcagaagcaacgctggacggtaccatcgttgaggcagctaacagcagcagcgcgcaggtgcaacaaggcagtacgctgaacgtgctggacggtagcacaatcaccctggcgcaaggccagataaacgttgttgccggaaacaccgcgacagacgagggttccaccctgaacctgtctgatagctcggtcagctctgcaggtacgatgagcaccatccagggtaccaataaggccgctcttaatctcaccaacgcgaccataacacataccaatgccagcggcgcggcggtacaggccaataacgccactaccctggatattacaggcggcaacattacctctgccggtacgggcgtgtatattctggcgtcggacgccaggatcgacggcgccaccatcaacgccgacggcgacggtatctttataaccagcaaaagaaaactcgacgggtatgaggatctcaacgcgctgacggtcagcgacgcaaacgtcacctcaaaaactgtcgcactgaacattgatggcagcacgaccattaacgaccccattgagctcaccaacagcacctttacggcgccgaccgcgatcaaattaggcagcaaagcgactattcaggccgaaaaaacgatgctgaccggcaacattgtccagactgacgcgtcatcgtcatcgctctctttaagccaggggtccacgttaaccggtagtgtagatgcgatgtttactacgctgtcgctcgacgacaccagccagtggaacatgaccgacccgtcaaccgtcggcaatctgaccaacgacggcgatattacgctgggcaacgcgagcggttcgacaggtacgctgctgacggtggacaataccctgaccttgcaggacggcagccagataaacgcgacgctggataccgccaacagcgcgccaattatcaaagccgccaacgtcacgctggacgggacgctgaaccttagctcaacggccacctttgtcgcgcccgaaaccgacgaacactttggatcgatcacgctgattgattcgcaaactgcaatcactaccgattttgacagcgtaacactggatgctgacacctccgctatgccggattatctgacgatcaacgcgggcgttgatgcgaatgataataccaactacgagttgtctacgggcttgagttggtacgcgggcgcaaattctgcgcgcgctgcgcatggcacttttaccgttgatgcaggcagtacctttaccgtcaccagcgaactggacgaaaccacggcgacctccaactggaacggcagcaagctaaccaaacaaggcgacggcacgctgatcctcagcaacaccggcaacgactacggcgatactgaaattgacggcggcattctggccgccaaagacgccgccgcgctcggcactggcgatgtgacgattgcagaaagcgcaacgcttgcgctgagccagggcacgctggataacaacgtgaccggcgagggccaaattgtcaaaagcggtagcgatgagctgatcgtgaccggcgataacaactacagcggcggcaccactatttccggcggtacgctgacggctgaccatgcggattcgctgggcagcggcgatatcgacaacagcggcgtgcttaaggtgggcgaaggcgagctggaaaacatcctttccggcagcggctcgctggtgaaaaccggcacaggcgagctgacgctaagcggcgacaacacttactccggcggcaccaccattaccggcggtacgctgacggctgaccatgcggattcgctgggcagcggcgatatcgacaacagcggcgtgcttaaggtgggcgaaggcgagctggaaaacatcctttccggcagcggctcgctggtgaaaaccggcacaggcgagctgacgctaagcggcgacaacacttactccggcggcaccaccattaccggcggtacgctgacggctgaccatgcggattcgctgggcagcggcgatatcgataacagcggcgtgcttaaggtgggcgaaggcgatctggaaaatacgctttccggcagcggttcgctggtgaaaaccggtaccggcgagctgacgttaagcggcggcaacgattactccggcggcaccaccattatcggcggtacgctgacggctgaccatgcggattcgctgggtaccggagctgttgccaacagcggcgtgcttcaggtcggcgagggcgagctggaaaatacgctttccggcagcggttcgctggtcaaaaccggtacgggcgaactgacgttaagcggcgataacagttactccggcggcaccaccattatcggcggtacgctgacggctgaccatgcggattcgctgggtaccggagctgttgccaacagcggtgtgcttcaggtcggtgagggcgagctggaaaatacgctttccggcagcggttcgctggtcaaaaccggtaccggcgagctgacgttaggcggcgacaacagctattccggcgccaccactatcactgacggcacgctgattgccgccaacgtcaacgcgctgggcagcggcaatatcgacaacagcggtacgctgatactggatgccaacggcgcatttgagcttgcgaacgtcaccacccatagcggcgccactaccgcgctggcagcgggcagcacccttgacgcgggccagttcacccaggaagacggcagtacgctaagtattgacctcggcgcggccaccgacgacgccgtgattaccgccgacagcgtcgcgctgggcggcacgctgaatgttaccggcattggcagcgttacagacagctggacgcctgaggcatacacctacacgctgattggcagcgacagcgccattacgaccgatttcgacgatctgaccgtcgcgggaatgaatagagaagatgttgacttcctgactatcgacggaaaagtcgatgaagcagacaacacccactatgatctgacggcctccctctcctggtatgcggacagagacaacgccactaccgacgcccacggcacctttaccctgagcgaccctgacggcagctttaacgttgcggctacactgacagacgttgacgatacgctggatccgggtagcagatgggacggtaaatcgctgaccaaagaaggcgcaggcacgctgatcctctctggcgacaacgactacagcggcggcaccaccatcaatgaaggtacgctggtcgccgccagtacgacggcgctgggcaccggtctggtagacaataatgccacgctggtgctggacgcagacggtgaagtcagcgcggtgggcggcatcaccactcatagcggcgcgacgacccaactggcgctcggcacctcgttggatctcggcgacagcgcgttaattcagcaagatggcagtacgctgaacgttgagctgaatagtgactcagtgcaaccgctgattaccggcagcagcgccacgcttggcggcgatttggtcgtcagcgacgccagcctgcaagcgcgcgcctccgacgcggagttccagtcctttaaactgatggatatgaccagcgatatcagcggcgactttaccagcctgacgatgaacctcactgacaagccggactatctgaccgtaaccgggacaatcaatcctgaagatgcgtcagaatatctgcttaccgaagggctgagctggaatgcgaccgccacgtcagcgacgccagcacacggcacgtttaccctgggcgcaggcgacagttttgaagtcaccagcgtactgggcgataaaaccggcaacggcgactgggacggtaaatcgctgaccaaactgggcgcgggtaaactgacgctgagcggcgcgaacacctatagcggcgataccaacgtacaggaaggcacgctatggctgtccggagacggctcgattggcgagatgggcagccagcaggcggtgaacgtcgcctccggggcgaccttcggcggcagcaatggtacgaccgttaacggtaaggtgaccaacgaagggacgctggtcttcggcaacagcgaggaaacaggcgctatcttcaccctcaatggcgatctgatcaacatggggacaatgaccagtggtagcagctccagcacgcctggcaatacgctttatgtcgatggcaattacaccggcaacggcggctcgctttacctgaataccgtcctgggcgacgatgattcggcaaccgataagttggtcattaccggcgatgcttccggcaccaccgatctgtacatcaacggcatcggcgatggagcacagaccactaacggtatcgaagtggtggatgttggcggcgtatcgaccagcgatgcgtttgagctaaaaaatgaggttaacgccggtctgtatacctaccgtctgtactggaatgaaagtgacaacgactggtatctggcgtcaaaagcacagtctgatgatgacgacagcggcggtgatgacacgccttcggatggcggtgacgatggcggtaatgtcacgcctccggacgacggcggcgatggcggtaatgtcacgcctccggacgacggcggcgacggcggcgatgtcacgcctccggaccacggcggcgatgtcgcaccgcagtaccgtgcggatatcggcgcgtacatgggcaaccagtggatggcgcgcaacctgcaaatgcagaccctctatgaccgcgagggcagccagtatcgtaatgccgatggcagcgtatgggcgcgcttcaaagcgggtaaagcggaatccgaggctgtcagcggcaatatcgatatggacagcaactactcccagttccagttaggcggcgacattctggcctggggtaacggccagcagagcgttaccgttggcgtcatggcgagctacatcaacgccgataccgacagcaccggtaaccgtggcgcagacggtagccagttcaccagtagcggcaacgtagacggctacaaccttggcgtctatgccacctggtttgccgatgcccaaacgcatagcggcgcgtatgtcgacagctggtaccaatatggtttctacaacaacagcgtagagagcggtgatgcgggatctgaatcttatgattcaaccgctaacgccgtctcgctggaaactggttatcgctacgatattgcgcttagcaacggtaatactgtcagtctgacgccgcaggcgcaggttgtctggcagaattactcagcggatagcgtgaaggataactacggcacccggattgatggtcaggatggcgacagttggacaacgcgtctgggtctgcgtgttgacggcaagctgtacaaaggcagccgtacggttatccagccgtttgctgaagctaactggctgcacaccagcgatgatgtgtcggtatcgtttgatgatgctacggtgaaacaggatcttccggctaaccgtgcggagctgaaagtgggtctgcaggcagatatcgataagcagtggagcgttcgcgctcaggttgccgggcagactggcagcaatgactttggcgatctgaacggtagcctcaatctgcgctataactggtaa

SEQ ID NO: 399059 - DNA, 288 bp, Salmonella enterica
atgaaggagctagcagaaaacgcgctttcagagttggtgacccctgagctttttgctgaatatatcggcaaaacaccagctgcaattcgcaagatggccacggctggaaaactgccggtgatccgaatgaaagaccctcagaacccttcaaagaaaggcggcgaaatttatattcatcgtggcgagtgggatgcttatgcggaacatcttgcaaaagaggctcccccggaatggcatgattggaaaaatcggctattcacaaccgaaaaatccagaacacagaattaa

SEQ ID NO: 399060 - DNA, 321 bp, Salmonella enterica
atgaaaagcaaatatgccacgcttattcgaaacttattacaaagctatcacgcacaggcaacagcgattgataaagaaaatttctctgtccacagtgacggtattcatttaatggagttgaatcttcagttagctaagtgtctggaaggaatatctgcaacagcacgatttaataatgatgttgatgattttgccgaacttcacaaaattaccctgatggcatttaagggcgacataccaacggaagataatattccggtactttcttctcttgcttcaggggtaatgagaaaaaacaattctagtctgaaagctgtttaa

SEQ ID NO: 399061 - DNA, 168 bp, Salmonella enterica
atgcctgattggttattatggggagcatcgcttgttttggctttgctttcaaaaatagtgagcaaaacgaataacgacctcttcactttattttgcattattactgcttgtgcaattggttatgggatggccacattctcgtttatgaatatgcttcaggaactttga

SEQ ID NO: 399062 - DNA, 297 bp, Salmonella enterica
atgcaggagtatgaaaaagggttcattgcactggctgtcatgggggcgatgattgcgctggggaaattactcaacagcgacgagccgatcacccttcggctggtcactggccgtgtcattgtcggcagcggattgtcactgattgccggagtggcactgtattttgtcccggatattcacccacttgcgctggccggctttggttccgcgctgggcattctggggcagaacgtggtggaagcctggctgcgcaaacgtggctttacagggatttttgataaaggggcagggaaatga

SEQ ID NO: 399063 - DNA, 342 bp, Salmonella enterica
atgacgctgagcgagaaacaacaacggtttacatcaatgattgctttgttgatccagtatgcaaacgccaacgggatgtggctgacgttcggtgaggcgtaccggacgccggaacaggcggcactgaacgcgaagaagggcagcggcatttccaacagtctgcacacccagcgtctggccgtggattttaatctgtttgtgaagggcgaatataaaacccgcacggaggattatctgccgctgggggaatactgggaatcgctgggcgggagctggggcggacgctttaaaacccgtcctgatggtaatcatttcagcctggaacacaacggggtgcgctga

SEQ ID NO: 399064 - DNA, 333 bp, Salmonella enterica
atggatcgcgtggtgtcaggctggttattcacccttgttctggcatttttagccggctggaaaacggccggctggcaacgggacagcatcgatctgaccgtctcaaaagcggccaccgcgaccggggaacggctggctgatattgccggcatttctggtcgccggctggaagacaaactggaggcactgaaaaatgcgccaccgcgtgaaatccgtacggaagtggttaagccggtgtttaccaataagtgcctgtctgatgattttgtcagcatgtacaacgatgccgtcaccagtaccgaacgtacgttatcaggaaaacctgaaaactaa

SEQ ID NO: 399065 - DNA, 2040 bp, Salmonella enterica
atgaaacagttagattttacattaagcctgattgataaactgacgcgcccgttaaagcaggtgcagagcagtgtcacaggctttgctgaaaaatcgaaagcggcctttacgcagattgggggcggtgcgctggctttagccggcacagggatggccatcaaaggggcgttatcgccggctattgagatgtatgacgcgctgaatgacgcagccgcaaaaggcattgatgatcaggctttaaagaccgtccagcgtgatgcgctgcggttcagtatgacctacggtgccagcgcggtggagtttgtccagtccacggaaagtattaacaccgccattgccggcctgaccgggaatgaactgccgaaggtgacgaaagtcgccaacacgctggcgtttgcactgaaatcaacatccgccgacaccgccgagtttatggggcagatgtacggcaacttttccgccgaggcggcacggctgggtaaagtccagtttgctgaacaactggccggaaaaatggtgtacatgcgtaaggtcttcggtactgaaatgggcgtcatcaaagacctgatggaaggtgcgcgcggcgtgggtaccaactacggtgtggggctggatgaacaactggccgtactggggcagcttaaccgaacgctgggaacggaagccagcagcgcttacgaaggcttcatgaccggagccattgaaggcggtaaaaagctggggctgtcctttacggatgccaccggcaaaatgctgtccatgcctgaaatgttgatcaagttacagggcaagtatggcaaaagcctggaagggaacctgaaagcccaggcggagctggatgcggcatttggtgacagttcggcggtggtgaagcacctgtacggcaatgtggccttactgcaacgtaatatcactgagctgggcggttctgacggactgaagcgtacacaggagatggccgggaaactggtgaaaccgtgggatcgctttgttcagatcctgaagtcgattcagaccgtcattggactgacgttgatccccgtcctgtatccggtgttgaatcgcctggccgacatggggcagacctttgcccgctggatgcagttgtttcccaacattgcgcgtgttatcggttatgcggctatggcgttgttggggtttgctgctgccggcgcggtagcgaatatcgttctgggcgtctcaaaacttatcaagctgggcgcgattgctctctggaagacgctgacttcagtcacgaagatatacaccgccactgtctggattgcctcaaaagccgtcgcggcatggaacatcacgcttaaattccttcgtggcacgctgctggccgtacgcatggcggcgattatggccggtattggtatcaatctgatgagctggccggtgctgctggtcatcggggcgatagccctgctggctgcgggctgttacctgctgattaaacactgggatgatgtgaaagcggcggtgatgaataccgcagtgtttacggcggtggcgggcgtggtggaatggcttgccggcgtgttctccgctgcatggcagtggattaaagacggctggaacagttttattgcgctactggccgggttctcaccctcacaggcattaagcgggatggccagcgggattgtttccctgtttgataacgtctggcagaccattaaaagcggatttctgaagtcgtggaactggattgttgaaaaactgaataaaattccgggcgtcaatattgacctgtccacaaccgtttcgccggaaataaataaaattacaggtggggtggcaccttcattaatacagaacaaccatactgcaaataccagtgaaacattgactgccaataccctttcaacaggtggaaagttaaaggatgtggaccgcggtggtatcagtaaaacgataagcagtaactctaaatcagtgacggataacagccgtaaaattggtgaagtgcattttcataccaaagaagcactttcaccctcccagctaatggaatggcaggagcttaatgcgtga

SEQ ID NO: 399066 - DNA, 330 bp, Salmonella enterica
gtgagtgaaattctttatattgacctgcttattaataatggtgatttctcactgaatgcaggtcatgagcctgaattatgcaataaccgtaaaagtatcgggcaggacattgtgcacgccattattgaaagcggactggcaacgcaattaattgcggagcgaagcccgacgttgagggctgatatttttacccagcttgaattactggttgaaaatgatgaacgcatagtgcctggcacagttgaaatcaatgaagaaagtcagaaacgcctttgggtgactgccagtacatacgactttggcacgctttcatatcaggtggatttatga

SEQ ID NO: 399067 - DNA, 2166 bp, Salmonella enterica
atgtcacagacagctattacgctggcgtttgaacactggaaagcgcagcagggcgcgaccggcgagccggtgttactggatgaatttgtgtttgcgaatgtgccagggctgaacccggatattcccgttgaccggaatgaagcactgccgcctgtggagcagattgtgcaccgacaacctgttacccgcactggcgtggtgaatgaaaacggtgtggtgtattccgccgttctgggtgctgatgtgggcgacttcagcttcaactggatcggtctggtgagtaaggccagcggtaccctggccatgattgttcatgcgcctgtgcagcaaaagctgaaaacagcggaagggcagcaggggaatgtgcttacccgttcgtttctgatggagtacaacggcgcacagaccgaaactgggattagtacaccggctgagacctggcagattgatttcacggcgcgtatggccgggatggatgagcgtcagcgtctggagaatgtggatatttacggggatgccgcattctttggcgatggctggctggttggtaaaactggtaatcagttttttgtgaccaaaggcaccggctatgtggcggggctgcgtacgtcactggctgcaaatcaaaatatcactgtgacgacgaagccagtcagcgtctggctggatgtgtgctggacgggggcactgaccagcgtgtggaatgcgcagagcaaaatcactgtggcggaaaacctggcggattatgtgcagaacggcgtacagcattacgtgtttgccgtggccagcattgatgtgaatggcaatatcacggatttacggccaaaaggaacgctgaacgaacaacaggccagcgacgcactgaaaaagcacgagcagtcccgaaatcatcctgatgccacgaccagcgcgaaggggttcacccagttaagcaacgcgacagacagcactagtgaagaacaggccgctacgccgaaagcagtcaagatcgctatggataatgctgccgcacgactggcgaaagacaggaacggatctgatattcctaataaacctctgtttgttcaaaatattggactgggaaatgtgcttttcaaaggtgatggacggttcctcgcgggaacgtttgtcagtgacgcaattgaccgaacatcaatcggcgcacgcgccgctacaggctgtcagtttatgcgagcgcatcaggctcccgacgcgccagatcaggtcagttactggcaagttatcactcttactgaggtcgtgagtccgacttccgtggtggatgtgctggccatcagtggcaataacgtattgtttggtcatggctcaggtgcgggaattacttcgtggcgccatgtggcgatgctggaaggcgctgcctttacaggggatatttctgctccaaatatgcgtagtggtaattctgtcactattggtgatggcacaggggggatggccacaggtggcgttgatggcgcaggttttaacggcaataacatgaatgttaagtcatgggatggcattggttttcagaacgcagcagaccttgctattcgcgcttatatcagcacaaaacttgggatcatcgcggccagtgaatctgtgtatgcaggtagcgctaatctgtataaaaacggtgatgtctatggtgacaaatggagcaccggaaatggtcctaactggctgagtttgttcctggaacatcttgattcacaaatcagaaatgatctgacgacctggacatcaaataatttcccgacgaaatctgatgtttcagccgctctttcattaaaaccagggcgtcagtacatcactcagatcggtctgtatcagaatgacaagtcaaagccgttcatgctccatgacgatggttctggtgtatttctggcaactacggggatgctgcccacagcaggtttgggagctaatggctggcaccgggataatgcaaccgggctgattactcagtgggggtcaggtggtttttccagtgggcaacgcatcaattttccagttgcattcccgaatgcttgtggggcagttgttgccaacgacacggggataggcactcttgcgatatcaacaacagaacaggatgctggcggttttactgtacggggatcccaggcaaccttcgggctcagctggattgcaaaaggatattaa

SEQ ID NO: 399068 - DNA, 369 bp, Salmonella enterica
atgcaaccagaatctgataaccttgtattattggaatttcccgagaagaagaacggcgatggtggaggtggcggtatgctcgaacgcctggaaaagagagttgagagactggagtctgaactttcggcagcacgccttgatattgcgatattgagagagcgttcagaaaactctgccactaaagaagatatccaagctacgaaatcagatatccagtcagccaaagcagatctccagactggatttgtaggcgtctataaagaaattactagcgtacacaaggaactccgttcccagaccatatggcttgttggctcaatattcaccagtatggcccttttgtttacggctattaagttgttcacttaa

SEQ ID NO: 399069 - DNA, 417 bp, Salmonella enterica
atgagtaagtcagatcacaaagatgatcctgtacgcaacgcatatcgtcgtttacagctggttacaccacagctattcgctcaatttcttgtagagaaaggtgtcaataagggctgcttagcttgcggtcacgataagatatcaacaccggaaacaatgagtctggattcatcgcgcagcccattcaaagataaaaagccttctgaactaactgaagaagaatcccggcaatacgttgaagcaaccgcagttcactatgtcaccccatccctgattgatgagtcaaaaatgccattagtctccaatcatcagtaccggctcatctgtcaaaactgcggcttcaccagctatttccgagcggctaacgtcgtttattgggtagaagaccgtattaacgcaccaggggatcagccataa

SEQ ID NO: 399070 - DNA, 330 bp, Salmonella enterica
ttggcagcatcaccgaacagttacatcagttggggtctgaaccatcccgcgcgccatcgggcgatccgtcaactggccgtcagcgaaaagctcaccaaagagacggaacaacgggccgacgatatgttccccgaattgcgcgatttatgtcatcgttccgttttgatggtgtttatgtcggatgaataccgcgccttcggcgacggcctttttctggcgctggctgaaacaacaatggatttcgccgcgcgcgatcccgctcgcgctggcgaatatattgcgctgggattcgaagccatgtggcgcgcgctgactcgcgaggagcaataa

SEQ ID NO: 399071 - DNA, 579 bp, Salmonella enterica
atgaacaactcatggtggcaggagctaatgcgttttttcctgcaaggaatgacacttaaacagttgattcatatgctaatcatcctgatcgtattgattattgttatgccggtaagcgtaaaagaatggataaacctgcataatccagaaatacttcctcattactggatgtattacatcctgttgttctgcgttagctatgtgcttaacggtgttgttaattccgtttatcacgctgttactgaaagaattgaggcatcaactgctcagcggcgtaaggacagagaagaaaaagtcgttcgggatttgtttgattcgttaactcttggagaaagagcgtatttggcattcgctgtagccgctaataaccagctaaagacagaaaagggaagccctgaagcaatttcattgctcaaaaaagggattatcactcgattgccttctgctattggatatcctgatattgaccgttttattatcccggaaaagtattttaatgagtgctacatgagatttgccgggaagtcagacattcttatgaatgaacttattgtacaggacgaacagctcaaaaaataa

SEQ ID NO: 399072 - DNA, 255 bp, Salmonella enterica
atgaatataactatcaataccccgtcagtaaaaaccatccttgatgtacagtgtgatcactgtaacttcactggcactattgattatgaagcccctcgaatttcaaagcttactgtcggcggaaaaataaccttcgacaatgctttatgcccgcaatgtaaaacaggtgaaattttcgctccaggtggtcaatacgttagagatgatgctactggaagaatgaatcgcacaggcgatgcgaacattagtctataa

SEQ ID NO: 399073 - DNA, 498 bp, Salmonella enterica; identical to SEQ ID NO: 179615

SEQ ID NO: 399074 - DNA, 372 bp, Salmonella enterica; identical to SEQ ID NO: 216960

SEQ ID NO: 399075 - DNA, 426 bp, Salmonella enterica; identical to SEQ ID NO: 216961

SEQ ID NO: 399076 - DNA, 138 bp, Salmonella enterica
atgaaaggctggctttttcttgttatcgcaatagttggcgaagtaatcgcaacatccgcattaaaatctagcgagggctttactaagcttgcccctataaggaacttatcatatgagttttcagcaagttttgaatga

SEQ ID NO: 399077 - DNA, 558 bp, Salmonella enterica
atggtgaccaacagcaacgattccgtcacactgcgcctcatgactgagcatgaccttgcgatgctctatgagtggctaaatcgatctcatatcgtcgagtggtggggcggagaagaagcacgcccgacacttgctgacgtacaggaacagtacttgccaagcgttttagcgcaagagtccgtcactccatacattgcaatgctgaatggagagccgattgggtatgcccagtcgtacgttgctcttggaagcggggacggatggtgggaagaagaaaccgatccaggagtacgcggaatagacctgtcactggcgaatgcatcacaactgggcaaaggcttgggaaccaagctggttcgagctctggttgagttgctgttcaatgatcccgaggtcaccaagatccaaacggacccgtcgccgagcaacttgcgagcgatccgatgctacgagaaagcggggtttgagaggcaaggtaccgtaaccaccccagatggtccagccgtgtacatggttcaaacacgccaggcattcgagcgaacacgcagtgttgcctaa

SEQ ID NO: 399078 - DNA, 834 bp, Salmonella enterica
atgtctaataaaaaacagtcaaataggctaactgaacaacataagttatctcaaggtgtaattgggatttttggggattatgcaaaagctcatgatctcgctgttggtgaggtttcaaaattagtaaagaaagctcttagcaacgaataccctcaattatcatttcgatatagagatagtataaagaaaacagaaataaatgaagctttaaaaaaaattgaccctgatcttggcggtactttatttgtttcaaattccagcatcaaacctgatggtggaattgtagaggtcaaagatgattatggtgaatggagagttgtacttgttgctgaagccaaacaccaaggtaaagatattataaatataaggaatggtttgttagttgggaaaagaggagatcaagatttaatggctgctggtaatgctatcgaaagatctcataagaatatatcagagatagcgaattttatgctctctgagagccactttccttacgtccttttcttagaggggtctaactttttaacagaaaatatctcaataacaagaccagatggaagggttgttaatcttgagtataattctggtatattaaataggttagatcgactaaccgcagctaattatggaatgcctataaatagtaatctatgtattaacaaatttgtaaatcataaagacaaaagcattatgctacaagcagcatctatatatactcaaggagatgggagggagtgggattcgaaaattatgtttgaaataatgtttgatatatcaacgacttcgctcagagtgttggggcgtgacttgtttgaacagcttacatctaagtga

SEQ ID NO: 399079 - DNA, 981 bp, Salmonella enterica
atggctagaaatgcaacaaacaagttactgcacaaagctaaaaaatcgaaaagcgacgaattttacactcagtattgtgatattgagaacgaactgcaatactacagagagcacttctctgataaggttgtttattgcaattgtgatgatcctagagtaagcaatttctttaaatattttgcagtgaattttgataatcttggcttgaaaaagttaatagcatcttgctatgtagagaataaagaaagtttttctagtagcgaagccgcgaagaacggattttactatgaatatcataaagaaaatggaaagaaattagtttttgatgatattagtgtttcttctttctgtggcgatggcgattttcgcagttcggagagcattgatctgctaaaaaaatcagatattgttgttacgaatcctccattctcgttatttagagagtatcttgatcaactaattaagtatgataagaaattccttataattgctaatgttaattcaataacatataaagaggtgtttaatctaattaaggaaaataagatttggcttggggttcatctcgggagaggtgtttctggatttattgttccagagcattatgaattatatggtactgaggcgagaattgattctaatggtaatagaattatctcgccaaacaactgcttatggctaactaacctagatgtctttattaggcataaagacttgcctcttacaagaaaatattttgggaatgaaagttcatatccaaaatatgataattatgatgctataaatgtaaacaaaacaaaggatattccattagattacaatggggttatgggggttcctatcacattcttgcataagtttaaccctgagcaatttgagttaataaaatttagaaagggtgttgatgaaaaagatttgtctataaatggtaaatgcccttatttcagaattttgataaaaaacaaacgattacaaaagtaa

SEQ ID NO: 399080 - DNA, 174 bp, Salmonella enterica
atgcgttatccctggagcgtgagcgccagccggaaatacaggaacgcacactggatggcccttcgctgggatggtaaccaaagacaggctaaaatgttgtcagcgcgtttccggtgcccccgaaccaaccattatcccaaaaaatgcaccggaaacgcgctgacaacattttag

SEQ ID NO: 399081 - DNA, 516 bp, Salmonella enterica
atgagccccggcgttgtcaccttgcggagcatgaccgaagaggatctcggtatgcttcacgactggttgaaccggccccacatcgtcgaatggtggggtggcgagcgtccttcgcttgaggaggtgcgagagcactatcacccttgtgtccttgcagaagccaacgtgactccgtacgtcgggatgctcgatgggcggccttttgcatatgcacagtcgtatgtcgccctgggatcgggagatgggtggtggcaggacgaaaccgatccgggcgtacgtggtatcgaccagtcaattggcgagtccgcgcttctagggcaaggttacggtacgttgctggtacgcgcgctcgttgatctgctcttcgccgacccgcgcgtatcgaaagttcagacagatccttctccccggaacttgcgcgccatacgatgctatgagaaggctggcttccgcaggatcaagaccattgagacacctgatggaccagcgatatacatgttgcacgagcgcccatag

SEQ ID NO: 399082 - DNA, 810 bp, Salmonella enterica
atgggcagcgttaacttcataactcacgccgatgttctgcaacttattgcgaaaagaacggctgaagattgtattatttttctttctggtcctacgtccagaaagacgccgctgtccttgttacgaatgaaagatgtcattgcagtcaatggttctgttcaatatttgctaaacaataacgtcaagccatttttgtaccttctgacggatattcgcttcctccatcgtcggcgcgaagatttttataactttagccgtaacagtcagtttactatcgtcaatcttgatgtgtacgaacaggcttcagtggatgatcaaaaatatattgaagaaaactgtttaattattcgctccttttatcgccgagaaaaagggggctttttaaagaaaattaaatttaatatcctcaagcgggttcataaagcattacttatttcagttcctctttcgaaaagagggcgactggctggattttgcaaggatatcagcatcgggtattgctcttgccatactattgcttataccgctattcaggttgcctattccctcaagtatggccgtattatatgttctgggcttgacttaacagggagttgcccacgtttctatgacgaatctaccagccctatgccatctgagcttagtaaagatctgtttaaaatactgccattttttacttttatgagaaaaaatgtgagtgatttaaatatctttaatttatcagatgatactgcaattcattacgatattattccatatattacagcctcggagcttgaggatgaaatatattacgataaaattgtctag

SEQ ID NO: 399083 - DNA, 1014 bp, Salmonella enterica; identical to SEQ ID NO: 5004

SEQ ID NO: 399084 - DNA, 225 bp, Salmonella enterica
atgagcaaaatccaatacccaatgaccactgcggcaattttcgatgatgttgtctatccgctgcatttcgacaatgccggcaaggttaggcaagaaatggaaggcgctgttatctggttctgcaggtggtgcaacgaagagaaagccgctgtgaaagcgagattgttggtcagttgctggggtcaatatctgagtcatgagcaggttatccgggaggccgcatga

SEQ ID NO: 399085 - DNA, 507 bp, Salmonella enterica; identical to SEQ ID NO: 398942

SEQ ID NO: 399086 - DNA, 840 bp, Salmonella enterica; identical to SEQ ID NO: 398943

SEQ ID NO: 399087 - DNA, 312 bp, Salmonella enterica; identical to SEQ ID NO: 398944

SEQ ID NO: 399088 - DNA, 204 bp, Salmonella enterica; identical to SEQ ID NO: 398945

SEQ ID NO: 399089 - DNA, 1896 bp, Salmonella enterica; identical to SEQ ID NO: 398975

SEQ ID NO: 399090 - DNA, 228 bp, Salmonella enterica; identical to SEQ ID NO: 398974

SEQ ID NO: 399091 - DNA, 783 bp, Salmonella enterica; identical to SEQ ID NO: 398973

SEQ ID NO: 399092 - DNA, 231 bp, Salmonella enterica; identical to SEQ ID NO: 398972

SEQ ID NO: 399093 - DNA, 165 bp, Salmonella enterica; identical to SEQ ID NO: 398971

SEQ ID NO: 399094 - DNA, 333 bp, Salmonella enterica; identical to SEQ ID NO: 398970

SEQ ID NO: 399095 - DNA, 387 bp, Salmonella enterica
atggttattgccgagtacaaatatcattcgcctcttgataaggggtacatccgggtcaaggtaagccgttcccagcacaaggcgatttttcgggcgcggagaatccgtttgtggagtgcgccaaagtatttctacaacggcgaaacggtcatcgtagagcactttaccgctggttggtacttggctctggtatttattccctgcttgttaattgggccattgctgtatgggataccacaaacctggaaagacctgaaacgcggaattttccagagaaaatacggaagtttttcgtcagacagctggagggttataccaggaaagcattcagtggatgagcagccgattatcgacgcatggttgagagaaagggccaacagcaactga

SEQ ID NO: 399096 - DNA, 330 bp, Salmonella enterica; identical to SEQ ID NO: 398968

SEQ ID NO: 399097 - DNA, 249 bp, Salmonella enterica; identical to SEQ ID NO: 398967

SEQ ID NO: 399098 - DNA, 3975 bp, Salmonella enterica; identical to SEQ ID NO: 398966

SEQ ID NO: 399099 - DNA, 609 bp, Salmonella enterica; identical to SEQ ID NO: 398965

SEQ ID NO: 399100 - DNA, 216 bp, Salmonella enterica; identical to SEQ ID NO: 398964

SEQ ID NO: 399101 - DNA, 747 bp, Salmonella enterica; identical to SEQ ID NO: 398963

SEQ ID NO: 399102 - DNA, 915 bp, Salmonella enterica; identical to SEQ ID NO: 398962

SEQ ID NO: 399103 - DNA, 360 bp, Salmonella enterica; identical to SEQ ID NO: 398961

SEQ ID NO: 399104 - DNA, 243 bp, Salmonella enterica; identical to SEQ ID NO: 398960

SEQ ID NO: 399105 - DNA, 612 bp, Salmonella enterica; identical to SEQ ID NO: 398959

SEQ ID NO: 399106 - DNA, 249 bp, Salmonella enterica; identical to SEQ ID NO: 398958

SEQ ID NO: 399107 - DNA, 327 bp, Salmonella enterica; identical to SEQ ID NO: 398957

SEQ ID NO: 399108 - DNA, 222 bp, Salmonella enterica; identical to SEQ ID NO: 398956

SEQ ID NO: 399109 - DNA, 216 bp, Salmonella enterica; identical to SEQ ID NO: 398955

SEQ ID NO: 399110 - DNA, 288 bp, Salmonella enterica; identical to SEQ ID NO: 398954

SEQ ID NO: 399111 - DNA, 312 bp, Salmonella enterica; identical to SEQ ID NO: 398953

SEQ ID NO: 399112 - DNA, 222 bp, Salmonella enterica; identical to SEQ ID NO: 398952

SEQ ID NO: 399113 - DNA, 228 bp, Salmonella enterica; identical to SEQ ID NO: 398951

SEQ ID NO: 399114 - DNA, 732 bp, Salmonella enterica; identical to SEQ ID NO: 398950

SEQ ID NO: 399115 - DNA, 420 bp, Salmonella enterica; identical to SEQ ID NO: 398949

SEQ ID NO: 399116 - DNA, 270 bp, Salmonella enterica; identical to SEQ ID NO: 398948

SEQ ID NO: 399117 - DNA, 549 bp, Salmonella enterica; identical to SEQ ID NO: 398947

SEQ ID NO: 399118 - DNA, 255 bp, Salmonella enterica; identical to SEQ ID NO: 398946

SEQ ID NO: 399119 - DNA, 1164 bp, Salmonella enterica; identical to SEQ ID NO: 399035

SEQ ID NO: 399120 - DNA, 1029 bp, Salmonella enterica; identical to SEQ ID NO: 399034

SEQ ID NO: 399121 - DNA, 387 bp, Salmonella enterica; identical to SEQ ID NO: 399033

SEQ ID NO: 399122 - DNA, 1260 bp, Salmonella enterica; identical to SEQ ID NO: 399032

SEQ ID NO: 399123 - DNA, 363 bp, Salmonella enterica; identical to SEQ ID NO: 399031

SEQ ID NO: 399124 - DNA, 642 bp, Salmonella enterica; identical to SEQ ID NO: 399030

SEQ ID NO: 399125 - DNA, 297 bp, Salmonella enterica; identical to SEQ ID NO: 399029

SEQ ID NO: 399126 - DNA, 3441 bp, Salmonella enterica; identical to SEQ ID NO: 399028

SEQ ID NO: 399127 - DNA, 588 bp, Salmonella enterica; identical to SEQ ID NO: 399027

SEQ ID NO: 399128 - DNA, 732 bp, Salmonella enterica; identical to SEQ ID NO: 399026

SEQ ID NO: 399129 - DNA, 756 bp, Salmonella enterica; identical to SEQ ID NO: 399025

SEQ ID NO: 399130 - DNA, 348 bp, Salmonella enterica; identical to SEQ ID NO: 399024

SEQ ID NO: 399131 - DNA, 2517 bp, Salmonella enterica; identical to SEQ ID NO: 399023

SEQ ID NO: 399132 - DNA, 321 bp, Salmonella enterica; identical to SEQ ID NO: 399022

SEQ ID NO: 399133 - DNA, 423 bp, Salmonella enterica; identical to SEQ ID NO: 399021

SEQ ID NO: 399134 - DNA, 738 bp, Salmonella enterica; identical to SEQ ID NO: 399020

SEQ ID NO: 399135 - DNA, 399 bp, Salmonella enterica; identical to SEQ ID NO: 399019

SEQ ID NO: 399136 - DNA, 555 bp, Salmonella enterica; identical to SEQ ID NO: 399018

SEQ ID NO: 399137 - DNA, 354 bp, Salmonella enterica; identical to SEQ ID NO: 399017

SEQ ID NO: 399138 - DNA, 444 bp, Salmonella enterica; identical to SEQ ID NO: 399016

SEQ ID NO: 399139 - DNA, 1026 bp, Salmonella enterica
atgtccgtttacaccactgcccagctgctggcggtcaatgagaagaaattcaaattcgatccgctcttcctgcgcatctttttccgcgaaacctatcccttcagtacagagaaggtttacctgtcgcaaattcctggcctggttaacatggcgctgtacgtctcgccgattgtctccggtaaagtgatccgctcccgtggcggcagcacgtctgaattcacgccgggttatgtgaagccgaaacacgaagttaacccacagatgaatcttcgccgcctgccggatgaggatccgcagaatctcgctgacccggtctaccgccgtcgccgcattatcctccagaacatgaaggatgaagagctggcgattgcgcagatcgaagagaagcaggctgttgcggcggtactcagtgggaaatacaccatgaccggggaagcgtttgagcctgttgaagtggatatgggccgcagcgctggtaacaacattgtccaggccggtgcggctgcatggtcaacccgcgacaaagaaacgtatgaccctaccgatgacattgaaacctacgcgctcaatgccagcggtgtagtcaacatcatcgtgttcgatccgaagggctgggcattgttccgttccttcaaagcagtgaaggagaagcttgatacccgtcgaggttctaattctgagctggaaaccgctctgaaagacttgggtatggctgtttcatacaagggtatgtatggcgatgtggccatcgtggtgtactccggccagtacgtcgaaaatgatgtcaaaaagaactatctgccggatctgacgatggttctgggtaatacacaggcccgtggcctccgtacctatggctgcattcttgatgttgatgcccagcgcgaaggtatcaatgcctcgacacgttacccgaaaaactgggtgcagtctggcgatcctgcgcgtgaattcaccatgatccagtcagctccgctgatgctgctgccagaccctgacgcattcgtctccgtcaagctggcataa

SEQ ID NO: 399140 - DNA, 333 bp, Salmonella enterica; identical to SEQ ID NO: 398939

SEQ ID NO: 399141 - DNA, 1344 bp, Salmonella enterica; identical to SEQ ID NO: 398940

SEQ ID NO: 399142 - DNA, 1593 bp, Salmonella enterica; identical to SEQ ID NO: 399012

SEQ ID NO: 399143 - DNA, 207 bp, Salmonella enterica; identical to SEQ ID NO: 399011

SEQ ID NO: 399144 - DNA, 345 bp, Salmonella enterica
ttgctgcagcgtattctggtgagtggcaagctctcgcatcaccgcttctggcccctgagcggcggcaatgttcaatcgtgcagacatatcgcccatcgtctgatttctgtcagcatcaacaaaccccatgccctgacgaattgtttcaatctggtctggattggtggctgcaagttgacgcaaggcgtcgcgatcacctgccgcataagcctgaccgaaagctttttgaaagtcagaaagcctctgagcagcctcattctgctgtattgcctggccaactgcgccaagcccctgagcaagttgaactccaacgtttgggcgctggctgaagtcgtaactggataa

SEQ ID NO: 399145 - DNA, 363 bp, Salmonella enterica; identical to SEQ ID NO: 390273

SEQ ID NO: 399146 - DNA, 333 bp, Salmonella enterica; identical to SEQ ID NO: 151844

SEQ ID NO: 399147 - DNA, 471 bp, Salmonella enterica
atgaaaagattcaaccttctgcaaatgttacaaagcatcgggcgatcgttaatgatccccattgccatgctgcctgccgccggtattttgctggcttttggtgttagctttcaggatcccaatattgtcgccagcctgccgtttctcggcactgacgggctggttcacgtgctgaagctgatggcggaagcgggcagtgcgattttcgccaacctgccgctgctgtttgcggtcggcgtggcggtgggacttagtgacgatcagggcattgccgggctgtcggcgatcgccgggtttttgattatgaacgtcaccatcggccagtttctggggatcacgcccgaatcggtggcgcaggtgcgtgactacacgatggtgctgggcatcccttcgctgcagaccggcgtgtttggcggcatcattatcgggattatcgccgcctggctgtataaacgctattaccgcatctag

SEQ ID NO: 399148 - DNA, 159 bp, Salmonella enterica
atgcttaaacaatgcggttactgccgcaaatccattgatgaaggcaaagaagtaaaaaacacccttctctatctcaacggctcgcagctgacacatgaagagcgcgattactgctctgtacgttgtgcctcatacgaccagatggcgcacgaaagttaa

SEQ ID NO: 399149 - DNA, 522 bp, Salmonella enterica
atggaacgctattactggataccacaggggggcgctgatcctgattacgtcatctgggcaaaggaaatcgcgggaataacccgtgcgtggacattccgccattataaggggaccggcaccgttggtgtgatggtggctaccagtaacccggtgaatccggctcctggcgacgatctcgttaaggctgtacgtgaccatattttgccgctggcacctgttgctggcggcggactctttgttttcgctgccactgaaaaaagcattccggtaacagtcgcactggccaaagataccccggaaattcgtactgccattattgcggagctaaatgcgctgatgctgcgtgatggcgcgccgtccggaaaaatttatgtttcgcgaatcagcgaggcgataagtctggcgaccggggaagtggcacatcagctgcgtgtgccggcggcagatgtggtgctgggaaaaactgaacttcctgtcctggggaatataacctgggccacctataccggggagaacggataa

SEQ ID NO: 399150 - DNA, 402 bp, Salmonella enterica
atgaaattcaagagtattgctaaaactgtttttctttttgcactgctaacctcagctggctttgcgactggtaaaaacgtgaatgtcgaattcgataaaggacaaaatagcgcccgctattccggcgtaataaagggatacgattacgatacatataacttccaggccagaaaggggcagaaagtacatgtaagtatttcgaatgaaggcgcagatacctacctgttcgggccaggaattagcgattccgttgacctgtccagatattcatctgaactggatgacaatggccagtacacgctaccggcgtccggaaaatacgaactgagagtacttcagacacgtaatgaagcccgtaaaaacaaagcgaaaaaatacagcgtcaatattcagataaaataa

SEQ ID NO: 399151 - DNA, 1212 bp, Salmonella enterica; identical to SEQ ID NO: 390732

SEQ ID NO: 399152 - DNA, 156 bp, Salmonella enterica
atgcagcaatatatcggtattgatgtgggaggaactcacgtcaaatatggcgtgattaacagtgacggcgaagaattaacccatcatcaattcgatacgccagaggacgcctctacgtttacccacaagtggcaggatatggtggcacgttgctag

SEQ ID NO: 399153 - DNA, 189 bp, Salmonella enterica
atgcagcacgaagcccgtcgtctgcgtgcgaaacgctggcaggctgaaaatcaggaagggatggccgaggtcgccctgtttattgaaacaaacggctcctttgtcgatgaaaacctgaaccatacctgcccgtcgtggcgaaccacgatatccacatgcgaaacgtccagcccttcaagcggagagtag

SEQ ID NO: 399154 - DNA, 132 bp, Salmonella enterica
atgttactgataatactaattaaatcgctcattatcggcgtactggtcggcgtaggggtgggcgctggggctgctggcgaagaaaacggtggtttatacggtgctcgcgccgcaggggattgtctggggtga

SEQ ID NO: 399155 - DNA, 198 bp, Salmonella enterica; identical to SEQ ID NO: 380104

SEQ ID NO: 399156 - DNA, 255 bp, Salmonella enterica
atgaatactgtttttctgttaatggccgagttcggtaccgccactatcccgttgtctcaaatcgccgaacgttatctgggtatgaaaccgtcaactgcagacaaaaaagctggggccggagatttacccatccctacctttcgtatcggtgactcccaaaaagccccccgcatggtgcatgtccgggacttagcagaatttatcgacacccgaagaaaagaagccaaagaagaattggctcatgtacagcactaa

SEQ ID NO: 399157 - DNA, 810 bp, Salmonella enterica
atgattaagcacccggcaatccgctaccacggcggtaagtggcggctggcaccgtggatcattagccactttcctgcccataaatgctatgtagaacccttcggcggagcggccagcgtacttctcaggaaaccgcgcagctatgccgaggtttacaacgatctggatggcgacgttgtgaatctgttcgccgttctgcgtataccgcaactacgcgaacggctgattgaagcgtgcagcctgacgccctattcccgcactgaatttatttctgcctatcgttatgggaaaaatgccgttgaacaggcaagacgtttagtgatccgcgccactatgggcttcggttcagccggagcgactaaaggcactaccggctttcggttagacactaaacgtgccagcggtacggcccagcatatctggagccgcatgcctgataatctggccgccgttggccagcgttttgaaggcgttctggtggaaaaccgggatgccatccagtgcatgctggatcatgacgccgccgacacgctgcattttgtcgatccgccttatgttcacagcacccgcaaccttactaacaaatattatcgccatgaaatgagcgatgccgaccatcagaaactgctggagaccattacatgcctgaaaggacgcgtggttatcagcggctatgatagcgagctatataacgatttattaactggatggagcaaagatacaaagcagtccgccgcagcgggtaagaaggggtcagtgctaaggatggagtgcctttggatgaattttcctgcgacacaaggatcataa

SEQ ID NO: 399158 - DNA, 372 bp, Salmonella enterica
atgaacgagtttttcgagactctggcccaatcagaaaaccagcggcagaagctctgtgtaacacctgaagagtatcaacacgccgttaatactttagtcgatattgccctgacggaaaccagcggtgggcgcgccgccgcgcaggtactgctttctgcatggaacggctacgtatggcaacttgatattcccgatctatgttatctggactatgacgtactggagcaggcgctaatcgttatccggggccgggtgatgctaatgaaggaaccgcaggaggttatcccggagggtaatgcggtaatgaagcggattgcggcacagtggcaacacctgaacgcagaacggcgtggagaaaaacaggatgattaa

SEQ ID NO: 399159 - DNA, 2658 bp, Salmonella enterica
atgcaaccacaattacatcaggaaattacgcggcgactgctggccgatttttcctttaaagaacagggagactggctacggcagggcgtctgcccggactgccagaaaaaggagctgtacaccagcgccgtcagcccgtgggtactgcgctgcggtcgcctgaataaatgcaatgccgaaatccacatcaaagaggtttacccggatctgtttgaaagctggtctgacaggcaccccgccaccccggaaaacccgcaggccgctgccgacgcctacctgcgcgaaatgcgcggcttcgacctttccctgatccgcggctgctaccgtcaggagaactactacgacgcgcggcgcgatatcggctcggccacggtacgcttcccgttggctgatggcatatggtgggaaaggatcatcgaccgcccgcagcgcttcggcgatcgcaaagccaatttccacggcgcttacaacgggctatggtggcaactgccggcgctaaaactggaagagcagcaggaaatctggctggttgaaggtatttttgacgccatcgccctgcaccaccacggcatcgccgccgtttccctgatgacctgcaacaactatccggcgcaggcattaagccaactggccgcacagttcacggataagaagcgtcccctgctggtctgggcactggacaatgataaagcggggatgagctacacccgccgctgggtgaaacgcagccgcgacgacggctggctggccaccgccgcacagactccgcattcccgcaccaaacttgactggaatgatttacaccagcgcgatcgattaagcccggaacaaattaaaaaatatcgttactacggttcactgctgatcgcccccaacccgaacgccaaagcattgctgatgcacgaacgtaccgagcgtaaagaatttcactttgagttcgacagtcgcctgtactggttcaaactggatattgaccgttatatgcgcgcttttgataacctgatgtataacggcaaagaggaactggacgaagaagaggccaaacataaagccctgcaggaatccgccgccgtagttgagatagctaactgctacccaaccgccctgtactatcaggccaacaccgtcaccgacgaaagctggtattacttccgcattaatttcccggacgatacgccgccaataaaaaacacctttaccggctctcagctttccagcggttcggaatttaaaaaacgcctgctgcatatcgcacagggcggcatcttcaccggcaccagccagcagttagacaagctgctgcttaagcaacttcccaaaatcaaaaccgtccagaccaccgattttatcggttacagcaaagaacaccgcgcctacgtgttcaacgatctggccgttcgcgacggtcggctgtacctgctcaacgaagaggacttcttcgacatgggcaaactcagcctgaaaagcctgaaccagtcggtcagcctgacgctgaacgccaacctgaagcaaatgaacaatcaatggccacagctactgtggcaggcgtttggcgcgaaaggctttgcggcgctggcgttctggttcggctcactgtttgccgaacagatccgcgatgagcacaagagtttcccgtttctggaaatcgttggcgaaccgggcagcggtaaaaccacgctaatcgaattcctctggaagctgttgggtcgccgcgactatgaaggttttgatccatccaaatcgacgcttgccgcccgcgcgcgcaacttcgcacaggtagcgaatatgccggtggtattgattgaaggcgaccgcaatcaggaaggggcgaaacagcgcggattcgactgggaagaactaaaaaccgcctataacggacgttcagtgcgctctcgcggcctgcgtaacagcggcaacgaaacctatgaaccgccgttccggggagcgatcgtcatcgcgcagaacgcggacgtgagcgcctccaatccggtgctggaacgcattatccacctgtataccgaccgcagcggccagaacgcacagaccaaagccgccgccgagcagcttgaacgcctgccggtggagcagctttccggttttatgttgaaagcagcgctaacagagcgggcggcactggagtgcgtcaaccgccagatcccggtttatgagcagcagcttcacgcccaccccgatattcgccatatccgcatcattaaaaaccacgcccagcttatggcgctgctcgacgcgctggcgctggttattcccgtcacggaggaacagctacaggcaaccagagatatgcttgtccagctcagtctggaacgccagcaggccatcagcgccgatcatccactggtgcaggagttctgggatattttcgacttcctcgacggtgacgacgagccgcagcttaaccactcgcgcgacgagcagcttatcgctgtcaacctcaatcactttattcaactggccaccgaacgccgccagcagatcccgccggtcagcgatttaaaacgggtactaaaaaccagccgtacccacaagtttattgaagtcagaacggttaacagcgccatcaacgccgaatttaaccgccgttcccctgccgcgcctcgccgcccggcgacagtgaagtgctgggtttttcaacgttaa

SEQ ID NO: 399160 - DNA, 231 bp, Salmonella enterica
atgatgaaatgcccacactgtaatggtaaggctatcattcgcagcagtgaatatatgtcgccgctggtgcgcaaactttactaccagtgcaaaaacgttaactgctcgttttcctacgtagcaatggaaactgtgatgggaacagtggttcccagcggttgcccgaatccaaaaatacatattccattgtctacgcgcgggcaatttctggaaaagcagaaaagcgcctaa

SEQ ID NO: 399161 - DNA, 207 bp, Salmonella enterica
atgaaaacaaatgagaacgtactgcgctcacgcgcacctcgcggggtgatgtcggacaaaccggtggcaatgcgcctgctccccgctgaaatcgcggaactggaagcattagcgctggaacagaaccgctcaatgtccagcatggcaaggatcatttatttgaacggcatcacactatttcgccagtctgatagcgaaaagcgttag

SEQ ID NO: 399162 - DNA, 342 bp, Salmonella enterica
atgagagattttggcacccgtttgagggaagaacgtctccggcttggtctcgatcaggacggttttgggcagttgggcggtgtgaagaaaaacgcgcaaagcaactatgagaatggcctgcgaaagccggacagcgattatctggccgggatagcagcggcaggtgtcgacgttttgtatgttctgaccggcaaccgtacccctgtgtctgagttgtccagcaaagagagtgcgctggttgagaactaccgggcttctacgcctgaacatcggtcgacacttgacacggttagcgctgcgcttgcgaaaccgtgcgtagggaagaaagctgatagggcttaa

SEQ ID NO: 399163 - DNA, 1080 bp, Salmonella enterica
atgaatgcgttgggctatttattgttgatgagagaaaagggtgtatcttttagggttgttcagcacggcttgaagttcagcaatctttcatcagcaagaggatgggaaccattgttagaacactattccgaagttaacagtgctgatattaacgagtcagtaagagaattatatttatctcagcttttttttgggcaaaggacagtatattttagtcagatatctgaagatgagcatggtgaactttctgttaatatcgctaatgtatgtgatgtaataagagagatatttaattcatcaactcatacgaacctctctctttataggaatagttacccactgccaattagctacgatgaattgcagtcagttcctctgactaatccttgtccggtttaccttgatgaaaccgatgatgtgttacgaatcatatttacatatccgagggcatataaagaaagaataacaatcgatatttctgaaattgatttctcaggtgatgaagtaagccaatttagtggttttgaagaaattataggaattaaatctgggagggcacaatcttttgattgtgttcaattggataaacatactggaataatacagtttcagatagaccatagtcgtaatattttaaaagatgaaatggatagtgctgctcgtcgttatcgtcatatgctaatggatggataccgagatatgaatagtgcttctattccaatggaaagtataaatatccactctaaaattgatgagttgtatgatagcgacgatggcagaattcataatcttgaacatgctactgcaacaggctctgtcaaaaccgaaaagatgagaaaacgcgaggacgaccttagagatgaacagtttcatcaggcagggttagatgctattgatggtgatactaacaatttttgcattactaaacaatgggatggtgagtgtggcagttgtctgaaacttacaattgatggtggtgtttcactggctgctcgctcgaatcccaaagttgactgtgctacactggaaggatgtattactgagaatgattttaatttattgatttcaaaggtcttgtaa

SEQ ID NO: 399164 - DNA, 411 bp, Salmonella enterica
atgttaactagggcgcagatcattgaaatgatagagacagacttcaggtcagatcctgaagtctgtcgcgcctgccattctgtgattgagtatatatgttcgtcatctaaggataatctcaagcatattgctttttttaatttgaaaaaggtaataaatactcatgatgatagcttggttataaatgttgctcgctatttttcaggtgattcattacctattattaatatttgctttgagtttattgaaggtgattttatagagcaggttagtcttgaggatttccgcagaactcaattggataataaatattatcatccagaaaccggtgaattagttaaagattttgaatcaaaaatattcatgtacttctcactttcaaaattagggtgggaagtggaatgcaattag

SEQ ID NO: 399165 - DNA, 633 bp, Salmonella enterica
atgcaattagatgataatattacaattgctcaattaaaagctatcgcccttgttgataaaaacacgcaacatttcttggggcaattattgtgttcttcttatgatgaatttttatgtcttttatacaaagatatgaccgaatgtatagagttcatggaagaagatcctaaagttagacagaatgacggagaagaccgtttaacaacagatatcattcatcatttcagagctaagggctatcaggctagccatgatgaaatgattggtggacactctgatgttgtgattagatatagggactatatgtggctgggtgaggccaaaattcattctggttatgattatttaatgcaagggtttaatcagttatgtactcgctattcatcaggtactaataataactgtaacggtggaatgttaatttatattaagaacaatgatgctgctgctgttatttctgaatggagtaatcgtctcaatagtgcgggactcaacggttattcatcttctgagtgtgagaatagacaagggttaagtttctactcacagcatacacatgcacgttctggattgccttataaagttagacatatggggattgtcttggggttcgatccacaggataaaaagtaa

SEQ ID NO: 399166 - DNA, 1095 bp, Salmonella enterica
atgacgctgttgaacacgctattaaacgcccagccgcaaccagcctatagcgtggtgctgaacggtaaggacattacgcgaaatctgaacagccgactgatgagtctgcggatcaccgacaaccggggctttgaggccgacgagctgcagcttgagctggacgacagcgacggcctgctggcgtttccggcaaagggcgaaaaactcgcggtttctctgggctggaaaggcgacggcgtgatacaccagaacatcttcaccgtcgacgagctggaacacagcggcgcgccggacgtactcagcatccgcgcccgcagcgccgatttccgcgataccctgaacgtcaagcgggaacaaagctaccacgatgtgacgctgggcgcgattgcgcaaaccgtcgcggcgcgccataagctaaagtctacagtcagcggcgaactgaccgggatcgccattgagcacgttgaccagacgaatgaatctgacgcctcgttcctgacccgactggcgcagatgcacggcgctatcgcctgcgtgaaaaacaacacgctgctgctgatgcctgtcggctccgggaaaagcgccagaggccagccgttgccgatggcaaccattacccgcgcagacggcgacagccaccggttcagcatggcggacagggaggcgtataccggcgtgacggcctactggctggacacgcgtaaagcgaaaaagcagtctactgacgtgaagcgcaagaggaaaaagaagaagaaaacgcagacagcggaatcaccttctgacgccacgtttagcgatgataacgtgatggtcggggaagagggcaacgtcaagatcctgcgccacacctatgccacgaagaataacgcataccgggcggccaaaagcgcatgggagcagttacagcgcggcgcggcgacgttcagcctcactctggcgcgtgggcggcctgacttgttcccggaattgccggtacgggtggaagggtttaagtcggagattgatggtactgcgtgggtgattacgcggtgtgtgcatacgctggatgggagcggatatgttacggaggtggagtgtgaattggggctggattaa

SEQ ID NO: 399167 - DNA, 429 bp, Salmonella enterica
atgatgatggctctggggctgtttgttttcagcctgaaaaccctgccctatcaggatatgcagcaatccgtctcatggcggcatccgaccagttcccgcataggccagcgcccggccagccagtttatcggcgcaggcgatgaaaccgtcacgctaaacggcgtgctgctgccggaactcaccggtggacgctttaccctgttctttctgcgtaagatggccgatcagggaatggcatggccgctgattgaaggcaccggctcgttgcacggctggtttgtgatcgacaacctaaatgtcactaaaagcattttcttccgcgacggcgcggcccggcgcattgagtttacgctggcgttaaagcgcgtagacccgccgaaagcaggcggtctgctgggtgacattatcacaatggtggacgggctatga

SEQ ID NO: 399168 - DNA, 2850 bp, Salmonella enterica
atgagcacgcaaaacctccgcttacaggtattactaaacgcagtagacaacatcacccgtccgctgcgttccgtctcgcggcagagcagcgcaaccgccagagcgttgaaaaccgcgcagcagcaggtgaaagacctgaaccggcagaccgggcaaatcgacggctaccgtaaactggcgcgggacgttgccgtcaccggcaaccggttaaaacaggcgcaggatcgcgtccgcacgctggccgtcgctatgcaaagctccgcagcccccaccgccgctatgcgccgtgaatttgaacgggcgcagcaggaggcgcgacgcctgaaagaacggcaaaaccagcttacacaggcacagcagcgcagccgtgccgcattgcgtaatgccggcattgatacccgcaacctcagccagcgccagaatgaattacgccaaggactggagagcgccaaccgcagcgtggaggaacagcgcaggcggctggaacgcctgaaccgacagcagcagcgaatgaacgcggcaaaaaacagctatgccggaaccatagacgcccgcaacaaactgaccggattcggcgcaaccgcgacggccaccggcgtgggtatgctctacggcggcgcgcgggtaatgatgcccggctacgatttcgacgtgggcatgtcacgcgtgcaggcgctgacccgtacagaaaaaagttctgatgagctgaagcggctgcgaaaacaggcgcgcgggctgggcgcgtcaaccagtttcaccgctaacgatgtggctcagggacagggttttctggcaatggccggttatacgccggataaaatcgaaaaggccatgccgcatatgctggatctggcgaaagcggcagggatggatagccagcttgcggaagtctccgacatcgcctccaacatccagtctgcctataaaatcccggcagaccagatgcagcgcatggctgatgccctgactttcacctttaccacctccaacaccgatttgcggatgctgggcgagacgatgaaatatgtcggcccggcagcgcaggcggcgggacaggattttgaaaccatgtcggcgatggtcgggatgctgggcaacgtggggattcagggatcgcaggcggggacgtccctgcgtatggcgctgttacggctagcggcccagcctaaacgcgcggcggaagcgctggcggatttgaaggtctcggtggcggacagcagcgggaaaatgaaagcgatgccacagctactggcggaaatctctgcggcttttgagaagcaagggatcggcggcgccggcaacgtgaagaaaatggcctacatcaaggatattttcggcgtggaagcctcttccgcgatgatggaactgctcgacaagcaggcttcgcttgacccttcgcagcgtattgaaacttatgcagagcaggttaaaggctccctcggtacggcgggcaaagtagccaaaacgatggccgataatatgaagggcgacatgccgggcttgcagtctgcgtgggaagatctcggcattgagatgttcgaatcggtggacagcccgctgcgcggcatcactcaacgcattaccgtcgtgctgcgctcagtcggccagtggatgaaagagaacccgaagctgaccgccacgctggtaaaaatcggtgcggcgatcggcgcatttgcggtagcgctcggtacgatttcactgacgctggcgggtatcctcggcccgatagcgatactaaaactcagtctgtcggtgctcggcatcaagggcggcagcgcgctggggctgctaatgaacgcctttaaaggcgtcggcaagacggtcatctggctggggcgcgcgatgctggccaacccgattctggcggtgatagccctgattgcaggagccgctgtctggatctggcagaactgggactggctggggccgaagttcgccgcactgtggaacagctttaagcaggtgtgcagcgacgtctggaacaacatcaccgcagccacgcgcgcagcgtgggaagggattaaatccttcctctccggctgttggggtggactggtgaatctcctgctgaactggacgctgtccggcctgatttaccagcactgggatactatcaaagccgcgaccattgaagcgtggaacaacgtggtggcatttctggggcaaatctggagcggcattaccactaccgctgccaacatctgggaagggattaaagccaccgtcagcgccgctctgaacaccattattacctttttcaccaactggaacctgtccacagtgtttaccaccgtctgggacaacgtcattaccagtttcagcaacctgcccgcccgtttcaccgagattggcggcaacattatggaggggctgaaacaggggatctttgccaagtgggaagccatcaggcagggcgtgctggatttgggcagcagtatttccaactggtttaaagacaaactcggtattcattccccgtcgcgggtgtttgctgagatgggccgccataccgtagacgggctggcggtcggcattgcgggcaatacccaaacggcgctggccagcgtcgggcaactctcgaagcggttaatcgccgccagcgccggcctgacgctcagcgcggcggcggtcgccatgccgccgattgccgcagtcccggacaaccgcgccccactctccccgtcatccgtcgcatcaccatcggccagcagcgggccggtcactatccatattcacgccgcccccggcatgaatgaacaacaactggcaaaactggtggcgcaggaactggacaggcgcgaacggcagaacgcggccagaaggcgcagcagcctgcgcgatatagattga

SEQ ID NO: 399169 - DNA, 297 bp, Salmonella enterica
atgagcgaacgtaagagcgttaccctgaatacgcccctgaaacgcggtgaaaccgagtttgccgagttccagatccgcaaaccgctgggcggcgacctgcgcggcgtcagtctggtggagctgctaagcctcaacgtcgatgcgctcaccaccgttctgccgcgcatcaccgcgccggcgctgaacaggcatgaagtggcgcaactggactttatcgacctgacggccttcggtacggcagtgatcggttttttgccgcagacctcgacggaagcaacggataccccggacgaatag

SEQ ID NO: 399170 - DNA, 516 bp, Salmonella enterica
atggcgctacccagcaaactgaaatacctcaacctgtttaacgaaggcgatatctatctggcgcaggtggaatccttcaccccggcgaagctgacgcgcaagctggaagcctatcgcggcggcggcatgaacggcgcggcgcacgtcgatctggggctggatgacgaagcgctcagcgtggaatggtcaatcggcggctatgaactgctggcgctgcgacaaatcggctggacgaagatcagcggcgtgatgctgcgcttcgccggcgcgatccagcgtgaagacagcgacgaatatgacgcggtggaaatcgtggtgcgtggccgtcataaggagctggatcgcggcgaatacaagcagggcgaaaactccgccaccaaaatcagcaccctctgcacctattacaaagagagcgtcaacggtgagaccattgttgaaatcgacaccgtgaactttattgaaaatattgacggcaaagatcgtattgccggcgcacgccgggctattggcctgtaa

SEQ ID NO: 399171 - DNA, 1179 bp, Salmonella enterica
atggcaaccgactaccaccacggcgcgcgcgttattgagattaatgaaggcgtgcgcccaatccgtactatctccacggctgtcattggcatcgtctgtaccggcgctgacgccgacgcgcaaaccttcccgctggacaccccggtgttgttaaccgatgtacgatccgcgctgggtaaagccggagatagcggtacgctggcgcattcgcttgacgccatcgccgaccagacgcagccggtggtggtcgccgtgcgcgtggccgagggcgaaaacgccgccgaaaccaccgccaacatcatcggcggcagcacctctgccgggaaatacaccggaatgaaagcgctgctggactcacaaacccggctgaaggtaaaaccgcgcattctggcggtgccggggctggattcactgcccgtcgccaccgaactggtcagtatttcacagcagcttcgcgccttcagctatctgtcggcgtttggcgcgcagactaaagaagaagcggtgctgtatcgcgaccagattggcgcgcgggaagcgatggttatctggccggattttatcggttttgatacgcaggccgccgccgagcgcaccctgtacgccaccgcccgcgccgtgggtttacgcgcgaaaattgacgaagaggtcggctggcacaaaacgctgtccaacgtcaacgttaacggcgtcaccggtatctcccgcagcgtcttctgggatctgcagtccaccgccaccgactccgattacctcaacagccacgaggtcaccacgctgatttgcaacggcggctatcgcttctggggttcccgcacctgtagcaccgatccgcttttcgcctttgaaaactatacccgcaccgggcaggtgctggcggacaccatcgccgacgcccatttctgggcggtggataaacccatgcatgcctctctgtttcgcgacgtgctggaaggcgtcaacgctaaattccgtgaattaaaaggcaacggctatatcgtcgacggcactgcgtggttcgatcccgccgccaacacgccggatatcctgaaagcgggtaaagcctacatcgactacgactacaccccggtaccgccgctggaaaacctgatgttccgccagcgcattaccgaccgctatctggtcagccttgctgattccatcgccaccaccgcctga

SEQ ID NO: 399172 - DNA, 762 bp, Salmonella enterica
atgaatacattacccgttattccgtggatcggcggcaagcgtcggctggcaaaatacatcctgccgctgtttcctgaacaccgctgttacgtcgagccgttctgcggggcggcggcgctattctttataaagcaaccatctcaggcggaagtgctgaacgatatcaacggcgacgtgattaacctctaccgcgtactccagcaccatttagaagagtttgcgcgccagtttaagtggtcgctggtcagccgcgaaatgtaccgctggctacagctcaccccggaagaaacgctgaccgacatccagcgcgcggcccgcttttattacctgcaaaagctggcgttcggcggcaaagtggaaagccgcacgttcggcaccgccacgacctcaccaccgcgcctgaacctgctgcgcatggaagaggatttatccgctgcgcatctgcggctggcgcgcgtctgcatcgagaatctggactgggcggaatgcattcgccgctacgatcgtccgcacactctgttttattgcgatcctccctattgggggacagagggctacggcgtaccgttcgggcttgagcaatatcagcgtatggcggagctggcgcgcaccattcggggtcggatgattatctcggttaacgatatcccggaaatgcgcgacatcttccacggcctgactttctctaccgtcggtatccgctataccgttggcgggatgaagccggccagcgccacatcagaattgattattcagaattaa

SEQ ID NO: 399173 - DNA, 708 bp, Salmonella enterica
atgagtacattcgcattttccgacgaaccacaaaccctgcgcgtttttaactacgcggcagatactcaggaatttatcggcgtcagcgatgcatatatcgcccccaacaccggcctgcctgaatattgtaccgatattgaaccgccggaatgtcagaccggttttgctctgatattcgacggcaaagcatggctcccgctcgaagaccatcggggtaagaccgcgttcgataaggacgccggctgcgaagtgctgattaacgcgctggggccattaccggataacgtcacgctgctgaaacccggtagtcagtttgtccgctgggacggcaaacggtggcaacctgatagtgaaaaagcgcgtcaggcaaaaaccgccgaaataaagcggcaccgcgaccacctcaccgccgactacatcatcattgacggccaccacttccacagcgacgccagcagccgcattcagcaaatgacgttaaccaaaatgggactggccgggcaaatcccgaatgggctgatgtggcaaacccaaaaccacggtctgattgaattaaccaacgacatcgcggcgcgatttgaagccgaaacgatggcgcacgatatccgtttgttcgccaccgcccagcggcatatcgccgccgttgaagcattaacggatatacgggcggtgatggattacgattacagcaccgggtggcaaccatga

SEQ ID NO: 399174 - DNA, 1512 bp, Salmonella enterica
atgagcgccacctatttcacgttattaacctctgtcggtgaaaccacgctggcgacttccaccgcgcagggttccccgctacgcctgacgcagatggccgtgggcgacggcaacggtaatttgccgacaccgaatagcaaccagacccaactggtcaacgaacgccggcgcgcgccgctgaacacgctcagcgttgatcccaacaaccctaaccagattattgcggaacaggtactgccggaagacgtaggcggatggtggatcagggaaatcggcctctatgatgaacacaaccggctgattgccgtgggcaactgtccgccgacctataagccgcagttaaccgaaggctctggccgcacgcagattatccgtatggtgctgattgtttcccacacggaaaacgtggagctgaaaatcgaccctgcggtggtgctggcgacaaggcagtatgtggatgaaagcctcgctcgccacgcgcagtcccgcaatcatcctgacgccacgttaacggccaaaggctttacccaattaagcagcgcgaccaacagcgccagcgaaacgctggccgccacgcccaaagcggtaaaagccgcttacgatctggccaatggcaaatataccgcgcaggacgccaccactgcccgtaaagggattgtccagctcagcagcgataccaacagtgccagcgaaacgctggccgccacgcccaaagcggtaaaagcggcctacgatctggccagcggcaaatataccgcgcaggatgccaccactgcccgtaaagggcttgtccagcttagcagcgctatcgacagcaccagcgaaaccctcgccgccacgcccaaagcggtaaaagcggcaatagacaaagcgctggcggcggaaacctgcccggtcggaacgccgataccgtggccctccgacaccgtccccagcggctatgccctgatggtcggccagtcgtttaataaagtcgcttatcccagactggccgccgcctacccttccggcgttatcccggatatgcgcggctggaccatcaaaggcaaacccgccagcgggcgcgcggtgctgtctcaggagcaggacggtattaaatcgcataaccataccgccagcgccactaatacagatttaggcaccaaaacatccagcgtcaccgacttaggtaccagaaccaccagtgcattcgattacggaacaaaatcaaccaatactacaggggcacataatcatcaaatccccactgacggcgttaaaaccggcagaaattcaatgtcaatagtgaactcggacaatagcgatgaagattaccgcgatgttacaagcactaacggcaaccacgcccacactgtttatatcggcgctcacgctcacacgctggctatcggcgcgcataaccacagcatcgctttaggctcccacggtcacgctattacggtgaacgcagccgggaatgccgagaacaccgtcaaaaatatcgctttcaactatatcgtgaggctggcatga

SEQ ID NO: 399175 - DNA, 618 bp, Salmonella enterica
atgaatagccgttccctgctccccgataacgccagcccgctggagcataatctggcgcaaaccggcagcctgattgaacaggtacccgttccgctgcgcagcctgtggcagccggatagttgccctgcccccctgttgccttatctggcatgggcgttttccgtcgaccgctgggatgaaaactggccagaagagacaaagcggcaggtgatcgccgcctctttctacatccatcagcataaaggaaccatcggcgcgctgaagcgcgcggtggagccgctcggtttccttatccgggtgaccgagtggtggcaacggcaaccggaaggcattcccggtaccttcgcgctggaagtcggcgtgcgcgaacagggcatcaccgaacagatgtatgcggaactggaacgcctgatcgatgacgccaaaccctgttcacgccacttaatcgggctggctgtcagcctgcagagcaacgggtctctctggttcaccgcgacgcactacaccggcgatacgctcaccgtttatccctttatccccgaccacgtatacagcgcgggccgtgactaccgtggagccgcgctacatctgattgatacgctgaggatcgccccatga

SEQ ID NO: 399176 - DNA, 912 bp, Salmonella enterica
atgagcgcgctgaccgatttaagccagcttcccgtccccgatgtggtggaaacgctcgactttgaaacgctgttcaccgcacgcaagcagcgctttatcagcctgtaccccgccgaacagcgggcagaagtggcgcgcacgctgagttatgagtcagaacccatcgttaagctgttgcaggaaaatgcctatctggagatggcgctgcgggtgcgcattaatgaagctgccgtcgccaatatgctggcccacgcctccgggcgcgatctggacaatctggcagctaactttaaagtcttccgtctgctgatctcccccggagacagcacggcggtaccaccggttgagccggtttatgaatccgacagcgatctgcgtatgcgtgcgcagcaggcgtttgaagggctgtcggtcgctggcccgaccgccgcttacgaatatcacgcccgcagcgccgatgggcgcattgccgacgtttccgccatcagtccgcatccctgttacgtcaccgtgtcggtactttcccgcgaaggcaacgggcaggccagcgcggagctgctggcgatcgttgatgccgccctgaacgatattgatattcgtccggtgggcgatcgccccaccgttcagtccgccgaaatcattccgtaccagatcaatgcgctgttgtactgctatcccggcccggagcaggaacccatccggcaggccgccgaacagcggcttaaaaaatatgttaatgagcagcaccgcatcgggcgcgatatccgccgcagcgcgatttacgccgcattgcatgtcaccggcgttcagcgcgtggagctgattgcccctgctgctgacgttattatcagcagaacgcaggccagctactgcaccgaatggcggattgctatcggaggcagcgatgaatag

SEQ ID NO: 399177 - DNA, 351 bp, Salmonella enterica
atgtacctcggtatgaacgccggaaacggcagatcgttaagcgatgagttacacattacgcagtccgtcaaggacattctgaccacaccgatcgggatgcgcgtgatgcgccgcgattacggctcggtcattatgaacctgattgaccagcccaacgatggcggcacgcgtctgcgcgtgatgtcggcggtggtgatggcgctgacgcgctgggagccgcgcattgacatcatcggcgtggactttgccgccgagggagccgacctcagcgttaccgttgaggccgaacgcactgacatccccggtcagccgtggaaattctccgtcccgatcgacaggagaaactcatga

SEQ ID NO: 399178 - DNA, 600 bp, Salmonella enterica
atgagcgacgcaaaccacccagccaacctcgccgagctgcaccggcgtattgagaacctgatccgtaccggcaccgttgaagcggtgcagggcgatcgggcgcgcattcgtaccggtgaactgaccaccaactggattccgtggctgacgctgcgcgccggtgacgcccgcacatggtggcggccttctatcagggagcaggtgctgctgctttgtctgagcggtgagttaaccaccgccgtggcgctcccggccatctattccaacgccagccccgcgccgttattggatgaacaggttcaccacgccgtttaccccgatggcgcagtggttgaatacgatccgcgtaccggcgcattaaaagcctccggtatcaagaccgcactggttgaagccagcacccgcgtcacgctggatacgcctgtcgtcgtctgcactcagcatctggaaaccgccacgctgtccgttaaaaaaggcggcacgcttaaaggcgcttacacccacagcggcggcagctttacctccaacggcgtcaccgtccatacccatacacacacaggcatagagcgtggggggagcaataccggagggccacagtaa

SEQ ID NO: 399179 - DNA, 906 bp, Salmonella enterica
gtggcaaattcaccagtactacaacttcaggaactggctagctcttcggactccgatattctcgaagtcttactgaaggcaaaaataatttctgtcaaactaaatctaaatgaaataactgattggatagaaaacgaaattaatgggtaccctaccagggaatcaacaccagattatcgtcaatgtcgggcaccgttaaaagcatttaaccctttccgtggctggattccggttgatttaggaagtaataccccacaggacattaaggacttatttaatacagcttgtttcacagaatcaatatccagtattcaattgaatgcaaacagtgaaaaatcactaaggcttcctctccctgaatcaatggctgaatttttatacgaaggatctgattccccatcaaagatggaattagcgtggatgattagttcaggaagtatgttgaatattatatctaatgtaaaagccagaattgttgactggacattagaattagaaaagaaaggtatattaggggaggggttagttttctctctaaaagaaaaagaggtggctactgctatgacgcaaaacatttacaacattactggaaatatcactaacagtggagtttttggcgctaataatcacgacataactcagaataataatgtttcttccggtaacctcgaatcactaattgatgaattaaaaaaattaggtttagtagacgaggatattcaagaattaaattctgctattcaaaatgataccccacctgccacaccggagtcctttggttcacagaccagtgcatggataggtaaagttgtaggcaaagcttatgctggctctttaaaaattcccggagccgttgctgctggagtaataaccagactgttatgcagctactatggcatagcttaa

SEQ ID NO: 399180 - DNA, 456 bp, Salmonella enterica
atgagcgacgatctgctgcaactccatcgctgggccgatggcctgctggcaaagctctccccggcaagccgaacccaactggcgcgggaaatcgcccgtcgcctgcgccagtcgcaaagtagccaaattgccgcgcagaagaacccggacggctcgccgttcgccccccgcaggccccagctacgcggtcaaaaaggtaaaatccgccgccagatgttccgcaagctgcgcaccatgcgctatatgaaaggaaaaggcgatggacagggagcgaccatttcgtttctcagcagcgtccggcatatggtcgccgttcaccagtatgggttgcgcgatcgggtgaatcgctatgggctggaggtggactacccgcagcggcagttgctggggttttcttcaacggatatgcaacaaatagaagatctgatcacaaaatatattaacgtaatttgttga

SEQ ID NO: 399181 - DNA, 459 bp, Salmonella enterica
atgcacaaagcgcagcgcatccgtgaactgctggccgccagcgtcccgcatctgcaacagaacccggacgcgctgcgggtgtttatcaataagggacggatcgttgccaccgcagggcgcagcaccagctttgaataccagtacacgctggaactgttaatcaccgactacgccgactcccctgacacgctgatagtgccgctggtcggctggatgtcgattcaccagcaggaagctttcgccaacagcgaactgcgcgagcgggcgtttcaatttgaagccgaagccatcgaccaccagagttacgatatcagcatcaaactgacgctgacggagcgcgttatcgtccgccagcgcgacggcgggctggaggcaaagcactgcgacgatcagccaccggaaggcggttacaacggctgggaaatcgcctgtcgcggtgaaaccattgtgagcacctga

SEQ ID NO: 399182 - DNA, 453 bp, Salmonella enterica
atgatgagctggattaaagccgcaccgctgctgttgctgggcgtgatgctcctgtggacgaactggcagcgtatgacgcagcaagaacggcttatcgaacgggaacaccacatcaggctggccgacgcccggatcgccacgctgaccgaatccctgatgacaaaggtgcatgaactggacgaactccagcagcaggccgaccgcaaccagcaggcatacctgacgctacagcagcaaaccgccgccgcccaccaccaactgcggctgcgcaatcagcaactggagaaactgaaacgtgagaatcaaccgcttcgcgagtgggctgatactgctttgcccgctgatattatccgcctgcaccagcaccccgccgttaccggcagtgcggcttaccgccgcctgtccccggctttcgccctgccagcttccggcgctggcgccgcagaccaatga

SEQ ID NO: 399183 - DNA, 591 bp, Salmonella enterica
atgacacctgtactcacccatgatcagcagcaggccgccgcgctgtatctgggcatcccgctggcggcattacaggccgtgcaggaagtcgaagcccgctctcacggcttcctgcccgatggtcgcccggcgctcctgtttgagcgccacatcatgtatcgccagctaaaaaatcacggactggacgccgatcggctggcgcaaacgtacccggatctggtgaacaaaagcgccggcggctatcagggcggcagccgtgagcactaccgcctgaatctggcgaaacagatccacagcgccgccgccattgaaagcgcaagctggggactgtttcagattatgggctttcactggaaagcgctggattacgcctctgccgccgactttgaaaagcaaatgagcgaaagcgaacagatgcagcttgacgctttcgtgcgcttcattgaggccaatccgaagatccacgacgcaatgaaaacacagaactggccagagttcgcccgccgctataacgggccacagtacaaacgcaaccagtacgatgtgaagctggcggtggcctttgaaaaattcagcaaggcagcggcatga

SEQ ID NO: 399184 - DNA, 309 bp, Salmonella enterica
atgaaactgatcctcagccttaacgccattgtctgcctgctcatcaccgttcgcctgtttctctaccgccgcgctcacggcgccgtctaccgcccgctctatagctggctggcatggctgctgatgtgctgcaccgcgtcggtggccgtactgattttcttcggtctgtaccgctatgtgttcattgctgaaaccgccatcaacatcgtactgctgttctgtctggcgacggcgcgcggcaatatcgccagcctgattaagccactacgtcataaggaaacgccccatgacacctgtactcacccatga

SEQ ID NO: 399185 - DNA, 378 bp, Salmonella enterica
atgaatgaacccgtcaccggcaccgtcgccgccgcctccgtcagcgcattttccatcgccacgctgttcccgtctctacaggctccggtactgttaggcgcactgtgcggcgcgctgctgctggtgatttcgcaaaaagagatcgggctgcctttacgcatcgcgttcttctgcgtggcgttcatcaccggcctgctgaccgccgatctgttcgccgcgctggttgccggctatctgccacagcacctgacggaaaaagtatctcccggtttcggcgcgctgctctcctctgcgctcaccgtcaaggcgctgctgtgggctatccgacaactggataaccccggtcaactgctcgactttttaagggggcgaaaatga

SEQ ID NO: 399186 - DNA, 204 bp, Salmonella enterica
atgattgtccacagcctgcaaaacgagacgctcgaccagctttgctggcgcgtcttcggacgcactgccgggattgtcgaacagctttaccgcgacaacccacgcctgtgcgaactgccgctgcgcctgccgcacggtacggcggttaacgtaccggaacaggcccccgccgccgcgcgtcaacggatcaatctgtgggactga

SEQ ID NO: 399187 - DNA, 321 bp, Salmonella enterica
atgttgcctgaaaccaacctgctttcttccgaactggcggacgcgatccacaagctggatctctcgcatctgaacgccgacgacaccctgcaactggccaacagcagcgaggagtgctgcgccggtctgtgccacggcctgcactttctgggtaaaaccttcgtctcctttgccgacagcaacgtgctggagttctcgccggaaagcctgtgccagttaggacacggcctgtcagccactgcgcttctgatcccggcgctgatccagctccagaagtccgcagagcggcaaatcatcaacaccgacaccggcgaggcataa

SEQ ID NO: 399188 - DNA, 207 bp, Salmonella enterica
atggctgctgccaatagtatcacgcacgcacattcaaagctctacacctttctgaacgcccgttccaaccgcttattaagcgagatccaccccttacgcctgatttccgtactggcgacaaccgagactgaagcccgcagtctgctgaccgatttcccgctggtcttcgtctcctgcaaaccgctggaggtgcgctatgttgcctga

SEQ ID NO: 399189 - DNA, 318 bp, Salmonella enterica
atgagccatgatattgaagtcagcagcggcaacgtttatgccgatattggcagagacgacgccgaagaaatgctggtaaaagcccagcttgccaccactattggcaacatcatcaaaagccgtcgcctgacgcaagaacaggctgcaaaactgctggggatgacgcaacccaaactgtccaatatgctgcgtggacagttccggggcatcagcgaagccaaaatgctggaatgtctgacccgcttagggcgagatgtgcagatcgtggtaggaaaaccacgccggacaccgggcagcctgaaagtggtgtttgcctga

SEQ ID NO: 399190 - DNA, 345 bp, Salmonella enterica
atgaagccactatattgggttggtagtagtaagaaagacctccagtcattgcccgaagatgtacaggatgttttcggctatgccctgcatctggcacaggcaggcggtaaacactcccagaccaaaccactgaaggggtttggtggggctggcgtacttgaggtagtagaagactttctcggtgatacatatcgcgcggtgtataccgttaagttcggtgatgctgtctatgttttgcacgtattccagaaaaagtcttcatcggggatcgccacgccaaagcccgatatggacaagatccgcgaacggctgaaagccgcagaaaaccatgccagaggagcataa

SEQ ID NO: 399191 - DNA, 207 bp, Salmonella enterica
atgagcaacatcaatgttaaacttgaaaccctgcgggctgcacaagcggccctgcgcgaagccttatacgactttcaggacgccttgctggatcaggtcgatggcgcggagcaccatcacgatgtaaaagagctgctggaagaagcggaaaagcatatggacaggctggaacgtagcaccggctgggccgccacctacataaattaa

SEQ ID NO: 399192 - DNA, 237 bp, Salmonella enterica
atgaccattcagaccgccagaacccgcccgatgaccgataccgcccgccgtatcagggacgcaatggctaacgctggcctccgcagcacatggccgctgcgcgatctggccgactacgccggcgtggagatgattaacgcggaatttattgtgacacagatggaactggccggttacgtgaagaaaacccactggggccactatatgttgacccgtaccggtgtggaggcggcataa

SEQ ID NO: 399193 - DNA, 468 bp, Salmonella enterica
atgaactttgttcaggtcgcccccgctaccagtcagccggggctgattatcaacaaccaccctttctttcccgatatcgacacgcaacacctgcgcgccgcccagcgactggacgccaccatcaccaacgaacggctgcgggaagcgctattgatggcgctggccagcgtgaatgaagacctgcgtgaatggcggctggaaaaggaaagccgtggcatcgcccgtattgcggacaccaccgccgaacggctggacggcgaaagcgtcaacctgcaccgttaccgccgcgccgtgtacagcctgatgcacgccaacctgctggaacgctaccgcagctttgacgccaccgcccacggcagcaaactggcggaacaaaaagaaagcgccgccgacgatctggcgcgcgacgcccgctttgcggtgcgggatattctgggcaagccgcgcagtacgtttgttctggtataa

SEQ ID NO: 399194 - DNA, 645 bp, Salmonella enterica
atgatgacgcctgcccgccgccacctgatgcgccatcaggcgctggccgccagccagcaggaaaaccagacttacgccagcggctacgagttaatgctggcgaaactggcgaccgacaaacgccgcctgaaagcgattcagtccattgagcgcaaaatcgaggtgaagggtgaactgttacccgatcaccagccgtgggtgagtggcgttctggccgccgacagcaaacagcaggacgatgtatttatgacggtactcctgtggacgctggataccggcaacttccccgctgcgtacccaatggcggaacacgccctgaagcacggctgggtaacgccggatcagtaccagcgacaaaccgcctgcatggtggccgaagaggtggcggataccgccctgaaacagctcaccgccggcacctttgcggcgctggacagcctgctggccttcaccggactgctcgccgatcaggatatgccggatcaggttcgcgcccgcctgcataaagcacaggggctggcgcaaagcgaaaggcagccgcaggaagcgctggcacagttccagcgcgcattacagcttgatgaaaacgttggcgtcaaaaaactgattgagcaactggagcggcaaatccgcaacaatgcataa

SEQ ID NO: 399195 - DNA, 1020 bp, Salmonella enterica
atgcgtaacgaaacccgcttaaaatataacgcttacgttgagaccgtcgccggattatccggtgtacacagcgccgccgttgagttcaccgtagacccagcagtacagcagcggcttgaaaccaaaattcaggcctcagtggaattcctgaccaaaatcaacgtacacgaagtggtggatcaggaaggggaaaaaatcggtatcggcgttgaccgtccaaccgccagccgtaccgataccagccagcgcgaacgcgaaccggttgatccgaccagactgacatccaaccgttatcgctgtgaaaagaccaactacgatacggctttaccctatgcccggctggatgcgtgggcggcccgcccggacttccagatccgcgtgcgcgacagcattaccagacggcagggtttagaccgcatcctgatcggtttcaacggtacccacgttgctgcgcaaaccaacttccagcaatacccgctcctgcaagacgtgaataagggctggctacagcagtatcgcgaccacgccccggagcgcgtcatgcgcgaaggcgtggaaggttccggtaaaattatcattggccggaacggagattatgaaaatctggacgcgatggttaacgatggtgaagaaaatttgattgacgaatggcacgttgacggcgcagatctggtggctatctgtggccgtggcgttctgcacgacaaatatttcccaatcctcaaccagcacaatgaaaacagcgaaaagctggccgggcagatcctgatcagccagaaaactatcggcggacgccccgccgtgcgcgtgccgggattcccgcgcaacaccattctggtcaccgctttcagcaacctgtccatctacgtccagaaaggctcgcgccgccgcgccatcattgataacccgaagcgtgaccgggtggaaaacttcgaatcctccaatgacgcctttgtcgtggaagatttcggctgcggttgtttgtttgaaaacatcgaattcagggataacaacgcatga

SEQ ID NO: 399196 - DNA, 828 bp, Salmonella enterica
atggacaaaaatccgaagaaaaaactgctctctaaatgggtgcgcatcggtgtggaaggtgcaacctgcgataagcgcaccatcgagcgccagtggattgagcaaatggccgccacctacgatccgaaggtttacggcgcacgcatcaatcttgaacacctgaaaggtattctgccggacggtccgtttcagcgttatggcgacatcgcaatgctgaaagcagaagagatcaccgaagataatctgctgaaaggcaagctggcgctgtacgcccggctggttccgactgaccagttgattgaaatgaaccgcaagggacaaaaggtttactcctcaatggaggttgatcccaaatttgccgacaccggcaaagcctatctggtcgggctggcggtcactgacgatccatccagcctcggtaccgaaatgctctccttctgcgccggcgcgcaaaacaatccgctggcatcgcgcaaacgctcgccggataacgtcttcagcgtggcggaagagatcgaactggagtttgaagaggtggaggaaagcagcggtgaaacgctgtttacccgcatcaaggcgctgttaaacaaaaagcaaaaccgcgacgaccagcaaatgaccgatatccatgaggccgtagaggaagtggcctcgttctgtggcgaacaggtcgaccagatccgtagtgaactgacgaaactgcagatgcagcatcagcagctacagaccgactattccgcgctgaaaacgcagcttgcaaagcagccggccacgccgccgcgccagcccgccaccggcggcaacaccgacctgaaaaccgactgttaa

SEQ ID NO: 399197 - DNA, 1788 bp, Salmonella enterica
atgccgccagaaatcgaaaaacacctgcttgcccttcaggacggcgatccgcgccgtaaagcccgctacctgtactggcagggctttcgcatcgcgcggatcgccgaactgctgggcgtaaaagtcaccacgctgcatagctggaagcggcgcgatggctgggatgagtcggccccgattgagcgggtaacggcggtgaccgaggcgcgcctgatccagctcacgatgaaggagaacaaggagggaaaagattttaaggagatcgacctgctctggcggcagatggagcgtggggcaagggttgaacgctatcggcagggcggcaatgaagtcgacctgaatcctgctcttgcaaagcgtaacgccgggccgcgtaagtcaccggttgccaaccagataagcgaagagcaggcggagaagctgaagcaggtatttctggagggattatatccgcaccagaaacactggtaccgcgccgggctggaacaccgtatccgcgatatcaacaaatcacgccagattggggcgacgatgtttttcgcgcaggaagggtttgtcgatgcggtggaaacgggacgtaaccaaattttcctttcggcctccaaagcgcaggcgcaccagtttcgtcagtacattatcgactttgcccgcgacgcagcggatgtggagctgaagggggaggttattcacctgcctcataacgatggacgaatgtactttctcggcaccaacgcccgtaccgcacagacataccacggcaacctgtatctggacgaatatttctggatacaccgctttctggaactgcggcgcgttgctgcggggatggccagtcagaaacgctggcggcaaacctacttttctacgccctccagcattacccatgaggcttataagttctgggcgggactgctcttcaaccggggcagagcgaagagcgaacatattcggctggatatcagccaccgggcgctggctgccggtcggttgtgtgaggacgggcagtggcggcagattgtcaccattgaagatgccatccggcagggttatgacctgttcgatattgaccagctccggctggaatactcgccggaagagttcgcaaacctgtttatgtgccagtttatcgacgataccgcgtcggtattcccgctaagccagttgcagggttgcatggtggatagctgggaggtctgggacgactacaagccgtttgccctgcgtcccctcggcgaacgttcggtgtgggtgggctacgatccagccttaaccggtgacagcgctggctgcgtggtggtggccccgcccgtggtggaaggcggtaagttccgggtgattgaaaaacatcagtggcacggcatggacttcgcggcgcaggcggaaaacattcgcaaaattaccgaacgctataacgtgacgtacatcggcattgatgtgaccggcatcggccacggcgtgcatcaactggtgaaacagttcttcccggcagtgcaggcgttctcctactccccggaagtaaaacagcgtctggtgcttaagacactggacgtaatccgccgccaccggctggagttcgacgccgggtggacggatttggcgcagtcgtttatggcgatccgcaaaaccctgactccgtccgggcgtcaggtgaccttcgaggccagccgttcggaagaggtttcccacgcggatctggcatgggcgtgtatgcacgccattatcaatgaaccactggaaagctctggcggcgcgaacagcgggcggggcttaattaaggtgtacggatga

SEQ ID NO: 399198 - DNA, 987 bp, Salmonella enterica
atgaataacacaatcgcttttaccttcggtgaaccggaagccctgctggacaggcgggaaatactgaactatctggagtgcgtggattttggcaaatggtatgcgccgccgatggatttcaactcgctggcgttgtcgttccgcgcttcggcgcatcataccagcccgatctgcgtgaagcgcaacgtgctggttggtacctttatcccgcatccgatgttgacccggcaggcattcagccgccttgcgctcgattatctggtgtttggcaacgcctatctggaacggcaggaaaaccggctgggccagccgttaaaactggtgccagcgctggcgaaatacgtccggcgtggcaaggagctggataactatttctttgtccagcccggcaaagtggatcatgagtttacgccgggcagcattggtcacctgctggagccggatatcaatcaggaaatctacggcctgccggagtacctttctgcgctgaacgcggcatggctggataactccgccacgctgttccgccgccgttactacaagaacggcagtcatgccggttttatcctctatctgagcgatccggctcataacgaggcggatattgacgcactgcaggaggcgctggcaaacagccgcggccccggcaacttccgcaatctgttgatgtacctgccgaacggcaagccggacagcgtgaaagtgatcccaatcggtgaagtggccgcaaaagataacttctccgatatcaaaagcgtcagccgcgacgaccagttagccgcacaccgggtgccgcctgccctgatgggtgtggtgccgagcaatgcgggcggcttcggcgatgcgattaaagcggctaaagtgttcaactgtaacgagatcgagccgctgcaggagcggtttaaagaactgaacgactggctggggatagaggtgatacgcttcagaaagtaccgccttgccgacgacgacgcagagcatccctga

SEQ ID NO: 399199 - DNA, 1092 bp, Salmonella enterica
atggcctactatagcatagagaaacgtccgcgcgcagatggcacattgaggtatcgctgtactgttggcgtcaaagaaaaaggtaagtacatctaccgggaaaaccggacgtttggaaaactggcgttagccaagacatggggagccaagcgcgttgccgaactggaagaaaatggactccccagagacgacgatgccagtaaaatcaccgtaggtgagttaataaggcgctacattagcgatcctaacctcggcggcaaagctggtcgtactaaacgttacgtactggatatgctggtcgactgcgatatcgccggtatcatcctgtctgaactctccactgcacatgttattgagcactgtcgccaccggaacggtgctggcgcaggcccagctactgtcagtcacgatgttagctacctttcctccgttctggctaccgcaaagcccgtctatggtatcaactacagcggaaacccagcttatgaagcgcgcccacgactcattgaaatggggcttatcggcaaatcccaacgccgcagccgcagacccattaatgacgaactggacagaatgctcgccggattgcgtaaacgtagtgaacaccgcgaggctaaaatcccttatgaagacatcctgaacttctctattttgagctgtatgcggatcggggaggtttgcaaactgcgttgggaagatatcgacgaacatcagcacgccgttcttgctcgcgaccgtaaagatccgcgcaaaaaagcgggaaaccatatgctggttccgctgttgggtgatgcatgggaaatagtgcagcgtcagccaaaaaccgatgaactcatattcccctataattcccgctcggttaccgcaggcttccagcgtgtgcgtaatgcgctgggcattcaggatttacgttaccacgatatgcgacgagaaggagccagccgactatttgaggccggtttcagcattgaggaagtcgcgcaggttaccggtcaccgttcgttaacggtactctggcaggtatataccgagcttttccccaaaaccctgcataacaaattcaatacactgcacaaaaaaacgaaaaagtag

SEQ ID NO: 399200 - DNA, 315 bp, Salmonella enterica
atgacaacggaaaatttttcatctgcacaaaaatgcgtcagcgatcacatttttctggccgccctgaaaacaaaaacctcgccgaaaaaagcgaggtttttacagcgagatgcgggtggtagccgcgaaacacactgtgttatgtcaacagcagaagtatacgcgttctgtgcagaacgcgcaatttcggcgcgaattttgatgtatttgagtatggatcagaagctttgttctgtctataaattactgttaatttatacagtatttaactataatgtctttgacacaatgtgttatgcgggggccgcatcgtaa

SEQ ID NO: 399201 - DNA, 582 bp, Salmonella enterica
atgtcacgagtttttgcttactgccgggtctccactctggagcagaccacagaaaaccagcgtcgtgaaattgaagcggcgggttttgctgtcagaccccagcggataatagaggaacacatcagtgggtcgatcgcggccagtgaaagaccgggatttatcagattgctcgaccgcatggaaaatggtgatgtgctgattgtcactaaacttgatcggcttggccgtaatgcgatggatattagaaaaaccgtcgaacaactggctgtgtctgaaattcgagttcattgcctggctctgggtggcgtagatctgaccagtccggccgggaaaatgactatgcaggtgatctcagccgtggctgaatttgagcgggatttgctgcttgaacgtacacactcaggtattgcacgagccagagcatcaggaaaacgttttggccgtccttctgcgctgactgaagctcaaaaacgagccgtgatggaaagcctcaatgcgggaagcagtgtcagtgccgttgcccgtgaattcaacaccacccggcaaaccattctcagggtgaaagcagcattcagtgcctga

SEQ ID NO: 399202 - DNA, 426 bp, Salmonella enterica
atgagcaacattaccatctatcacaatccggcctgcggtacgtcacgtaatacactggagatgatccgcaacagtggcaatgaacccaccgttatttattaccttgaaacacccccgactcacgatgagctggttaaacttattgcagatatgggaatcacggtccgtgctctgttacgtaaaaacgtggagccttacgagcaattagggcttgctgaagggacattcagcgatgagcaattgattggttttatgctcgaacaccccattctgattaaccgccccatcgtcgtgactcctcttggaacccggctgtgcagaccttccgaggtcgtactggatatactaccggagcctcagcaaggtgcattcacgaaagaggatggtgaaaagataactaacgagtcaggtaaacgactaaaataa

SEQ ID NO: 399203 - DNA, 321 bp, Salmonella enterica
atgctacagcctgttcagcttttcaaaattctgtcagacgaaacccgtctggctatcgtgatgcttctcagggaatcgggcgagatgtgcgtgtgtgacctttgcggggccacctccgagtcgcagcccaaaatttcccggcatatggcaatcctgcgggaggctgagctggtactggaccgtcgggaagggaaatgggtccattaccggctttctccacatatgcccgcatgggcagcagaaaccatcacgacatcctggcactgcctgcgggaagacgttcgtcagtggctggataaatcagctgcatcatcctgctga

SEQ ID NO: 399204 - DNA, 996 bp, Salmonella enterica
atggctgaagattcagagtatttttctagtttcattgatattgataagcgtccttccttctcatcagagcatgagatcagtcctgaaaacttccaaaaactaataggtgaatacaaattcaccgaagatgtgatttgtcaggtaaaagctttaaatggcgtgtgccatcaaaaacataaaagtggttggttaggcgtgaccgcggatggttttgaagtcctgatcggcggacattgtgcgagaaaatacttcaaagctgataaatcctttaccaatgaaagaaagcgggttcgcaaagagatcgacagaaagaaagcccttcataagctaaaggattttcgtgataacgctctgattatcaatgaagaactatcccgtcttcgcgctacgatcattaatacaagagtcattttagatcagatacttaaatcatttccaaatgcagtattgtcattcattactgatgcgcagaagactcgcaactgggatatcaaaattgatgtcctgcacaaatttaatgatgacaataaacccatatgggttaccagttcattaggcaatttgaagtcgctaccttatatgtatgaggtcattagtttaatggcccggacaaaatcgctcgcagaaaaattctccgaggcctgcagcctgaatccagaagatgtatcgacaccaaaactgaaacggatcatagagaccctgaacgacaaggacgatctaatcaaatcagccgcatctttaagccaggaagtcgcgcgattcattgatacaagaaacctagagctacttatcttcgtttgcgaaaactacgaagaggagtacctcgcaaccaaagcaattatggctatcacaggtgcaaaagtctcaactgatgggcatgtaaacctgcgactacgtcggataaaggataaaactacaaaactctttgacggaaaactgattagaaagaatcagatagtcgagaaattccagcgtagcaaggcattcactagttga

SEQ ID NO: 399205 - DNA, 942 bp, Salmonella enterica
atgaaagaaactacaacagtcgggattgatatatcgaaagacagctttgatgtccacattgatacaacatcccagtttcttcatctggaaaacacaccgacaggcatacagttattgctggaagcgttgagggagttatcggtttcgcttgttgttatggaggctacaagtaagtatcactatcttctggcatctatgctcactgaagctggattagcagttgctgtggtaaatccccgccaagtgaaaaactttgccagagcattgggaaaaatagcgaaaagtgatcccatcgatgctaaaacaatttgtgagtttggaaagcgtatgcagccagctccgcgtccgcttaagggtaatgaacttcaggagttatcgttaattctggctcgccggcgacagctggtgcagaccagaacgatggaagcggcccgttgccaggaaaaaccgtctccatttattgaacaagggatcgcaaagcatatagcgtggttgaacgcagaaattaatgcactggatcttgagattaaagccaggcttaaggaatcagaagaactgactatcaggcggaaattgcttgatagtgtaaaaggtattggcccggttacgcaggctgtgcttcttacgcagttaccggagttgggaaaattaaatcgcaggcaaatttccgctttggtaggagtatgtccgtatgatcgtgacagtggctcactaagagggaagagagccatctggggcggccgttcaggagtgagggcaatgctttacatggcgatgctttcagcagtgcgttacaacccacaaattaagatgttttacaccaatctggtttcacgcggtaaacccaaaaaagttgccttaactgcttgtatcagaaaatttattacaatcctgaatgcaatgtttcgtgatgagcggatgtgggcagagctaaaatcataa

SEQ ID NO: 399206 - DNA, 183 bp, Salmonella enterica
atgcctcttatccgagatattcaccaacgcttttggcgtcttccacaactgccgtggctggagctgcgtactaccagtgaaagccgtcaggcttataagcgtcacagccacccgcaactgtcgcaggggaaacccgttgcatcagcaacgggcaagagtatctgttacgccccggcgagctga

SEQ ID NO: 399207 - DNA, 615 bp, Salmonella enterica
atgactgcaaagatgcccaaaatcagctttcccgtgccctcaaacaaaaatggtcatcccttttcctcagcggaagagctgttatcggcgctcggcggagaaagttcaggactgtatctggtgggaagtcagggaatgtggcacggcggtatccatattaccgatgcaaccatgccctggtgcgccctgagcactgacagcgcagcagagagtgaatatcgccctgagctttataaaggcgaacaatttattcgttgtatggcggatggtgagattgttgcctggcgtgtatgtgagagctatgaaagtgccgggattgactggcgtggtgaaaaacttctcctttcaaactcctttgtattagtaaaacattatattcagccgggagattcagtagagagtgggctgacgttttttacgctttatatgaatatggcaccctatcttgcctacaaacaacagggaaatcagctcgacagaaaagtggcaggtgttcagcgctattacaccagtgtggaagatttacaggcaggacacgtaaccggaaaactggagaaagacacggtagtcacgctgagtgacaccattgtgacccgcagcagtgacaagcgctag

SEQ ID NO: 399208 - DNA, 2475 bp, Salmonella enterica
gtgaccattaccagtgagacaaaaaatgcagcggggaacacacttgccgcaggcactaaagtctggacggtatctgaccagggttctctgaaagttgcggcgtcagcgcctgttccgtcctggtggacaaaatgttcaccggcttacactaatcagtcagaaagcgtagtgaactgcacttcgcgtacaaactgggcgtactatcttagcagtgacgatgttctgcaatataaaaatgcaggcagcctggtagccgatttcccgctttcatacgagcccgataataccgcacaacaggtcatccgccccggcaagaacgccggtgatgcagaaagaacattcagtctggtcactctgggccgtgataaggataagttgaaaaagggcgaccgggtatgggtagtctcagacggcgacagtctgacgccggttgcaccggcggcatccagtagtgaacctgtttttaatggggtgtatgtacctccaacgcctgtacctgtcagtgccggagacagccttggacatttgggtttttatcagatcccggaagaaaatggcaaacgctcgcgttatcaagtgcatattgaatgtctgagcatggatgatatggagaaattcatcaccaatccaggaagggtgggggaagatactccggtttatctgacgtggcaagccgatgcaccgttgtttgaaaagggtgagcaggggatggttgcgggcagtcgtaaaacaaagatatcgggtattgttacgcttgcaaaagtgccgggtgttgatgctgcgggaactgcactgtccgataacaaagatgcggcttattttcagatacgtcaggaaggtggctggttacctaccgccagtgttcagaaagtatcgcaatacgcgttaggcgaactgggctttgccacgctggataaagcccctgcgagctttgacctgattgatggtataaatcagccgaataatgtggtgaaagggattctggagcagttatataaagcggcgcaggaggaaacccgcaccacccacgcactcaataagtacaactacaagcgcctactggagttgattgaccgtaatcaggacggatattactcggagcaggagtatcttcaggcgattcacaatgtttcctaccgcgaccatctgtaccgggtgatagcaaagcacgccagcgaatggtattacggcaaggatgctccactctggaaaacttacttggatacgttaaccacggatgcaccgttgtggaaaatgtatctggaaacgtttctggataagatgacgtggatgaaggctgtgtccgaaaagggagtgccactggggccggcgccatggcatatgcatccgattgtatttatggactcgttatcacagaaaaaaacacatcaaataatctttcctctcaaagtaaaacccaaaaatgataagcgcggaatatggaaagattattattgggcggcagcattgtcagatagcaatgcttctcaatctatattcggcagaaatcgagacagtggaagaagaaagcatgcggcccgagatttatatacagaaccaagggcggaaattgttgctatttgcgctggtgtggttaagtctatatccacatattattatggaacatggcaaatcacaattgagcataaaacgaatgatggtcgggagttttttattagatatggcgaagttgaacataatagtatcattgtaaatgttggggatcgtgttttactagggagtgtcattgcaagaacaggattgctaatcaatccacgaacacaacggcatccaaatattatacctggccaaattgtgtatatgttgcatcttgaatattacactaacatgagtgaaggagtgccaccaaataatactggtggtactgtaacgccatatgatagaaggagtgacttacaagatcctttggatatattgcgtgaaggttataaaaatacgtttgaacaagatgatgctaatgagcgaatcgatattaatcaattgaatatatctgaacaagggaaacaatttattaaggagtgggaagggcttaggacagaggcatacaatgatagtgaagggtattgtaccatcggttatggccacttgattgccagagatagatgcgagagtatcactttaccggatgagtttagtcatgggataacacaagaaagagcaaacgagttgtttgaggaacggttaccttcttatgtggatggggttaaatcatctgtgagtgtgaaattatatcagtatgaatttgatgcattagtttgcttgctgtttaatattggatcctctgggctgagattaaaagcaccaatgttaaggaataagttaaatcaggaagattatgaaggtgctgcgcaggagtttttagatatcacgaatggtggtgaatccggtctggttgcaagaagaatatccgagaataatttatttctgaataatatatatgatgcatctcactga

SEQ ID NO: 399209 - DNA, 843 bp, Salmonella enterica
atgcatgtgaggatgaaaactttacttgtgtttttttcttttatttgttgtatatgttcatttaatgtatatgcaaatgatttgtgggtgttttataaagtatccagtactgatttattttcccggcatgattcgaaaacaatacagaatcttaatgagctatatggtaaagcaaaaattaatgcagatgataatacactaacaattaataacgatttgctggagagttcaacggtctgctcagttaggtacaggaagaagaaagaaacacctctttcttatttttactcaaagaaaacattggcaatgtatgaaaatgttttcaaggaagataacatttccttagcgaaaaatatttacatattacgatcctatgatcctgataaaacctgtccacctccttatgatgagatgatagagagtgatgactatttgctgttggttgttcaggattatttggtattttttaaaaacataacggacaaccttgggcaattgaaggacctgtctgataaatctgttttttctacattttgtgaaagtactttggaaggttctacttttgatggaaaggaaaaatatatctgtagtttcacaaattataatttatctaatgcatatttgaaatttaaaaaaataagcgggtgcgatggtgttctgaaggagatgttacctggcagaaacgaatcttattacatgggggatgcgaaagttgtttatcaatggattggtagtaatgaagttaaaataacagttatacaaaatatggatgaaggggtttattcgtttaaaaaaactgaatcaggaacacaagtggctgttattattaaatctggatattaa

SEQ ID NO: 399210 - DNA, 444 bp, Salmonella enterica; identical to SEQ ID NO: 395270

SEQ ID NO: 399211 - DNA, 1644 bp, Salmonella enterica
  misc_feature (1629)..(1638): n is a, c, g, or t
atgcttaactttgaacaagtgctaaacgacatcgaaaatcttctttatggcaaacagttacagccaataaaccctgctacgcccccattatgcattataaacattgatcgtgaaaacggtaaatacaaagtctcctctaattctgaaactaagacacgttcattatctgagcttgaagctatttttgccaatttaaatattagaggtttttgtaatgtagagcaggtactttacggtagttcttcgagcaggaaccaaccagaaacaatttttgctaacttaccttacattcaacattttaagtatgaaaagaaaaaacatcttttattacgtagtcataatgtccatgacgcagcaaccttatcagaaattcaaggttctgagtttagaacaataagaaaaaaaattgataattttcttaaactgaatcttggaaagatctacgagcaacaaatttatttagttaaaagccttgacgaagcttacgaaacagttttgaaaaaatatccttcagaattggcgtcaagaaaggttgagagcactctaaatagatttaaagagttatcagcagagatggcaaactcagttgttacacttgataataatattcaattgccaacgtataatgctaccaacaattccactctggaagagattctagagtcgtccgaaacatatggagttgatgatggcgataataagacaagctcttctgaaataaaaacgctacaagctaaattaggcgtagcaagaataagttcaaaaacacctgttttatctttaatatttgatagagttcagtttggcgatattgaactacaacctgatttccaaaggaaagatcgaatttggaatgatgagaaaaaatccaaattgattgaatcaatccttttgaaactaccattaccagtcttctattttggggagcgagtttcagatgaaaaatgggttgttgttgatggtttgcaacgtattactacaatatacgattttatcagtggtgaatttaagctttcaaagcttgaaatcttgaatgatttaaacggtaaaaattttagagaactatcacgaactgaacagcgatcaataagagaatatgagatcacggcatactttattgaaatgaataaagatagcacagatctcatagttgaattattccatcgtataaatacatatggagtaaaattaagcgatcaagaaatacgttctgcccttaatcaaggatcaagcgtaaaattcttacgttacttggcttctaaatatgagttcaaacaagcaacccatggaaaagtgaagcctgatagacagaaagatatggagctttgcctctcggctcttgcatttataactattggttttgaaaattataacttcaattcttacgataagtttttatcaagagcaatggaaatgctgaacacctacaagttagatcttctgaatgaaaaagagatagattcaggtaatgcatccatatccaaggataattttgaatattcaaatatcgagaaacgatatttgagagctttaaaccttgcatctgatgtttttggcgatttagcctttattaaagatcctggctcaaactcttctcccataagtaaacaactttatgaagtaataatnnnnnnnnnnatctga

SEQ ID NO: 399212 - DNA, 1152 bp, Salmonella enterica
atgaatcaaatcaagtccataaatatggaaaactttaaatcttataaaaatcaaactttcaacatttctggactcaatgttttttgtggcaataattctgtgggtaaaagcacagttatgcaagctatagctatgatattacagtctgattttggtagtaaaagtgacttaaaattaaacggtgacttaatcaatattggtcgaattgacgatgtcttcaatgattttacctctgctgaagacaagttaagcataacaatttctaccagcaactgtgaggtgcgttggggtatcacaaaagaagattctacaattatacgtaatgaactcccttgtatttcaggtttaaaggatattaaaacactaaaagatttcgttaatataagcaacttccaatatattgaggctgaacgtatcggtccacgagataatattcccctatcacaacataatttccatagtgattggttaggaaaaaaaggggaatatgttattgaagttttagatactataatgaataaacaagatagactgatactggacaatgaaaaacccaataaagatgatccacgaattcatcataaattaaatagtgtacgagttgcgagcaacattcaggcatggatggacgaaatatctccaaattataaaatccagcctaaattagaagttaatgcaaacattgcttataacacaatacaggctgagtctggaaaacaaactaaacccaaaaacattggttttggttatagctatgctttgagtattgtttcagcattactattagcaaaaccgggcgaattagtcgtattagaaaacccagaagcacatttgcaccccagaggacaaagctatatgggtagattgatagcttacactgcccaagcgggagtacaggtattgatagaaactcatagcgatcatcttctcaacggaattcgtgtcgtcgcaagaacatctcctgacttttcacctgaactaatttcgttattttatatttcccatgagaataatgaatctactgcagaaaagatagctattggcaaagatggaaaactttcaagttggccgaaaggattctttgaccagcaatcaattgatatgtatacaattatgacaggctcttttgatacccctgactcaatgaaataa

SEQ ID NO: 399213 - DNA, 897 bp, Salmonella enterica
atgaaagctggtgtctgcttgttcttagaaagtttctcattagataggggagaaaaaatcattctcgaacagctatctcatttaagaagcttgatggcgagaatgaattctgaattcataaaattctataaatcaaatgaatatgattgtaaattagcaacaatgttttattcaacatcacccgacatggcttggatgatggggcaattttatgatatgggtaagatagataccttaccaatggattgcgataatttactgaaaatcatcaatagtgtacctcctgtatacaattcaagaatgctgtatatgtataatagtattgataatactatcgttacagaaaatagacaatcaactgtattaaatgaaaaagaattagtcatcatttgtcgtaatatactcgattcatttccgagcgaatatattgagtatggcaatagtgtaaaagatatattcaaaaacttgatatttcttgagaatgaagaacatcctacttttaagacattcaatagtatgaataaaatcaaaggtggatttgaaaactttataagaggcattacagagtttctatttgtgataaataattacgaagttataccacaagacacatttaagaacataaaacaaatgtctgcattattaagatatgagttatgtgaagaaggggggaaaaaatctgaaagaaaacaaggtgagctgaatagagatttcaaaataggaaatatagtttacaaagatataaactgcgagttccattataaactttcatataaagatgggcaattcaataaaggtacatattataatgacaatcgaatatatttcggatttttcaataggatagacccgtcaaaaccaatgattgcagtcgctcatattggtgagcacctatag

SEQ ID NO: 399214 - DNA, 312 bp, Salmonella enterica
atgactactccaaattcttcaagatacgttatcgaagtggtttttgtaaaaaaaacatttatctctgaatctaacgattcgaaacatgaaatacattatttaatatttgacacagctaataattgtgtaaccaaatttttcgcagatgaatttgagcttgcattaagagaatgttaccaattaaatactggtaatatgaaagaatatgaccttacgattacgactgcggaaaatgattttaatttaaaatcagacatatcagctaccaacgatgagcaagaaaaattaaaattcaaaaagattgaagattga

SEQ ID NO: 399215 - DNA, 567 bp, Salmonella enterica
atgactgataagcccgatcttcttacttttattaagcgactcgaagatttagaagtcggctttaaggccaacattgcatctaccggtaagatgaacggcttctcattcgaataccgcaatatagctttcaaagcttcacaattgggtaaaaactattcttgggcaaatctcagtcatcggcttaactacaacccagaccacttagaagctcttcgagcgacaaaggaagctgtccctgtccctgtccctgtccctgtccctgtccctgtccctgtcgaacagattgccagagcgaatgtgcgaagcgaaagcataggcgacaaaattgctcaaatcgaactgcgactcagcaaagacagacgaaacgagatcgttgaaaaaattcttcaaaagaatgcagtacaacagcaaaagcatcttctttttcttacgtggcttgcttctctaaagcagttcatagagcttctccgaagctatggtaagtccattcttcacaaaacccacacacacttctcaaaaattcatgtaatgcaacctttaaacaaggcgagaaaaattcgtttatag

SEQ ID NO: 399216 - DNA, 279 bp, Salmonella enterica
atgaataaagagaccattaaatgcccattctgctttcaggagagtccgtttggtgtccgtgtctgcaccggttgtcattcaactattaaatatggagccgtttcagcctggttagctttactaataggagttgtgctgttagcgattgctttcctaatattcgctatcagtcaaaatttcatattaactgtcgttatctattttgcctcagcaatttttttaagattttatttgcgtaagaaatttgcacacagagccattttcacacataaaagctaa

SEQ ID NO: 399217 - DNA, 387 bp, Salmonella enterica; identical to SEQ ID NO: 82136

SEQ ID NO: 399218 - DNA, 426 bp, Salmonella enterica
atggacaaacaaaacaactttccagtggaaacactggaagagcagcttattattatagttgataaatatatctcaaaacggtaccagccaggcgataaaaatttctcctatcatttatacttggtgttcgttggctatcacttaaagtatttctatccaaaacaactatacacccgttctaaccgaaacatagacaacatcatgacgatgttcagttctgtttataaatgccttacaagtaatctgttgcgacagttaaataataaagaagctgttcttagagagctaaactcccttgttaattacattgataataaccagaaccaggcagaagatatttataacacttttaaagcacaatatgaaatgaaagtaattgagggagagttaacccatgaagttcgcgtgagaaccgtcaggttatag

SEQ ID NO: 399219 - DNA, 1140 bp, Salmonella enterica
atgtccacaattaaccccgcaattttttcttttttctctggttcaggatttcttgatcttggatttgaaaaaaatggttatgaagtggttttcgtgaatgaataccatgctccgtttatggatgcatataaacattcgaggaaaaaattaaatatagcaccacctcgttttgggtatgcagagtgcagtattgaagatgtagaacatgaaaaaattaagtcttctatgcttcaacttaaaaatgaggggcgattgactggatttattggtggtccaccatgcccggatttctctgtagcgggtaaaaataaaggtcgagatggtgaaaacggtcggctttcacaaagctatattgatatcattcttgaaatgaaaccagatttctttctttttgagaatgttaaaggtctataccgtaccagtaaacatagggagttttttgaccatttaaaaactcaattagaatcggttggttattgtttgcatgaaaaactaataaattctattgagtatggtgctcctcaagataggcaacgaatcatattgattggtttccttgatgaaaaatatgcaagtcagttcaattgggggcaaagagtctaccctgaaagaactgcatttgaatataaatggccgacgacaaaccaattttcagaaaacacttctgttataaaaccaaagggtatcccagaagagttaacagtagagcattggttcaagaaaaaccaggttgataatcatccaaatgcaaagcatgtattcgcggcaagagcagggcttgcgaggtttttgactgtcgaagaaggggacgatagtaaaaaatcctataaaaggttgcatagatggagattttcaccaactgctgcttatggtaataatgaggtacatttacatccttataaaccaagaagaattactgttgccgaagcattagcaattcagtctttaccaaaagaatttgaattacctgcttatatgactctgtctaatatgtttaaaacagtcggtaacggtgtaccctacttagcagcggccggtattgccaaatctattatagagcatttaggaatcgaatatgagagtaactgcggcgaacttagcacaggcgattgccaatctaccaagaaacacgcagtttaa

SEQ ID NO: 399220 - DNA, 873 bp, Salmonella enterica
atgttgtggagattggctaatgctttacaggaagatgtccctgtcaatttggatcgtatttttggtgcaagctataatacacgtgctgttctcgaaagccttttggcccatactcctgagttttattggtgtaagcttgatcgccttgaggtaatgaacactcagaaaaacattaaaaaaggtcacaagcaccttatttatagaccaaatgacccacatgaaaatggtgtagcaatagaacatattactaatgttataatttctgaaatgaatttagatgttgtccatcaatcagttgatatagagacaatcttacctactgaaggaatgacgattgaggaaaaaagacgacatgcacaaattcaaatctcattagtaaaaataggtcattacttaggttatcgaacatgggttgcagcaaatgatcgaggcctccaatataatggaaaatctatagcccaaatggatggggtcatagataatttaagaaatgaacaagtgcttcaatcatatgataaagctatcaaggaagctcggcttatagattgcatttggtttcgaaatggaaaattaatgcctgcagttatggagattgaacatagcactggtattaaaagtggtttggtaagaatgaaacaattttatgattatgcaccacagttaaaaaatatacgttggaccgttgtggcacctgacgaatatagaaataaagttatagagttttctaatatgccacagtttaaagaattagatactcgattcttcccctattctgctgtagaggaactctattcattatgtgcaagaaggaatcctcaaggaattacagacgattttctcgatgcattcatggaaaagtgtgtgacacattag

SEQ ID NO: 399221 - DNA, 249 bp, Salmonella enterica
atgttgttgccaaaggacattcatcctaaagatagcttatattataacggtggatttattatagatacgctgaaacgtttcgatgaaattgaattgatcgatcttttttacgaaacaaagaaaaaaattgaaatgtctatatcaatttttgttttatctcttgactggttatacctagcaggaatagttgaattaaatccaaaggggaaattggaatatgttcataaaatctctccagatagccaataa

SEQ ID NO: 399222 - DNA, 861 bp, Salmonella enterica
atgcacttctttaatttattatttggatattccctaaagaatactaatcaagagaagcataattttgagggtatcgatcttatcgatgagaatgggaagatagtattacaggtttcatcaactgcaactaaaacaaaaattgattcagccttgaacaaagacttaagattatataaaggccatcagtttaaatttatatcaatttcaaaagatgctagtgatttaagaaataaaacttacactaatcctcatgctttggtttttatacctcagcaagatattcatgatgtaaaatcgttacttaatgttatttcacatcttgacataacaaaacagaaagaaatacacggttttcttaaaaatgagctacaagaggaatctgataatgttttaatcgaaacaaatattgctgctgttataaatatattagctaaggaggatttttctaatgttgaaactactgacttcccgcaaccattcgatgtaactgacaagattacatttaataatttgaatgcagctgaatatattattgaagattacaaaatccatcatggaaaagtatcccgcatttattcagagttcaaccagatgggtaaaaactcaagcctttcagttttgtcttcctttagaactatcttcgtaaaattgagtacacaatacactggagatgagctattttttaaaataattgacagctctgttgaaatggtcagaaaaagtgcgaattttacacaaataccattagaggaactggagctttgtgttagtatacttgcagtggacgcgttcatacgctgtaaaatttttagggaccctaacggagtgaatgatgttgttgccaaaggacattcatcctaa

SEQ ID NO: 399223 - DNA, 552 bp, Salmonella enterica
gtgaagggtatgcggaagattcgcaggggtaagaactttgctggtgtagtccagtatgcattgaagcccggagtacaccataaaagcgatccagttgtcattggtggaaacatgttaggtgattcagcctttgaactgatcgctgaatttgatggcactaaacaacttcgcccagatgttcagaaggctgtttggcacaactcgcttcgattacccgatggtgaatcactaacggctgaacagtggtccagcatcgcagatgactatatggagagaatgggattcagagatacccatctccgttgctatgtcttacatgacgacgaaggccagcacatacacattatcgccagcagaatcgacctcaatggggggaagctttaccttggtaggaatgagaacctcataagtacacgcataattagtgaactcgaaatcgctcacggtctgacagtgaccaagacagcaccttccattacaccaaagcaacagaagcagaaaagaatctctcgtaacgaacagaagctatctgaacggactggggttctctga

SEQ ID NO: 399224 - DNA, 261 bp, Salmonella enterica
atgtggtggattgaaattacagacttaaaaaataaaaaagctatatacctagaaatgtcagaagagaaatgcaaagcactttatcagtttatttcagctaacaccccagatgtaccatttagctatggctatatcaacaatcagggtgatttaatttcaatggcaggaggagggatggagcggcagtttaggagaaaatatttaacgaataatagtaagcctctgaaacatgttgaaaattttgcattcagaagagagtaa

SEQ ID NO: 399225 - DNA, 477 bp, Salmonella enterica
atgcgaaacgtccagcccttcaagcggagagtagacgccgacataatccccgtttttcatctggtccagcacctgctgactgatggcctttccgggaatgtaatttattttacgggaatgaatgcccagacctggaatgtactcccccccgtcaggtttacggttaagctgtttgtccgcagtggcatagtcagggctgatatccggcgtgacgtcccgggcattgcgtggtgtggtggtaaaccagtcagagaagacgtgccggcggctgaggtagtcaacgttccctccggtgtaacgaacctctgtaagattatgcaggaacgatttctgatcatggctgcgggtcagggcctcaacgtaatctgccagggtaaagcagtccacgccgttgaaattcacgacaagcgattcgggagcgtcgggcccgccgataagtgtatctgcctggtaaggcgtaccgagaaaagcagatga

SEQ ID NO: 399226 - DNA, 300 bp, Salmonella enterica
atgacaaaaccagcatcaactatcaaaaagatccgcaagcagcacacgcctgaattccgtcaggaagccctgaaactggctgaacgcattggtgtggccgcagccgcccgcgaacttagcctgtatgaatcgcagctctacaactggcgaagtaaacagcaaaatcagctctcttcttctgaacgcgaacacgagatgtccgctgagatcgcccgtctgaagcgtcaactggcggagcgggatgaggaactggccattctccaaaaggccgcgacatacttcgcgaagcgcctgaaatga

SEQ ID NO: 399227 - DNA, 402 bp, Salmonella enterica
atgctcacggtaactgaccgggctgaaccggcgcgaggcttttgcccgcagtccctgccgacgcaggctggccgccacggtttttatgttatacccccgtccctgagcacgaagctcatccgtcaggcgtggcgcaccatagcgctgttttgcgtcactgaatgcctcccggacgacgttatcacagacaaggcggaagtgctgacgccggtttatctgatgacgacgctgatgccagacgtaccagccgctacgggcaacctgaagtacacggcacatggctttgatactgaactcagcctgatgtttttcgatgaagacatacttcatttcaggcgcttcgcgaagtatgtcgcggccttttggagaatggccagttcctcatcccgctccgccagttga

SEQ ID NO: 399228 - DNA, 402 bp, Salmonella enterica
atgctcacggtaactgaccgggctgaaccggcgcgaggcttttgcccgcagtccctgccgacgcaggctggccgccacggtttttatgttatacccccgtccctgagcacgaagctcatccgtcaggcgtggcgcaccatagcgctgttttgcgtcactgaatgcctcccggacgacgttatcacagacaaggcggaagtgctgacgccggtttatctgatgacgacgctgatgccagacgtaccagccgctacgggcaacctgaagtacacggcacatggctttgatactgaactcagcctgatgtttttcgatgaagacatacttcatttcaggcgcttcgcgaagtatgtcgcggccttctggagaatggccagttcctcatcccgctccgccagttga

SEQ ID NO: 399229 - DNA, 507 bp, Salmonella enterica
  misc_feature (226)..(235): n is a, c, g, or t
atgaaaaacacttgtcttgaaccctatgaatttttgatcgatttcctggccgattattttggcgaaaacacggaagttgttctgcacaatctttctgatcttgagtcttctatacataaaatcagaaatggacatatcagcggtcgctctgtcggagatcccatcaccgatctggtagtccgtgccatgaagaacagtgccggcaattccacgaccggactccagnnnnnnnnnnctggagccatgcagaccaacaatagccacggcactcagcttgatgaacatattggactgaccattcctgaaatggttgatctcaaaattaataatgtaatcaatattgaaaatattaatccagagtcactgaatgctgaaaataaaagccatattatttcattactaaatgatgaaggcgtatttctgcttaaaggggcagtaacgaaagtagccaaaaaacttaacatatctgaacccactgtttataaatacatacaaaaattaaaataa

SEQ ID NO: 399230 - DNA, 462 bp, Salmonella enterica; identical to SEQ ID NO: 376681

SEQ ID NO: 399231 - DNA, 792 bp, Salmonella enterica; identical to SEQ ID NO: 377181

SEQ ID NO: 399232 - DNA, 531 bp, Salmonella enterica
atgagcaaagcgccggttaaacgcattgaggatttacgcgggaagaagatccgcgtcatgcagagtgagacggcgatccaaactctcaaactgctgggcgcttcgcccatcgccatgagccaggcggaggtctatacctcgttacaacaaggcattctcgacggcgcggaaaacaatgagttcgctctcaccatcgcccgccacggcgaagtcgcccgttattacacctacgatatgcacacccgcattcccgatatcctgctaatgagtaccctcacgctggaaaagctgacgccggaacagcagcgcatcgtcgaagccgccatcaaggcgtcgatcgaatttgagaaagccgcatgggacaaggaaatagagaaaaccaggctggcggcggtaaaagatttcaacgttgaattctacgagatcgacaaaaaacccttccagaaggcagtacagcctatttacgacggtctgaaaaacaaaccgcggctttacgggctgtatcaacgtatccagacagcaaaaaattaa

SEQ ID NO: 399233 - DNA, 396 bp, Salmonella enterica
atgacgattaaagggcagaaactggtgctgccgtcatggaaattcgcgctggcgcagatggcgatctccagcgcgaactggatggcgatgggcgccatcatctggctgctgatgggtcaggatgtgaactatttctttgtactgggcgtactgctggtgagcagtatcgcgggcgtcatcgtgcatattccggcaggcatcggcgtgctggaggccgtattcctcgcgttgctggcgggcgaacatacgtcgcaaggcacgattatcgccgccctgctcgcgtaccgtgtgctttactattttattcccctgttgctggcgctggtgtgctatctgatcctggagagccgggcgaagaagttgcgggcgaaaaacgagcgggcgatggcgaaatga

SEQ ID NO: 399234 - DNA, 339 bp, Salmonella enterica
atggtaaagccgtcgtttaaatccctgacaggtcgcagccggacagtgtgtgtcgggtgtggttattccggtgtgcggtttggtgatgttcctggtcaggacacccggcagtgggtgaaggtgaatcatgagagcgggctggggctgtgctccagttgtgacgcctttcttttgcaggagcgtcagcgtcgtcagcgacatgacaacttttgtaacgcgcacctttgttcgcagcgaagtaatcaatgccggacggcagttgttgatgatttgtattcatcttttttcctttttaagtcaattggttatgaatataaagatgctgtccgtaccttctga

SEQ ID NO: 399235 - DNA, 396 bp, Salmonella enterica
atgaatacagaaaaacaactgccgtccggcattgaatctgaagtgaaatacaccctgcagttctggctgctgagtaacggaaaggtcatgacggaaaaagacgggctctgtaacccctttcccccgaactgcattgaatcggctcatccttttactccgtttcagcagaatcagtggattgaactggacactgtcgggccggatggaccggtgaaagagacatttcttgtgcacagcgttctgcataaactgaaacgtcagggtggctccctgaatgatgccgaccggcctgaatacggccggtgcattgctcactggcacactgacgtgtttgttgagaaaaaagcgctgcctgactggctgagagcattccacactgacgtttcgcacttgtaa

SEQ ID NO: 399236 - DNA, 1710 bp, Salmonella enterica
atggcacacaagccactgaatctcggggctgccattatgcagcccggtcgtcaggccagtgccgccggtaatgtggtggcgctgggggaaacccccatgattctgacgctggaccagttgcgtccgaatccggataacccgcgcaccacgcgcaatccgcgttatgacgacatcaaaaactccattcacgcccgcgggctggatacggtgcccaaagtcacccgtatgccggacagtgagccggatgtgtatatcttcagtgacgggggaaacacccgttaccagatactgacggaactctggaaagaaacgggggacccgcgtttttaccgtattcatgtgctgttcaaaccctggccgggacgccttcagtgtgtgattggtcatctggcggaaaatgaagttcgcggtgaactgacctttattgagaaagcgcagggcattcacaaagcgcgcctgatttatgaagagcagttaaacaaaagcgtgtccatgcgggagctgtcgtcattactgacagaacagggactgccggttgatgcctccagtatcagcaggatggagaacgccctgaaatatctgtacccctggatccccgacctgatggagtcaggactggggcgacatcaggttacggcactgctggcacttcgtcaggacgcagagcgtgtctgggggcagtttgcgctggcgtccggcacggacgcggaatttgaccgtgtgttcggagaaagctgccggaagtttaattcgccggagctgtggtcactggagatgttccgcgacgagctgatcggggatttgttgcaggcgctgccacatccctccctggactatgaccggtggctgctggagctggatccgaaagagcggaaccgccgtcaccattttggtgagccggaaccggtggtgataccgccgtcagtccgcgacagcggcacagggcagtccggtgcaccggtatcccgtatcctgcctgaggtagcggaatgtctgccggatacggacgctccggtgccggaaagcactgcccccggtactgagcccgaacagcatggtgttgcccgaccggagaacgctgtttctgccacaggcctcactgaaaaaggcgggcttccttcccctgaggagcgtgcagacaaggcgtcttcttctgctgagaaagttctgcgtccggagatacagccggatatgtacggtggcgagccggttttcagtggtgatgcggtggaaacgggtattgccgggtcctctgtgccatccgttatgaccggcgatacagcgccgtccggaatacctgatgtccttcccgcatcggtgacgcattttgctgaaggacgggatgatatcgagcatctgcagaatgaggctttccggctggcatgggaactggctgagtctgccggctgtgctgaagaaattgccatggacagggaaagtgacctgtcggctggtttcgggactgcagaggagaaatgttcgccggtgacggcatttctggtagggctggccggtgatgctccgcggacggtgtctcccgtcagtctgacagacctgctgacaggtggcagtgcgccggaggcatggccactgctggatgatgaacatgccgtgaagctgctgcgtcttctgagtgtgctgcgccgtctgcgcgccctgcagcgcagtgtgttacccgaagatgatgaggaggatgaaagtgatgagtga

SEQ ID NO: 399237 - DNA, 258 bp, Salmonella enterica
gtgagtaattcagtacggctacagcttggtttttcaccgctatcaaaaaccatcgtgttggcaaaaatgcgtgactcaggagacggaacaaaacgtcgtgtcggcaatgatcgcggtcgtgatgttaccaacgaggctgctcaactcgtctggcatcttgtcatggcagaaggcggtgaaattgcgtgggaactggatgatggttctcgcatggtgttaaggggtgaaaaacaggatgcaatcaatgaacaggattga

SEQ ID NO: 399238 - DNA, 699 bp, Salmonella enterica
atgagtgaagataaactgaaccagaaagaagtccgggccggcgcattgcagtcctcgctgtccattctgttacacacccattatgccatccgtctgtgggaagggcgcttacccggacgagagtccgggaatgtgccccggattatgagtatgccgcaggcgataaaacgagcaggggggatttaccgggattccctggcggataatccctatgctgatgaagctatgtggaaggtggaaaatgcaattaatgctgccagtgaaaaagtacacgctctggttggctggctggagcaggttctgtgtgccgtgccggcgaatattaccatgactgatgttgtatcccgttctccattaaatatcggggtttacagcagttctccgctgggttatcgctgtgtctggctgcttgtgggatatgatcagatggctctgaaagcgtttcaggcatctcactttggcctgatttcccggcagaaacgggacgagttactgtcacatggcgggtatcttatccggaaaatttacggcattttaagggggtattatgccatccctgtcacgcgacaggatctggaagaaaaaacaccggcaggagaacaggcgatggcacgtctggggcttcctgatgctgagattatgaatggtcagttgcgatcatcattttctcccccgctgaagaaaaagaagaataaatag

SEQ ID NO: 399239 - DNA, 225 bp, Salmonella enterica
atgaactctggttatgatttaccgggagggctggggccggtaagggaacggataattgatgacccatggttgtttctgtctgtcgcactgattctgttggtcgtggtatatgtcgtgtcgttggggcttaaagaagttattttcagtatcagaaaggggaaagggaagaaaaaaacactcagggaggcgtcgtgttcgcggagcacgactgatgaaaaagtctga

SEQ ID NO: 399240 - DNA, 1458 bp, Salmonella enterica
atgaagcataaacctaaaccacaactgataaatgtcgtggcactggcagtcatgctggcctgcagcacaatggccggcgcggcggataatgaacgcagtacgttcggtctctccctgccacaggtgaatgacagtgccatcgggtacgggaaatccattgatggtgccatttcggacaaactgttttacaccctgggaggcgggtcagtgatatctcagccggcgacccggagcaacatgaagaagctcggtgtggatattggctggagcagcaacctgatgtgcggcaactttgacctgaaaaccacggtgagcaatcagctgaacggggtgacggatggttttaaaaacctgatgggggatgtgatacagggggcgacgggggcggtggccagtctgccggcgatggtcatccagcgggcgaatccggggctgtatgacacgctgactaacggggtgcttcaggcgaatgtggcgttcgacaaggcacagctgaactgccagaacatggcgaaacgcatgatggagttctcggacagcagcaagtggacacaggctgcggttatggaggagtacaagtcactggtcaacagtggtgaagcggatgccattcgtattgatcatcaggcgcagaattttaaaggaaattcaggacgtagctggattggtggtcagaaacggggaggtgcagggcaaccagctatccgtcccacacatgatctggctgcagcgggttttaacatgatgaataacctgccggttaccagtacatcaacggtcgggagtaccagttgtaccggaagtgtgtgcagtaagttcagtaatgctgaagaggcggcaaaggcggtggtgaaagtgctgggtgatcgcactatgcgaacctgtagtaaagcaaatgaatgtaccagtggtggtgaagagcagcagtctggtgcgatcgccggaaccggattcacgccgatgctggaagaagcggtgaaagtgaatacggagcaactggtaaagctggttaatggtactgaaaaaccgacagccgcaaatctggccaaacttcggtcaggcagtctgacagtaacggccggagtgattaaggcgctgcaacgggatccggataatgctgcactgaccggacgtctggccggcgaactggcaatggcggatacggtggagacggcgctattgatgcgcagaatgatcgtgacgggaatgtctgaaccgaatgcgatgttacaggatgatgcgttggcagagggggagcgtcgtattgaggcgctggaccgggagattgccgcgctgaaaaacgagatggagctgaagcgtgaactggcccgcaacagcgtgctgaccattattgagcgtgagaatcagcgagttggcgttaacccgcagacggaaagtgcagacagctctgatacccgaattaatcaactggagcagggaacaggtgaagatgaataa

SEQ ID NO: 399241 - DNA, 336 bp, Salmonella enterica
atgaataaacgtaacgcccgtcagcgtctgaaagcggtgctgctcacaggcggtatcctgctggcatttatggtggtggcgctgttcattgcggatatggccattcgtcatccggaaggaactgccgcattcagtacgtggatgcgggctcaccgttctggctggctgctctggcgtctgtgcatttatatcctgctgggttggggtatctggcgtatcgcgcatgcgccgggattccgggcggaataccgccagccactgatacgtatctgttgcgccagtgtggcgtttattctggtctgtgaatacacgttgctgaaggcgcagggaggctga

SEQ ID NO: 399242 - DNA, 1575 bp, Salmonella enterica
atgacaacaaacagctatcttgaatattttctgaccctgctgggctggctgattaataatggcctgtgggatgtgctgctgggaaccgggctgtttgcactgccgctggtatttaaggttattgggatctggctgcgggtcagggaagaaggggaggatgaggggaataagggactgctctcgctgccccgtattgaacatgcgctgtacatgggattctttgtgattatcagttgctgtgtgccgctggtcaatgtcagtctggggactattgagtatgacggcaaccgtgcgaagcagtgcgggacatggacaccgaaggcaccggataagaccgggtatgccggtgtgatttccagcatggacggtaaaacggcgcagatcccgctgtggtggctgatggtgcacaaactttcaaaaggggtgactcaggccgccgtggcatccattccctgttcgcctgatatgcgacagatgcgttttgaggttcagcatacccggatcaacaataaggcgctgattgaagaactgcaggatttcaccaatgattgctactcactggcgctgtacagctggaagcaccaggatcagggaatgacaacggataaaaatacgctgcgggatattgagtggattggcagcaggacatttcagtcgcgttattacaatgaactgcagtcgaagatgccgagaagtgcgtttccgtggaatgcatcccgtgacagtggacgcccaaacaccggtcggggtggttacccgacctgtaatgagtggtggaatgaggcggatgtcgggctgaaaagtcgggtgatgaagcaggctgaccccggtatgtggctgcgtctgtcagcaacaatgaaaatgatcgggaatacaggcaaggagtatgaagaagcggtgatacgccgtctggtcagtccggtgaatatgacagtgtcacatggtggcagagcctatgctggttatggtgggaatgcggatttgtcgctggataacacggtgacccgcgtgttctcaacggggggcgtggcgctggggagtctggcggcgtttccggccctggatgcgatgcgacaggcattacccatggtacaggggatcctgttgatggctatttacgtgatgttaccgctgattctggcgtttgcggcgtacgagataaagacggtgattacactgacgtttgtgatttttgcgactaatttcctgacattctggtgggaactggcacgctggctggattcatggatgtttacagcgctgtacagttcgggaacgcacagccgtttcaatatggcagggtttcagaatacctcggatgacctgattatgaatctggtgatgggcagtatgttcctgattctgccagcgctctggatgggggcattatcttgggccggggtgcagattgggggagggatagctcaaagtatgggagatggcaccagacaagctcaaaataccggaggcagtgcagtggatatattgcaaaaggctggaatgcgagggatgtcgggtggaggggcatcaaaccaacaggtaatggaacgtcaacagcctaaaagtaacaaatga

SEQ ID NO: 399243 - DNA, 414 bp, Salmonella enterica
atgaaaacgactaacaaagccgcttatctcagaggacaacggtttgccattcagtggaaacaacttgtaagaacccttcgtcggtgggacaacttctgggttcatgcggccagaaaaaaacacctgccagcctggactgggcggcttccgttggctattggattaaccggaattatggtttgtgcactcttcagtatcacggcagttctcgggtgtctggcgtttatctgggctgttgcatacatttttcaatgcataggtagtggagttaatacgccacatgattgctttgacgaagaatatagccttaataaatgcgatattaattttaaatataagggccctaatctcgatcatggccctatggggtggggagtttatgatggtaatggcgttagaattgataaagactga

SEQ ID NO: 399244 - DNA, 564 bp, Salmonella enterica
atgttgagtaaaaaattgttattggtttgtgtttcatgcctggcgttaactgcctgttctgttgatgaaattgcttcggttaacaagcaaattagtgatggtgcttttgctttaacgggggcattgcgtggaaactcatcgtctacggattcaaatggaatgccatttttagctcaggcgcaaaaaccagcgacaaaatccagtacacaggaatattctgtgcctgttgatattgatactgcagctgcgcgtctgaagcgatattatcagtttgtatcaaatgatgaagttgatgctattcgtaaaaaagacagaaatggtagttgggtcgctggcgcaattacagatgcgaatcaggaatgggaggctatgccgggaagttattataaaatggggaatgactggaatgaatacgatcatctgactattgagctggaaaaaaatggagcagggagtaaattatacattacattcaaatccccatcggacaaacgactgaatagtgaagagcttaagaaattaatgttaaatattaaaggtgttgctgaaggtacaatcaggtaa

SEQ ID NO: 399245 - DNA, 396 bp, Salmonella enterica
atggagaagaatgacaaagtacatctaatagaagaaaaggcgtaccgttttgggaaaacattaaaaaaacttccgctatggggatggggaataatagcgctcattactatgattattctattcaatatacattattcatatattttatctctgcctttcttatggtttttgtggtatgtatttatacgaattgatgacaagccatggattgaaaattatcctacactggaggaatactggcgcattcacccagatacgaaaacaaaaaatggaataaagtgttattactgtggctctaaccagataaaaagttatctgtggaacaataagcaaggaagacgagttcattattgttttcagtgccgtcaggatttatatcgaacaaaagacttttag

SEQ ID NO: 399246 - DNA, 903 bp, Salmonella enterica
gtgtccagacgtgaaaaattactgaaacaggatttggttgctcatatccggaaagaccgggggagtttcaagaagctgagtgactattcccggatcatgcaccggtttgcggaaagactggctaaactgaatatacaaatcagttctgctgcgcaggtaaaagtgcggcatattgaattatatatgaacagcaggagtgatgtttcaaagcgaaccagagaaaatgaaatgtctgcaatacgggttatgttacgtcaggccggtaaacataaaatggcagatcctgaacatccccgtctcagcaataaggcgttaggtatttcaggaggaagccgtaaaggtacaaagaaattaattacggatgagcgtttccgggaaattcttcagcgcgtggaagcaaaagataaaggggtggcagctgttgttaaactgtcacgttatctcggtctgagaaatgaagaagctgtccagtcggccaaatcgttacggacgtggaaaaaagcgttacaacggggagatgaaaaaataagagtgatttttggtacgaaagggggacgggaaagaatgacgacggttgttgaccgggataaagttcttgatgctgttaattacgcactcaaatatgccagtgagcataatgaacgtctgatagacagagataatcttaagtcggcaatggattattatcttaatacgttacgacgttatggagaactgaaaggcggagatgagaccgcacacagttttcggtacagttacgccgcaagtgccatgaaatatcatattatgaatggttacagttataaggaggcacttgcactgacatcaattgatcttggtcatggcgatggcagaggacgatatattgaacaggtttattgtcagttattaggctatgagtaa

SEQ ID NO: 399247 - DNA, 519 bp, Salmonella enterica
atgtaccaccctctaaggcgtcccctttcaggctacggagacattacgatcacccgaaggcgcttttctcagatcgtcaaagcattggctggtagtcgcccgaaggctcccctctcagactaccggggatttggatggttatccgaagataactgtagtcacccgaaggcgtttctctcagactaccgaaacattggatggtcacccgaaggtgacaaagttagcctgtacatttttaagtcacaaaagatgaatgtcaagttattcaacatcgacccaaagaggaatattatgcgttcccttaaccggttctcctggaggaaaaacacaggtacctttcatcagtatttttcttcccgctcgtctgacatcacagtcaaaatctcccaccacgtcaaaataatccgcaatcgactcacagatgtcccattcatcatagatgccccatttacctgctgttccttcacattcaaactcagccagatatccggaatcaatatatcgcgccaggtagtgtga

SEQ ID NO: 399248 - DNA, 438 bp, Salmonella enterica
atgaactcattaccacgccaaaagattgtatttaagcagcctgatttatgccatcactgccaatctcactatgtaagtgacgttaaggttataactattgaaaagaatttgagttacggttggaagatccacggtaaaggaactctacatgtagaatgcagatgtccgatgtgtggcatgatgtatacatctactgaaacaatgataccaattgaatgtgatagctatctttgcccaagttgtaatgatgcaacaaaccttgaatacaaagtttgcaaaatagaaagaaacgagaatgattttacatttgaggccgacatttcttgcaagaaatgtcataaaacaaataaaatcagccacgcattgaagcgatttttaaatataaagaaaatagaaataaaaatgactggaattatcatcgaacgatttaatgaatag

SEQ ID NO: 399249 - DNA, 597 bp, Salmonella enterica
atgactaatactacaaatcgagtttcccgaattctttttaaagaaatagtggatggagatgtaagaaaaatacatgctgattcaaatgacagtgacactggtggtggtgctcgcgattttcgttttggttcatataatgagttacagcatatttttcattcaatgtttccgaaaccaattcaggaacggcgtaaaagaaatggagttacatccttatttactatttattctggatatttttattggaaagatccggtcacaggtgaaaccttaagcaaagtatctttttttgaaccaccaaccgatgctcgtccacaagaaggtaggataacaaaaattcatgaacatccttgtttatcaaccgatctcatgccgaaatccagtataaacaatagagtgttcctattattaacacaaatggatgatggaagcgtttggcccagctacgttgaagagcgtacattacgatcagttggtctttgggctgatgaaataactacaaaaatgcttaattgcatagattctccgcgtcgagctaatctgtcggttattggctattatgattttacaactcatagtagatactgtaactgctaa

SEQ ID NO: 399250 - DNA, 537 bp, Salmonella enterica
atggtttcacaatatcgatttggctgtaaaggttatgtgtcaggtacaggaaggagctctatttgggaaagttatcccactggtaactcatcaatcaatccccaattctggattgataaagataaactttcactacaaacacgtgaaaggataaaatcgaaaagagtcggattttgtgatatatcagggcaaactaatgaaagaactttcatggcctcactaatacctgaaaatgtagtctgtggcaataaagtaccaacaattctatttaataatgataaaaatgatgaatgcttatatgtatggttagctatagcaaatagcttcatatttgactgggccatacgcagagttatgacaactactgtaaactatttcttgttacaaagcatccctttccctcgaataattaaaggaggtttaccatggcatagtcttttagaaaaatcaaaagaaatatcttcactagataatattggttattcgtatgaaaactcgctcagaatatcctatttaagggcagaaaatccacaataa

SEQ ID NO: 399251 - DNA, 135 bp, Salmonella enterica
atggataatctgatctcttcctatctttatccggtacgtttcatcgcctttaatgatgatatcctggcgacctttgatggtcagagcatggcatcccaaagccgaaaagccagagtcacaatcctcatgttctga

SEQ ID NO: 399252 - DNA, 627 bp, Salmonella enterica
atggtcgatcgctattttgaactggctcaagcaccatttgatcctgtgaggatctggcaatggataggtaatctcaattttcatcaccaatgtcaggccgatcaaagcaaatcggtacaagtgcttcgggaaaatgacacacttcgtcaggggatcattgcctatgtatttgggcctttaacggatcgtaatgaaatattcaacacaagagtagaaaagttcgacgggcatctgcactcacattcaggccttcatttatggaggaatgactataaatttatcctcaatctggcttttgaagcagataacgttgacctgtgggcgagtttccttgtcaaccaccaacgttacagaaacaaggaagagcaaggccctgatgatttgcgggcacaaatgcgtcggcatgccctctccaagcccgcatttatgcgtgaatgggcccgatacaacaatgcaatgaaattatccgggcagaaaagccaactccggagattcagacatagccgaaaaatgaaacgccgtgacagaaagcaacgagagatccacgccagaaacataaaatttgttaatgagaacagagatattgtctgtctcttatacacatctccgagcccacgagactcctga

SEQ ID NO: 399253 - DNA, 393 bp, Salmonella enterica
atggagttgactgcagacctgctgaaaagccttaacaacatcagacaaaatgccaccatatatgttcacgcataccactatactgatgatgaaaaatgcgttatggtgccacggacatatttaccatcactgaaattaacgccattacagtcagaaataattattcgactacttctcaatggagccgattatataaggcacgacgggtatgttcagggatatggagaaaaaactgtggcaactttcacaatacagggggagggacgccatagtttcaaagcagacttatcacaaaatggggaaagtgatatagccagcaatacactaaatcactggctacatcgcatacataaaacagatatcactgttctgtctgttgttctgacacaataa

SEQ ID NO: 399254 - DNA, 3255 bp, Salmonella enterica
atggtaaagacaaatccatcttcttcacaggtaagacgtgtcgcagtttatgggctggccggattgcagttcttttttcaggttagcccggtatttgccggcgtctttcaggctgacgggcagtctgtggcacagactgcggtggaggccggacgtgtgctgcagggcagtaacagtggtgatgccgcccgccagttgctgaccagccaggcttccgggcaggcggcagatgcggtcacgcagtggctgaaccagttcggtacggcgaaaacgcagctgagcgtggacagtgatttctccctgaaaggctcgtcgctcgatgtgctgctgccgttttacaacaccccgaagaacgtgctgttcacccagctcgggatgcgggataacgacgggcgattcaccaccaatgccggacttggccaccgttacttcacggataacggctggatgctgggatacaacgtgttttatgacgtggactggcgcaacaccaaccgccgctacgggattggcgtggaagcctggcgtgattaccttaaagtatccgccaacggatataaacgtctgtctgactggcgacagtccccgaccgttaccgattacgacgagcgtccggcagacggctgggatatccgtgcggaaggctggctgcctgcctggccgcagctgggcggtaagctggtttacgagcagtattacgggaaagaagtggcgctgttcggtgagtctgaacgccagaagaatcctcacgccatcactgccggcgttacctggacgccgttcccgctgctgaccgccggcgtcgattaccgcaggggcaaaaacggggctgacgacactcgtctgaacctcggcctgacataccgtatcggtgaaccgctgacgcatcagctggacagcagccgggtgggcgcacaacgttcactggtcgctaaccgccttgaactggtgaaccgtaacaatgatgtggtgctggaataccgcaaacagacgctgattaccctgcagctaccaccggatgtgtacggcgtagaactaacgaccgtcaccctgacgccacaggtgaatgcaaaatacggactgtcccgtatcgaacttgacgatgcagaactgcgtcaggccggcgggaagattatcagcaacaccggcaaccagattacactgcagttacccgcctggtcatccgaccgtcagagtgtcacgctctccggcagggcgcgggatacccgtggcaacctctctgatattgcccgtacccgtattctggtctccccggctgtacagcagcaactggcagtcagtacggataaaaccacggccactgcagacggtgcggacagtgtgcactacaccctgaccgtcacgggcagtgacggaaaaccggtcagcggacaggctgtacgctgggaacacaacggcggcacgctgaatggtgagaacaccacgaacgctgacggtgtggccactgccaccctgaccagccagaccgccggtattatccgggttacggccaccacccgtaaccagacggcaaaagcggctgatgtgaccttcgttgctgccatgcagggagaactgctggctgaccgtactcaggcgctggccgatggtcaggaagcggtcagctacaccctgacgctgaaaaccactgacggtaagcccctttccgggaaaaacgtcacattcaccaccacaaccgggcaactgagccggacgcagggcaccactgaccagaatggccaactgaccgttcagctgaccagcacccgtgccggacaggcggtggtgaatgcctccatggacggcaccaccatcagtgccgccccggtgacgtttgaaaactacctggattccgccattgtggtgaacaaaacctccgccgttgccgacggccaggacagcatcattctgaccgctgtcatccgggatgccgccggcattccggtcgccgggcaggctgtcacctggcacacggacaacggacagttcacacagcaggatgcagtgacaaatgctgccggtgccgcttctgccaccctgaccagtacacaggctggtaatgcacaggtatcgctttccctgaacggtacgaccaccacagtaagtgctccccgcgtcagcttcacgcagcagttgtatctcaccctgcaggccggcaggaccaccgctgtggcagacggaaatgacgccatcacgtacaccctgaacgtgcgtgacgcggcaggtcagcccgtgaaggataaggccgtgcagtggagcaccgacctgggcacactttcagcccaacagggcacaaccagtgcacagggcgaagccacggtaacgctgaccagcacacaggccggacaggccgtggttaatgccaccgtggacggtaaacaaatcagcgcacagtctgtcaccttcacccgtaccgtccgtggtgtcatcacggttgaaaaagagcgtgtttatccgggaagcaagcagacggtcaccctgacgctgacggatgccgcaggcaaccctgtcagtggcgaacgcgtggactggcatgttgacagcggtaatctctggcagacacagggcacaacggatgcacagggccgtaccaccacaacgtgggaaagtaccacgcccggaacagccaccattaccgctgacgcgtatggtcagcagtacacggctcccgccattacagtcatgcctgccctgacggtcagcagcgtcactggcatcgatgccactggcgcagatggcaaaaactttggcaagcgtgttcccaacagcacctggccgggcgcgaaattccgcatcgatacggagaatgccgccggcacagtcacctggactgcatcctcaccggccgtaagcatcaatggcaatgtcatgaccgtgaagagcaatccggcagatgtcaccctgaccggcacggatacggacggacagaccgtgaccctgaacatgggcggcaactggtttgcgcagagtgcgacaaaatacgaatggctcaacagcgattacgacggaacagcaattcactcctgtcgccagttgggcgctcaggtggcttcatccgctgcccttcagggcgttatcagtgaatggggtgaactggaaacctatgatggctggacaaatctgaaaaacgactggctgtactccagtacaaccgttatcagtggtaatggtgtgaaaagtaccattgcgtatcttttccccggcggtaaggaaggtctgttgacaggtatccgtggttattatgcctgtcgctga

SEQ ID NO: 399255 - DNA, 1566 bp, Salmonella enterica
atgcttaatcgcctgaaaaaactgtttcccggtaacagcaataccagcagtactgagacaaccgccccggaggttgcacaccagtcagaacgtctgcctgaaggtttttatatgccccggactgctgaggagctgatgtccacactgcacaggaaacagtgcctgaaacaactgtgggaaaacagcagtatgccatccgatgtgtatcagcaattctgtctgatgccggtacaaaaactcctgatggcggcgcagaacgctcccgccgccagagatgggcggtgggccgatgccggcggttttggcgacctgacgctgcagttcaccacctatgccgttcgtctggccagaggatatatgtttccgcccggtgccacaccggaagagcaggccgcacagtccggtgtatggaatgcagtggtgttctggtcggctctgttttatcacctgccacttcttgcacaccttgagggtgaactggtcagtggaaagttatggcagccggggatgtcatcaccggatgaggcatttcgttttcgttacagacagcaacgtctgcaggacacagaggctcagcaactggcagcagtgatggccgggcagctgttgccggagggggcgacagcctggctggccactgtgccgggggcattacagaatctggcgggagcggtctggcatcaacaacctgagatggcattgattcgttcagtcctgaaaacagcggcagaagaggtggagagtccgcttctcgcgttgccggtaacggaagccgtaacagcacctttgttcccggaaaacactgtgcagtctgaagacaatgtgccatctgacagccagccagaaacatcaacagaggccattgcgccggaaatgccggtggccgtcccggaggtgggtgaatttacgctgcagccctctgtttcaggaaccgatggggcagaagtggaagtccgggatacgttgcagtctgcaacagacgtagaggaaaagtcatcggaggagcagagcctccatgatgataccgatatgctgctgagcctgttttctgctgcagatgaccatgctgcagtagtgacagcagacggagaatgcttacaggaaacgcaggtgttgattgataatgatcattctcaaagaaaacatgaggatgcctctctcacattgatttccggaagctctgctccggaagctgttatttcagaaggagagatgtttataaactggttaaaaaaaggagtgaggaacggggaaatcagcctgaacggaaaaaaagataaaattcatattgttgccggctttgtttttttacctgtaccgggaattttttatgagtttacgaaagcagcaggcatcccggcagacaaaaaagatgatattcaggcatcgtttgaacgcctgagcattcataagcggcgggataaccgacgcttttattttgcacatttgtgcgaagagcctgaaaacagaagtcgttttaaaacgctaaaaggttatctggtaaaaggcaggcagctcctggatggacaggaactacaggacagccgttatctcttttttccatga

SEQ ID NO: 399256 - DNA, 897 bp, Salmonella enterica
atgggggcatattggcaggtctatattgcatttataatactactaatctctgtagtgttatcaaggaatagtagcagcaaacttatgtttggaagctttttattcatactgggtgcaattgctgcaaatgttgcgttccttgcatctcctgcaatgcccagcagggctctcaatggagcactctgctttatgattctttcgatttcctttgttgctcattctgcatttacgaaatttaacaaagcttccatttatttatctattactacatatgcaatggcttttttatatttcattccatcatacattctctattactcatcaattaaatcaataagcaaacaaacggagattagggaagaaataatagacagggcgaaagataacaaacaagatcaagcgataattcctgattattactttccaccggtactgcatgcaggcccaagtcttgatacgtttaacagtgaagcaatgtctagatactacgggattgatgtaaaaataactgctccaggatttttcgactattcgcgagcctttaatctcaaacctcttaatattaacgcaaaaatatgtaacaacgtttatataaaatcattatggatatataaacagcaaatgggcattaaaacctttgtaatatttgagtttaataagaatcctgctgattctcttgatgagaatacagcgatgttcattagcttaaaaacaaaggatggaaaagttataaatgcagatgtcgacaagaagacatttcaaatagacggaagatggctttcaggacgggcgattaacggcatagattcaaatgaattagaatcaattacatctgggacatgggacgttagaacaggggcgaggacaaatgagaatattacggaaataattaaataa

SEQ ID NO: 399257 - DNA, 357 bp, Salmonella enterica
gtggcacagggtactttattaaaggaaaggataaatcccccacacctggcgtcttcgccaacacgccattcatatctcaacagcggattgttaaaatctgagccaatcgttcatctctcaactgcgcaattaatcggctatgaggtcctgacgcaacttccgtcagaacatgatagcgaagttttttttcagcagttaatgctgatggaaggcattgaaacatcagagcaacgaggcattgctttttacgctggtgcaacgatgggacaaggttatttatggccagccatattaccagatatatttttgacccctgaatctatcaggatattatgggtatcattgtggcagcgttaa

SEQ ID NO: 399258 - DNA, 306 bp, Salmonella enterica
atgttgactggagatatctgccaacagcataacttttacggccagataataaataaaagagtaccaaaatgtcgtattctgacatgtttacgaagggagtaccgctcccttctttttttgtctatggaaaacccccagctaggctgggggttccggaaagctttcagctttaagccagttattaaaaccccttttgatttgttaaaacatcttgcggtctggcaactgcaaaagttcaacaagaaatcaaaagggggtcccaatgggggacgaaaagagcttagcgcacacccgatggaactgtaa

SEQ ID NO: 399259 - DNA, 138 bp, Salmonella enterica; identical to SEQ ID NO: 380384

SEQ ID NO: 399260 - DNA, 717 bp, Salmonella enterica
atgttctggattgttcttattattgccgccctattttttagctggcgcaactacaaaaaaaacaaaccgctgattgcggcccgtatcgccgaggagaaagaaaaagatcgcctgaaagacctgcgtcgcgatacccgacggcggcaatgggcgctggcgctagctgatatcctcgcccggcgcaacgggctaccgatcaaaggcgttgagctgctcttaaaacttgacgatgacaaacgccgctatctggcgcagcaggtaaaaaaagagctgggcttgagcgaaaacctcaacggagcggcgttacgccacaaggtcgaggatatcttacgccgctggcctgcgggcatcggcagctcgccgcgcacgttttatcatcatctggcggcccaaggccaggtccgcgacgcgctggctttcgactgcatgcgaaccgcctttctgacccgctgtatcgccgggctcggctggtgtaacgaaaacgaggcctggctggtgctattgctcaacgcccagcgcgctcaggactgttttgattcctgggaggattacgccaccgcctacgttcgtgcccgccgggtatggctcacgctacgtgacacgccaacagcgcttgccggacgggatttacaggaagccacccattatctgcaagaccctgtcagccgctggcgacaactgccgtggaatgaattcaaaattttcgagccgatttaa

SEQ ID NO: 399261 - DNA, 720 bp, Salmonella enterica; identical to SEQ ID NO: 8275

SEQ ID NO: 399262 - DNA, 438 bp, Salmonella enterica; identical to SEQ ID NO: 17093

SEQ ID NO: 399263 - DNA, 1959 bp, Salmonella enterica
atgcctgtaacgaagtgtgaaccagaaaccacccgcaaagcaagccgtaaatctgtaaaaacgcaggaaactgtcctgtctgccctgctggcgcagacggaggaagtgagcgtgccgctggcctcgctgattaaatcaccgctgaatgtgcgcacggtgccgtattctgcggagtccgtcagcgaactggcggagtccattaagggcgtcggactgctgcagaatctggtcgtgcataccctgcctggtgaccgttacggtgtcgccgcaggtggtcgccgactggctgcactcaacatgctggcagagcgtggcatcattccggctgactggcctgtacgcgtgaaggttattccgcaggagctggcgacggctgcatcaatgactgaaaacggtcatcgtcgggatatgcaccctgccgaacagattgccggattccgtgcgatggcgcaggaaggcaaaacgcctgcacaaatcggtgatttgctgggctattcgccccgccacgttcagcgaatgctgaaactggcagaccttgcgcctgtcatcctcgatgcgctggcagaagaccgcatcaccacagagcactgtcaggcgctggcgctggagaacgacaccgcgcgtcaggtgcaggtgtttgaagccgcctgccagtcgggatggggcggtaaaccggaagtacagaccattcgtcgtctggtgaccgaaagtgaagtggcggtggcaggtaacagtaaattccgcttcgtgggggctgatgctttctcacctgacgaactgcgtactgatttgttcagcgatgacggggacggttatgtcgaccgcgtggcgctcgatgctgccctgctggaaaaactccaggctgtcgctgaacaccttcgggaagccgaaggctgggaatggtgcgccggacgcatggagcctgtcggtgagtgccgtgaggatgccggaacataccgctgtctgccggagccggaagcggtgctgacggaggcagaagaagaacgcctgaacgaactgatgacgcgttacgacgcgctggaaaaccagtgtgaggaatccgacctgctggaagcagaaatgaagctgatgcgctgcatggcgaaggtcagggcgtggacgccggagatgcgtgccggaagtggcgtggtggtgtcctggcgttacggtaatgtgtgtgtccagcgtggtgtgcagttgcgcagtgaagatgacgcgactgatgacgctgaccgcacggaacaggtgcaggagaaagcgtcagtggaggaaatcagtctgccgttgctgacgaaaatgtcttccgaacgcacgctggcagtccaggcagcactgatgcagcaaccggacaaatctctggcactgctggcatggacgctctgcctgaatgtgtttgacagcggagcgtacagtaaaccagcacaaatcagcctggaatgtaaacattattcgctgaccagcgatgcgccgtcagggaaggaaggtgccgcattcctggcgctgatggcagaaaaagcccgtcttgcggccctgttaccggagggatggtcacgggacatgacgacgttcctgtcactcagtcaggaggtgctgttatccctgctcagtttctgcaccgcatgcagccttaacggtgtccagacccgcgagtgtggtcgcacgtcacgcagtccgcttgactcactggagagcgccatcggttttcacatgcgcgactggtggcagccgacgaaagcaaacttcttcggacacctgaaaaagccgcagattatcgcagccctgaatgatgccggactgtccggtgccgcacgggacgcagagaagatgaagaaaggcgatgccgctgaacatgcagagttccatatgaaagacaaccgctgggtgcctggctggatgtgttcaccacgtccacagacggatgccactgaacgcgccgataacctggctgatgccgcctga

SEQ ID NO: 399264 - DNA, 234 bp, Salmonella enterica; identical to SEQ ID NO: 8563

SEQ ID NO: 399265 - DNA, 528 bp, Salmonella enterica; identical to SEQ ID NO: 8564

SEQ ID NO: 399266 - DNA, 387 bp, Salmonella enterica; identical to SEQ ID NO: 382213

SEQ ID NO: 399267 - DNA, 285 bp, Salmonella enterica; identical to SEQ ID NO: 14830

SEQ ID NO: 399268 - DNA, 372 bp, Salmonella enterica; identical to SEQ ID NO: 15273

SEQ ID NO: 399269 - DNA, 255 bp, Salmonella enterica
atggaaaaggggaccaccctgaaagacggactggcccgctggacatcatccgaaaaatgcccgcacggcacatggacactgcgctgggaaacacctgtcaactacagcatcgatgcccctctggttttcaccggcagtttccgccaggcgctggagcagctctttgcactctataccccggctgaaaaaccgctgtatgcccggaccagcactgcacaatgcctgctccgtgtgacagaccgcccgcaggaataa

SEQ ID NO: 399270 - DNA, 438 bp, Salmonella enterica; identical to SEQ ID NO: 8220

SEQ ID NO: 399271 - DNA, 1620 bp, Salmonella enterica
atgaacaaaaaacttcttgctattatgattgcagccactctgctgcagggctgtaccagtttccgacaggcagagaacaccagaaaagacgccgttgctgaacaacaacgggcccgggaaatgatcgctgagctgcgaaaccggacaccggttgtaaaggaatccccacgtcagtggatcaatccccgtccggtcacggataaaaaccccggtaatgcggtgcccggctgtccgattatcattaacacccggcagagcatcacccttcagcaggtggcccagcggatctcgcaaaactgtcatattcctgtaaggatcacccctgatgtacaggcgtatctgagcgtgaccacctccggcagtacgcagcaaatccagggcacagtaccaccgccggataccggcggtatggttccactggccgccataggcagttctgacacgacacttccccgcctgcagggaaatacggcgtcacttcctgaactgaaggcttcaggactgacatcactgctgaatgcggtcgcttcccgtctcgggatttcctggcgttatgatggttcacatatcacgttctattatcttgatacccggaccttcccggtgacctatatggacagccaggttgcctataatgccaccgtggtcagcggtaccatgtcatcaaatggctcatcaggtggaacagcatcggatgccatttccggtgatgccagtaatacccagaccaccaccgtggatatgaaatctgcgctgtatcaggatgtgaaaaatgctgtctcatcaatgctgacgccgggtattggtcgcatgttcatgtcgacgggctttatcaccgtcacggacaccccacaggtactggaaacggtccggacgttcattgaaaaacgcaatgaagaaatgaagcgccaggtggtgctgaatgtggaaattctgagtatccggaaaacccgtaatgagcaggcaggtatcgactggaacgcagtcttcagcgacagaacgctgggactgagcctcggcagcacattcaccagtgcagccagcgataccgtcactggtggtgtttccattgtgaacgggaaactcaccggttcaaaagccttcctgaaagcactctcttcccagggagatgtcagtgtggtaacccggaattccgccgtgaccaaaaacctgaccccggtaccgatgcagattgccaatcagcagagctacattgagagtgtgacgacggataccaccgccaatgtcggctcatccacctccctgaatgcggccaccatcaccaccggttttaatatgacccttctgccgttcattctcccagactcacagacactgcagctgctctattccatgagtctctccgacaaaccggttattgagaattacgagagtggtggaagcaaagcccagctgccgaatgtggatctgaaaaccatcaaccagacagtggacctgaaatccgggcagacagtcattatcagtggcttccagcagtcagggcgtcgcagtggaaaacagggtgtcggcacaccgggattcttcggtcttggcggtgggatcaacagtgaaaacgacgacaccattctcgtggtgctgatcacgcccaatatcatctga

SEQ ID NO: 399272 - DNA, 1296 bp, Salmonella enterica
gtgacagatatttcaccgacagagcgacaggtgtttccgctgacggcaggacggaatgtatttcttgccggaatggactggaaaacactgcccgcaagccataaaaacccccggacgtttgcccgcagtctgggggcagtacgctatatttcctgtgagtatctcagtacggaagataccgatcgtcacatcatggttgcagccgtcagccagaatacactccccaaaggcagccgcaggtatttctctctcgccatgcttatcctgcctctgctcgagccaggaggatacgctatcgttgaactgtcacaggcaaacgatacagaactttatggttttgtttctgctgttgacggcatcctggtcagtgacctggtgggaacccgggaggaaatcagggaggcccgggaaatattcctcaccattaacagcgcgcctgaacacggctggacatgttatgaaccgccctcgtttaacgggcctgacggcagaggtcccctgccactggaaaccctgacaggtgcagggaaatatccggcagaagcacgccttcaccccgtatcccgtgggccacagcttattccggtattactcatactcacccttctgggtactgcatggtatggctggcagtactatgaacgcctgaaggcagaaaaagcagcacttgctgaagcggcacaaaaagccgcagaggaacggatcacaccaccgtggctgagtatgccggaaaccggagattttatccggggatgcagtgacgtatggtcacgcctgccggtgtcggtcgccggctggcgatattcactcgccgagtgtgctgccaccgggaacagcggcaatctgcgtgcatcatatacaaacatcgccgggacgacagtgaccgcattcagccagcgggtcagggaaattttcagcatccggccgtttatggttatgccggacgggaatagcggtggttttgccctgccggtcaccttcagtatgcctgaaactcccgttgccgttgaggcattaccggaaaacaccctcctgcaggaacggctgaccacactcgcccggtcgatgcagctgaaaatggactggcaggaagtcagcaacagcttcaccgatgaagacggaaataccatccagcccccctggaaggagtatgacctgcagatactgacgacacttccggcgcaccaggtggcagagcatttcagtgaaccctccgtccgttttatctccgtaacaaggcaactggaagagggtcgtttccgttatcaattcacaggtaaatattatgtccagtaa

SEQ ID NO: 399273 - DNA, 459 bp, Salmonella enterica; identical to SEQ ID NO: 8223

SEQ ID NO: 399274 - DNA, 1509 bp, Salmonella enterica
atgctggcacctgcagaccagccacctgatgacattctggattacgtggttgttgatacagataaaacaggacaaattcatgtcagagtggtggaaggaaaaaaacaccttcgtgccgtccaggattatctgacccgcctgtgctcccgctatccgggtaaagtatccccgtttgagttcaccacacttgatgtgatcgcccgactcaggcaggagacggtcatttccggggtggaaaacggaattaaccccgtacagcaaaaaatgctcgggtatatcagccatgcggccaccctcagcgcctcagatcttcacatcacgccggggcgtgacagtacggatttcacgtatctggaggcccgtgtccacggagagctggagctgctcgatatcgtcagaaaagatgaggggctggaattactgggggccacctattccggaatgactgacgtcataaagggaacacagtttgatcccggtgtcccccaggatgcccgtctggctgaaagattcctgaaactggccggactgtttggtgcgcgctactcccactatccgtgtgtgggcggactctatgccgtactgcgtctgatcaaggatgacagtcagcatataccgacattcagtatgctggggtatcaccctgagcaggagcgcgctgtccgaaggatgctgcagcgaccggagggcatcgtgatcctctctggccccaccggttccggaaaatccaccacgctgaggacggcttctgccgcctatctggaacagtatggcttcaacgataccggagggatcctgctcccccggcgacgtctgttcacaatagaatcaccaccagaggggcgtatccccggtgcaattcagacggccgttatggataccgctcagggctgggtcgattctgttaagtccgccctgcgccttgatcctgacgctatcctgaacggggagatacgtgaccatgcctccgccatcacggcgataaaagccgccatgaccggtcacctgatgctgaccacccttcatgctaacgacccgataaatattcttgagcgtctggaaatggagggcgttcaggcaaggatgattgcagatccgcagttatttatcggcctgctcagccagcgtctggttcaggtgatatgtccccactgccgcctcccctggcatgaggtggagagctcccggacggatgaagaacgacgcctggtggaaaacttctgccagcccgatgccgtgtatcttcgtaaccataacggctgcccacactgctggcgtggagtgaacggccggaccgtcattgcagaagtgatttccccggatgcgaagtttttccagatttaccgggaaaaaggccggattgaggcaaaaacctactggcaccgggagctcggcggtatgacacgaaatcagcacctgctgggcaaaatcaacagtggtcaggtcgatccgctggctgcgcattacatatcccctgtagacgaggacagctatacgctgctgcactga

SEQ ID NO: 399275 - DNA, 1095 bp, Salmonella enterica
atgaaaattctggaaagactcaacaatacggaactggaactgtccggccttaaccgctggctgggcaaaaagacgttcaggcggactacgttttacgagtcccttgcaggcatgatccgggacggcacaccggttatgcgggcactggagttcatctgcgatgtggaaacggattttggtaaaaagaaagggcagtccggcctgtattttctggcgacagactgtatcgccagcatacgcagcagtggtcagctctctccggccctgaaggactgggtacccaaagatgaaattgccctgatccgtaacggtgaagaacgaggtgatatcgctgaagccatgtttcaggtcgtcaaaacggcaaaaggacgacaggagatgattagcagtctggtgagtgtctgcctctatccgctcatcctgctgacactctgtgtggtgaatatgtataacgttcatacccgggttattccgatgatcagcgcctttgcaccggaagaacgctggtcagtacagatggtcattctggccaaatcctccgagctggttatcggttatggtttgtggctgctggcaggactgctgctgctggcaattctcatcaggatgtcattcagtctgtataccggtccccgacgacggtatcttgatcgcatcccgccatggtccctgtatcagactttccatggcgtgaattacctttttaatatttcatccatgctgcagataaatattcctttatctcatgcccttaccagaatagaaaaacatgcagaacataaccgatggttaaaatcacgaataagtgctatcagaaaaaatgtcttatccggtcagtcactggcactggccatgaaaaactgtggttatgactttccgtcaaaatcctgtgtgaataatcttcttttaaattcagaaagggaggacagtgttgccagtatggcgctttatgcagaccgctggctggaagaagcaaaaaagaatgtcagaaaaagcggcattattattactgctatatcaggtctgctggtatttctcttcatcatcaatatggtcagtgccatttacggcatcagtgacatgctgaagcagtaa

SEQ ID NO: 399276 - DNA, 537 bp, Salmonella enterica; identical to SEQ ID NO: 8226

SEQ ID NO: 399277 - DNA, 486 bp, Salmonella enterica; identical to SEQ ID NO: 8227

SEQ ID NO: 399278 - DNA, 627 bp, Salmonella enterica; identical to SEQ ID NO: 236377

SEQ ID NO: 399279 - DNA, 1362 bp, Salmonella enterica
atgcaaaaagacaacgataaaggttttgcacttcttgaaattctgggaggactggttgtcatcagcctgctcatgccgctgttctggtcttacattgaagactacctgaatgaaatgcgcaaccagagcgccgcatttcatgcagatgcctacaatactgcagccaggacctacatcgccgataacaatgcccgcctgcatagcggaacgcttcctgccaccttcacggcggatgagttaatccggaaaggatatctgaagggtcttaaccgctcgccctttgggcagagttataccaccggcatccgtcgtaacacgagtaccggtcgtctggaggccctgacctgctccaccggaggggagaatatcaaagacgatgccctgcgcagtatcgccagcctgctccccggtctgggcggatttataggaaaaaatggcacagcaaccggtgtttttggtggatggacagataaacccggcgactatggactcagctgcaatggcgggcacatcgccatcgtaatgatgggggatgacctgcaggaaagcgatcgcctgtatcgctttcaggtaccgggacgaccggagctgaaccagatgaacacggccatcaatatgggagggaacaacctgaacaatgcaggaaacgtcaatggacaaagtgcaacactgaaaggtgatgttacaagcgaaaacggctggttaatcaccaaaaatgataaaggctggaagaacatcacctatggtggcggttttacgatgacagacagccagtggatacgcgcagtcggtggtaaaggaattataaccacaggggaaatcaaaggaggaaaagtcagtggggggacagtccggtctgacggtcgcctttccacaggtgagtatttacagctggataaaacagccgtagcaaatacaaagtgttcaccagatggacttgtaggccgcgacagcaaaggggcaatactttcgtgccaatccggtgtgtgggttggctttgaatcctaccctgtgggaagccctatcccgtggccatctgccactcctccacaaggctatctgttgatgaacggccagtcgttttcctgttcccggtatcctcagcttgcccgtgcttatcctagctgtaagttacccgatctgcgcggtgtttttatccgtggctgggataacgggaagggacttgatggtgatcggaacagacagctcctgagttatcaggccgatcaatcaggcgtctatcacgaacgtggcggatggctgaaagggcatcatagtggtatgccatactgggcacaggggagtaccacagaaatgcgtcccaaaaacattgcattcaactacattgttaaagccagctag

SEQ ID NO: 399280 - DNA, 420 bp, Salmonella enterica; identical to SEQ ID NO: 236381

SEQ ID NO: 399281 - DNA, 837 bp, Salmonella enterica
atgaaaaaacaggtctgtctcctgctgtccgggctcctgctggcaggctgtgccggacagcaccatcgcccccctgccggtatggcaggcaatttaccaccgccggatctccgggcatggctgacgcccactgacaaccaggatgacggcatttcagacacccgtcgccagatgctcacggacgccggacgaacgctgggattccgtggcggaaaagcacagcgctcatgggaactgattcaggcactgaatgcccgggaaagtacactgaatgccctgtatgacttccgtccccttatcagcagggaaggctggctaccccctgttattgatgaagcgcaggatgttgctcacattcagcctgaccagataagaaccgcgtcccgtgtctggaccatcctgcgccccgaacgttttgtcagtaacccgccgggctggcgtgactggcttctgcgggggctttccactaccgccaccccgggaactgagggccgtgttgtaccggaagaccgcgcacagcgcagactctgggaaaacgcactccgccagggctggcaggaaggccgtgacaacgctgacctcaccctggaagccaaccagaaacgcctgacccgggattaccggggaatgatgctttatgccctgctctggcgtcagggcatgatcacacgcccggatgtgactgaacagcggcagaccgtcaccggtaacggcaggaaactcatcaccggagaccacgtccgccgtctgaagacacacgcggaattcaccctgcagaaatcacgctggcgtccggtcgtcagcacggaaggagcccccgatgaaattacccgatga

SEQ ID NO: 399282 - DNA, 1149 bp, Salmonella enterica
atgaaattacccgatgagttcggcacattccctttcgcccgtttcacggccgaagagtttcgctatttttttgcctggtgtgcccgacaccgcgtcagtgatatcgatctgacaggcggctcaccggtatctgtcagtcgctttggacggcgggtacgttcgtccgcacatcctctgccgtcctccatcatgatggcgctgagtgatgaattgtttggacgggaagtccttccccgggtgctgtccggtcatcccgtggaccgtaccattcaggtcagcggtgatgcctccggtcgctacggtctgcaacgggggcagcgtgttcgcctgcgctgtcatctgattcagggaacatcagcaacagaagaaaaagtaatctccgtcaccatgcgggtgatcccgtccgatattccggacatcctcaccatgaatattgaaccggacctgctggatgccatgctccggaaaaccggtctgggtttcatctgcggagagaccggctccggtaaatccacactggcagcggcactgtaccgctacattcagacgcatttccccgaccgcaaaacggtgacctatgaagatccggtggaatacattctggggggagagaatgaccttctgccaccccatcaggccgaaatcgggcgtgatgtggaaagttttgcggcaggacttcgctctgccgttcgccgtaacccggacatcatcggtatcggtgaaatcagggattatgaaacggcagatgcagccgtccaggcaggtaacaccggtcacttatgcatcggcaccatgcacaccaaatcacccggtgaaacctttgcccggctgctggggttatttccaccggaaatcagggattcaatggcagccgccaccctttccctggtgcagttcattctggtgcaggtcctggtcagaacaaatgacggtggcagacaggccgtccgggaatacatcgtcataactgacgaactgcgtgatacgctctcccggcagtcccatgcgacatgggggcattacattgatgaaatcattcgcaaggaaaaacggcggatacgggatcaggttctgaccatgtatcagacgggcagcattgaggcatcagaagctgcgctcttcatcccggccggagaattccccaaatga

SEQ ID NO: 399283 - DNA, 291 bp, Salmonella enterica; identical to SEQ ID NO: 236384

SEQ ID NO: 399284 - DNA, 4062 bp, Salmonella enterica
atgaagtccagatatcgaacctggcttgctgtcccgcctgaggagacagaagccgtaaaaaatgcagttcccccgttaaatggccgcaaagctgtcgcatgggatccagaaaaaaagctctggtatgcccgggcgggtaccgaactttcactgctggagcgctggttaccccggccacaggaactgtcgatggatgccggcgatccggtcactgaatttgctcaggtcctggaaaacgccgggctggttattcagggattgccacagatggacggagccatacacagagtggccacccgggatgacaaaaaaggggccaaaagtggcgcatacagggcctatcttgatggtcgtcccgccggctggtaccgcgactaccggagcgccgatgacagtcccacaaactgggtattttccggcggagaacaacacgatcctctggccagactgcatctgcgggcattcgctcagcaacagcgcgatgataacgctcgtaaactgcagcaacagtataacaaacaggccggctatgcccgctcctatattaacaggttgccacaggcaacagcacatgaatacctgacgcgcaagggcatccgggccgcgcctggcgtgcggctgaacaataaaaatgagctggttattcccttcagcaacggccggggagaaatacgttcgtaccagcgtattccggtcaccggcgggaaggatgcccgcattctgaaagactccgagaaaaccggcaactggttcaccttcggaaccccggaaaatggccgccccctgttatttgcggaaggttacgctactgccgcctccctgcacgaagcaaccggccttccggttctgatgacagttgatgccagcaatatgattgccgtggcagaaaatgcccgccaaatctggactgacagcccctttgtcttctgtgccgacaacgatcatcaacgggaaattaacaaaggggtttttagtgcaacaaaggccgcagaagtcacgaatggcgaagtcattattccggcctttacggaggcggaaaaagcacagggactgaccgatttcaatgacctggacgccagccggggacgggacaactttcagaatgccatgaatgcacagttaaaacatatcggtatccccacacccaacagtgacactgccgaccatcgtgaggctgtcgtgatcgacaacctgatattcacaccggtaaaagatgagaagccacaaatgtcccctgaaaacagacagagcacagccccggaaacggagctggcgacacaggatacgccttatgacacccactccgacgatacagaaaaccaggcatatgaagatgactatgccgcctatgcatccctgcaatcagtaactgcggagacgttatccccggataaaccactggagaatattgcgtctgccgctgataccggcacagagaatacctctgtgcctaccgctggcgaccaggaagacctcaatacagacgccacaggtacagacaccgctcacaacagcgacacagcagaaacaggaacgcttcctgaacctgccgggatgcagtccgtgcagcaggcaaccactgaaccgaccgcagaagataaaccacacgagaacgttgtttccgctgccgataccagagaagaaaatgcctctgtggctaccgctgataccggtgaagaaaatgcctctgccaccaccgctgacaaccagagcacgcaggcagaagaacatccccggagtgaagacacaccggaaaccgccctctccgacgcggccgggacacagcacaccaccacaacgcagtctgaagaacaagtgcaggtttccatggccagcgctgacgactggagcgcatttgcggaagatctcaacgctgacactccgggggcccccactgttcacaacaccgacaacgcggagacaaacacagtttctgaaccggccgggatgcggccagttcagcaggtgaccactgaactgacggcagaagataaagcacaggaaaagagcgttgcgtctgccgctgagaccggcgcagagcactcctctgacatcaccgatgacaacaggaacgcacccgctgaggagctcaatgccgatgccacggttgctgttcacaacaccggcacagcagaaacagcctcaccttctgaacctgcagaaactcagccagtccggcaggccaccgctgaaccgacggctgaagataaactgcaggaagagcgtcttgtgtccgccactgagaccagcacagcgaatgaagcagcccgccctgaaacgccatcgcttttcagccgtctgcgccgttttctgaccggtgtgaaatcacgcacctcagaaccttccgttattcaggagaaaaagcccacggaggctgaaacagcaacagaggaggtcgcaccaccatcaccaccggaaaccagcccggaagacacatcgtcagcggaaccggacacgattatctttgcaccccgccgtcccgacagtccgcagcggcacaacctggacgagatccttaaaaatcttacacacaaagagtttcccgacaggactgcgctctacagcgttgacggtgaacccgccttcctggacagactctactgtctcgaaatggtggatggcgccagcgcggatgacaaaaaggtcctggctgcccttgctgtggccaccaacttctatggcggcgttatcgagctgaccggcagtgatgcctttaagcaaaaagccatgcagctgattgtcgaatacgacatcaaggttcgcatgaaactcccggcccagcgggcagcactggaaaaactccgcaaggaaaaagagatggcgcatgatgccattgtcacccacagacccacgccggaactcaaccgccagtcaccggaagagacaacaatggcccaaccggctccccctgtgtcaccgaaggcagaggctgaacaaacagcaggcagtacggctgaaacaccgcatccggaagcgccggtcacggcaaaagctgaagccccccgggccgacagaccggaacaccccgccgccccgtcgtctgcgccagaaaaagcccctgtcagtgcacagccgcagcaacccgacacaccggtggaagagccgcccggcaagctcagccccggtgaaagtgtgactgccgtcctgacaaactacggagaaaaagagtatgcgcccggaaaagggcgctgcttttttgtggagctcaccaaccgcagtggcaaacgggaatactggggaaacggcctggaagaactggtcaaaaaccatcagaagggtgaccccgtcacactgacactgcaggcgagagaaacattccggctgtccggtgaaacgcgggatcgtatccgtaatatctgggccataaccccggtcagtaacggcattaccgttaataatgaccaacctcatgcgggtcagcataccctggagtttccgatggcaacattcagccaggtgatgttacagatgcaacaacactggccacagataatgcaggaagttcgctcccccaaaaatcctcccaataatctgtacattggtgaagacaggcaacctgcatcagcacctcaggatcaatcaatgcgactccccctcgctggtaatgcccccaatgaactgataccagccatcgcctctgccgataaggacaatcgtcagttgaatcttctgctggtccacagcgcagatgatcatctgcagggcgtggtccgcctgaacggcaccctttacccggcactggccaccccgtcagctgacaaccgtcagctggttatcaatgccctgacggataacggtctgcagtttgccggttacggtgaagctgttaaccatgatgagaataatcatcagcgtccgtccccacaaataatgcagtttcacctgaagcaacaggactccccgttgtttgccgccatccacaaaccggaagagcaaccggacaagcttttccgctctctgggttttgagcagacctggaaagagtggtctgacagccaaaaggcggaggacaggcaggaaaaaactctgcaacaggcacaatcccacagccccggccgatga

SEQ ID NO: 399285 - DNA, 351 bp, Salmonella enterica; identical to SEQ ID NO: 8237

SEQ ID NO: 399286 - DNA, 696 bp, Salmonella enterica; identical to SEQ ID NO: 8238

SEQ ID NO: 399287 - DNA, 975 bp, Salmonella enterica
atgcacatacatcatcttattggcgcactgcttattgtgtgcggcactgtcacagctgcagataacccgggctggaaaaatgcacgaagcccgcagaccggcggaaagaccgcacaggcaaccgggaacaccccggcaggcggtcccccgccagccgcacaactcccgggaaacctgccgcctcccggcgctgctcttgtacaggaaggcgcatcgctggattctcccctgaatgccagtgaaattcgtgaactccgtgggataatggccgataacgaacgggccatcagtgccccgctcaccagtgtggtgccccgtatcagttccctcacggtgaatctgtctccgggggccagcctgccccttgtccgtaccgctctgcataacgtcagcgtggtgaccttcacggacgtcaacggcagtccgtggccacagtcggatccgccctataacgctgcgcccggtcactttgacgtgcagttcaacggcaatatggtgtccgtcacccccctgcgcgcctgggctgccgggaatgtgacggtctatctcaaaggattgtctgtaccggtcatcctgaatatcaccagtggtgaaacggacaccactaccctgagtcaggaaatcgacagtcgtctggatctgcgcattccccggcagggacctgccagcccggtggtgtccataccgtcagaaaaaattgccctgcatgacgccactctgcaggcctttctggacggtgtgccaccggatgaacccgccatccgccgcctgaaattctccggtaacgtcccggacaccaccatctggcaacacggcgatgatcttctcgtgcgctcacgggccatgctgcgggatgaatttgaacagacgctggcatcggctgatggtacgcggctgtggaaactgccggtgacccccttactcaccttctccgtgaatggtcagtccgttcacgtcaccccggaactggagtaa

SEQ ID NO: 399288 - DNA, 1338 bp, Salmonella enterica
atgagcgcagaacaagaacaggacacagccgcaaaatccggcaaaaagctgtcagccctgctggttatggggggcgtgattatcatcgggggcggatacctgctgctcacctggctgtcccccgaaaacgctgcatcgctctcgtcagtcaatatcaacagcacaacgtccggcggcggacggaacgtgatggagacacagcactaccgggatttactgcgggctgacaatgaacgtggtgctgcagaagcgttacgtaataacgagacgtttatcgccagtctgccccggggactggataccgataccggaaacgatcagaaaagggataatccccccgatgatcagtcaggcacttccgggcaaaacgcatccccccctcaggaagatcagactgcccgggaaaaacggcgtgaggcattacagaaactgcttgcccgtatcaatacacagcatcaggatgcccggccaccggtagtggcagcagccatgtggagcaccaccggcactcccgggacagccccacatgcgtcaccgcccggtaccgttacatcacaacatccccgtctgcaggagacgagtctggcaaccccggcagcacgtccggggatccagctgataccggcactgacccgcgtaccggcctacattgataccgaagtggactctgacaatgcggtctcccgtgtggtggcctccgtacctgccggcccatgggccggggccgtcctctacagccaggacgccagactcgcaggtcagggaatggatatccactttgaccggatgatgtggaggggcatgtttctgaaggtgaatgcatatgccctgaatgaacgaacaggaatgtcaaccgtggccagcgacgtgaaccaccgctggtttaagcacatcgttctgccgtccgtacttggcggggtgggcaatgtcggaagtctttacaaagacgccaacacacagatccttcagggaaactacggcagtattaccggcagggtgggaatgcctgatggagaggcgctggccggcgtcattgcaggtggcatggccgaacggggcagccagctgctgacccgccaggcagagagcgaaccttaccgtcaggtgacagtatcacggggcgaggtcgtctccattctgtttgttgagccggtcatgagcaacgatatcagtacgccgtcctccggcactgccccttctgagtccccctcctccggacgtccgctcacccaggcggaggcagagcaccaggcctctgacaggatccgggcggcggtcctccgtaaacagaatgaaatgcagcaacgctacggcatacaacaggaaagttatccatga

SEQ ID NO: 399289 - DNA, 714 bp, Salmonella enterica; identical to SEQ ID NO: 236390

SEQ ID NO: 399290 - DNA, 531 bp, Salmonella enterica; identical to SEQ ID NO: 236391

SEQ ID NO: 399291 - DNA, 399 bp, Salmonella enterica; identical to SEQ ID NO: 236392

SEQ ID NO: 399292 - DNA, 627 bp, Salmonella enterica; identical to SEQ ID NO: 236394

SEQ ID NO: 399293 - DNA, 3045 bp, Salmonella enterica
atgaatatcaaccgcattatttttgccattgaagactgtatcagtaccctgtcacggtattccgtttccgcattcttccccgattactgtgatctgcacaccgtcatcggtctggaccagcaggaccgcgaacgccgcccctggctgaaagccccctacattgccaccacaaaacaggggtattacctttccgtctttgaaatcagcggtgccctgaaagaaatggatgaaaacccggaccagacggcccccgggacactggagtcactgattgcagcactggctgagcgaatgaacacggcctggaaaaattccggccacaaaatcagttttgttttcgaacgcgatccggagcgtggaagggatgaaatcgaagccatgctcttaccccagcgaaaatccatcgcacgcacggggatcctgcttcaggacgtcctggatgaaaaagtcaccacactcaccccctggcttgtccgggagcgctgctggctgaccgtctggagctctgaagaactgctgagccggaccgatcgcaaggaccatcagacccgtgtcaggaaactcgctgaacacgctccgccagcccgttttgcgcaggatccctggcgctggacactttccgccctcaaaatacggcatgacgccttactggacacgctggagcaggccctgacacatgattctgatggcctgctgattcgcctgatggatatccatgaagtgggacgggaaatccgccgccagctggagcgcaacagtacaccggcagtatggcagcctcatctgcctgaagatgcccgtcctgccggctggcgacagggcggggatacctctgtattccacgcaccgtcgctgaatctgcagttattcaccacacagcctgaaacacacggcagcctgattcaggccggtgagctctggcacggtatggtcgccattaccctgccccctcagaatctgcggacattcaaccagctggtcagggatgtgccccgtgcaatcccctggcgtatccggatggatctgatgcccgacggcatgaaggcgctgggggtcaagaaaaccctgctgacctacagcagctttattcctcctctccggcccatgtatgactcggtaatgatgctgaatgacatcaacaagcatgatccggtctgtatcatgaccattgttgccaccacatggggaaacagccgggaagtctgtacccgtaaccaggctctcctgaaatctgcgctggaaggctggggggtatgcggcaccaccacaaccttcggtgatccgagacgtgcctgggtgaacacggttctggcagcctcccacagctccggcccgatccccctttacccgcccctttcacacgccctttccctgtttcccctgaacagggcaggctctgtctggcggggacagggaaatctgatgatgcacaccgaagacggctctgcatgggaggtggcgctggcgtcatcacaacagaacaagcacacggagctgacacccggcgcacccggtctgggcaaatcggtactcatcaacgcactgtcggagatccagatagcctcagcccagaagaatctccctttcattgcctatatcgacaagggattcagtgcacagggactggtacagcttatccgtgacagcctgcctgagcagagaaaggacgaagccgtggggatcattctgagtaatgacccggaccacacccgcaacctgtttgatgtgatgtacggggccagaaaacccgtcacaccggaaaagaacttcatggtctccgtcctctgtgcattgtgtgtggataccggcaccggtcagccctgtaatcccggcgacacccggcaaatcatcagcagcctggtggacctggccttccgggaatatggcgagaataaccccagactttaccgcgcaggtacggaacccctggtggatctcgccctggaagagagcggcatcgctgaacaacatgatgccggatggtggaatgccgccacctggtttgaaatcagggacatgctgcatattgcagggaatatccccgccgcccagcgggcacactaccaggccatgcccctgctggctgaaatgtccgccctgctgggacagccgtccatccgggatgtgttcggcaccgttcagcgtgataactcggaagagcggttgctggactacatccgccgtgccctcgatcagggacacagtgactacccgatgatgtccggctgtacccggtttatgctcagccccgacacccgcgtggtcgccgttgatctgaacaatgtggccggggacaagacacctgccggacgtctgcgcaccggtatcatgtatctgctggccgggcagatcgccggcggggattttgtcctgccgcagtatcaggaggaaatacggaaaaatctcgacccacgctaccatgaggtgattttccgccgcattgaacagcttgatcaggaggtcaagaccaaagtctatgacgaactgcacaatgcaaaagggatcaacttcatctgggaagccctggacacccaggagctggagcagcgtaagttcgggatacgcacggtgctgagcacccagctgctgcagcattatcctccggccgtgctcaaatccgccaacaccctgtggctgctgcgttaccgccctgacgaaattccgttcctgcgggataactttggcgtcccggaagtcacactgcggcgcttcctgaaaatgccggaaggggccgcaccggacggcagcggtgtcccggtactggctgtgttccgtgtaaaaaacggcacgctggcccggatcctgaaattcaccctcggtccactggagctgtgggcactgaactcctctcctaaagacagcgccctgcgacgtgcgctgacgcaggaggtggggtcactgcgggcacgccagatcctggccgaacactttccccggggttcagccacctcactgatagaacaccgcgcccgtacacatgacagtgaaaacgtcatccatgagctggcagcagaactcatccgtaagcagggatataacctctga

SEQ ID NO: 399294 - DNA, 621 bp, Salmonella enterica
atgtacagcattcatatcaccccccgctgccggcgtcctgcccggggacaggtcttcctgaaaacactgcgcgtggacggtgacagtttcagcttcaccctgccgtccgcctgcttcacactgcgaccgtcccctaatccccgggtcatttttgccagtgacagacgggctgacggggagatgagtggtattcgcctggccctgcccggagagacaggcacgctgataacaacggccacctggcaggttaacgtgccggagcgaccgccttttgatatacagcatgtcattcactggcttctgcccgcaccactcactgcgctgatgtctgacaacacctggctgtggccggatgtccccggcacaccggcactcacagccggagactggccggtcatggaaagcgacaccccgacactgaaacgcgtgaagcgtcgtaccttcacgctcatcgataaccgtaaccgtcagggatggatcacgcgccgcttccagtgtttcccgctggctccgctgccggaatcactcagtcatcgcataccagacatcctgtatcccccgaaaacggagaaaaaagaatgcaaagacaatctgcaaccacactgcttgcactccttgtag

SEQ ID NO: 399295 - DNA, 1206 bp, Salmonella enterica
atgcaaagacaatctgcaaccacactgcttgcactccttgtaggctgtgcggttatccctgccacccatgcctactctgtgaatgttgtgtccagtcagcccgtcacccgacagatcatgccggagctggccaccatacagggcatcatggaggaaatggtccgtatgcagacggccaccggcacagccatcacccagaactcagaaaaactggccaccgtcattgcccaggacgggcaggccacccgtcagcagatgatattcagtaatgaaacacaccgcctcgaggaggccaggaaaagcttcagcgtgccggactccatctgcagtgaatccgcgtccggcattgcagcagaaagccgccgggcagcagcgtctgcagcggcacgtctgagtcaggggggaggggtcagcagtaaacccatccgggaacgtctctcccgggctgcggactccccggtccgcgaggcgtatgacagtgccggcatccacgccggttactgcacggaagcggagtatgcccgctttggcggaactgatgtctgccctgccgtgggcgatctgccgggcggagacagccaggtacgatcgctctatcagggcgcaggcacagcagataccccggccgctctcacctgggatcagaaacagattgatgccgcgacggcttatatgaaaaacaccgccagaccgtcagcgggtcgtgccccggggaaaggagaagtgggcacacagaccgggcgcacgtatgtgggcctgcagaatgaatacaacggcatcatcgatgccgcctctcatccgcagctgtcactgattgctgacagtacccctaatgaagccacccgtggggcactgactgaagccctgcagtcaccgtcagctgcggcatattttgaccggaccgcatcatcagaagcccgcacccgtggccacatgagccagcgggagtttgaggcctttgaagccggcagacggtatgccaacaccgactggcagcaggatctgcagggcatggaaggcgataaccttctccgtgagctgctgcgcaccaccgccctgctgaactggcagatgaacgatctgaaagagcagattcgtcagggtaacgttatcgccgggcagcaacttgcgctggccgcacggcagtattacggacagcgccttggcgaactgtcacaggccatgagccaggggagcgtaagatga

SEQ ID NO: 399296 - DNA, 570 bp, Salmonella enterica
atgaaagacgacaacagcatcgacgaaaaaaaaccggccccccgtctccgccgcatcggtgatatagggataaatctgttcgcaccactggccgaaacccgctggatgctgcgcagctgccgccatatgctggaccagcataaaacgcgcctgaagcgcctcatgcccgaccggcaaccggagagtccggtctgtatgacctgggaggaagcggtcagggccagcggactgacggtcgacgaactggaccggcgtctgcgacgtcgcaggatgttctggcggacaggattctggctgatgatgataccggtacttctgctgtgtggtatggcccttgcggccaccgcactgccggtcatcaccctgatacgtatcctggtctgcctgttactgatgagcaccattgcagcactgtgtgcctcaaaagccctgattgcgtcataccgcctctggcagctgaatgaacgtcgggtcagcgaggacgaacagggcacattccccgattacctgcaggcccggcacggctggaaacaggccacatggctggccattacccaccggcagtactga

SEQ ID NO: 399297 - DNA, 2166 bp, Salmonella enterica
gtgaaaatcatacccagagcactgagtgcaggtctggcgctggctgccgtacctgcacaggctttcgtcacctatcaggacattgtgagtgccgccaccaatccggatgacctgtcgcgccaggcactggtcaccatttttggtgatgtggtcacaaatcccctgacagccagcagcaacaccatcattggcaacctgttcatggtgtttaacgcaattatcgccacgatggggatagtctggtttctgtttattggtatccgtcatgctgtccgcacgggacaccagggcagtgtctttaacaacggacgggacgtcgtcggcatactcagtgtcgtgagtggatttttgatgattgtgcccaccgcttccggctggagtctggcgcaactggtcatgctgtggggcgcatccatcatgggcatcggttccgccaatatcatggttcagacagcggcagaaaacattgctgaaggctattcaatgaccgtacagccagtacatgtctccacccgcacggcagcacggggaattctggagatggaactgtgcaaacacgccatgaatacgggcctcgatgactttaaccgtaccgcacgttcatcaacgccgcccatgagcgaatcctcacggacagagaatggcagatataccgtcaccgtctcaaatggcagcgccacctgcgggagtgtgagtctctccgtgaaaggaaacggcagtaacaagcagtccgcgctggcccattttttcaatcccttcattgaaacggaatatcagggggttctgacggcacagcgctccgccatggataccatgctccgtgacctggacagcgcggcgcaggaatttgtgtcggcataccggacccggcgcgacacgggtaacggcaacctgccggatattgaaagccgtattcagaaggcagccaaccggtatgaagaaacggtgcagaaggcgttgccggcagataacgcagaaactgagcgcagggagcagctgaaatcctacctgaccacctacggctgggttgccctgggcgcctggtaccagacctttgccaccgccaaccagcgactggctgaactggccgaccgtgctcctacagtgagtggcgtctcgtcactgggcgaagccggggatacggaattcctgaaggaagtcaagggggcttaccaggcacagctgcagaactcagcgtatactcctgcactgggaaccgccacctctgccagtgaataccacgcatctaaaactcaagaccctcaatcagcaatcttaaaattgattgggtttaacctaacaagaatgactaactggacagccacttatctgagcggtacaggtaccacaactaatcaactaaatccgttgataaaaatgaaaaacattggcgattacaccatggttacgaccgaaaccatctgggcgggttataccaccgtcagggtactttccacggccggcagcaactccgtttttggtcgactggtcaatgccgtcagcggattatctgacgccgcaaaggcttttctggaagcatccgcaccaccactctacttcctgctgtttttgctgttttgtgccggtttttcgttatccatttacctgccgtttatcccgtttatcttctggatgaccggcatcggcaactggatagtcagcgtactgattggatgtgctgctggccccctgtgggccgccacccatctgggaacaagtcaggaccggggaagccgagccgcttacggttacatctacctgatagacagcatgatcagaccgctgctgatggtgttcgggttcttttttgcatcagtcgccatcgtggccggcggcacaatcctgaatgcgctgtatgctgctgcactgatgaatgtccagataaactctgtgacgggtgtgttcagcatggcgggatttttgatgatttatgcccgcgcctgtaccacactggttgcagccgtttttgcgcttcaggcttatctgcctgaccatgtaattaattttctgggcggacgtgacggtgttaatatgctggggaatatggtttcttcagtcaaagatattattgccggaggtaataccaatatgcgcagaacacctggcgttcgtgaagaaaaactgaaaaatattaatagagatgataaagacggaataaaacaataa

SEQ ID NO: 399298 - DNA, 537 bp, Salmonella enterica
atgatgcttacagaaccatatatagaaacagatattcaagcatatctatatacttatggcagttggctcctattaatactcccatcactctggctatatatgaaaaccagagcgaagaaaaagaaagtccagcaggttgttcagcagataaaagaaagcagtccctttgcgccgaccagcgattatgagcaactgtcattctcgaagagttgttatttcgggatcgacattaaaaacggcaccatgctgtatgtgcgtatttatccaaacaatgtgatggatgtgattggtctggatattcacaactttacccgcacggttgctgaagacggcaagctggaaatccacaccacctatgtgagtctgccgatgattcctcttgagatctccggcatctcagcaaggacgctggccaacaccatgcacaccatggctgcacgtggatatgagtacaaggaacgtttcccacagatgatccggtatcgggttaaagagtgggaaaaagttgccggtgttcctgttgcagaagtattttga

SEQ ID NO: 399299 - DNA, 1587 bp, Salmonella enterica
atgtctgaatcccgcagcaattttccagcacgacatggtactccatggaatactgaagagttacagcgtcttctcgtatccatagcggagggcgtctcgctaaaaaaacttactcaaacacatcaacgatcgtccgggggaatacgtggagcaatcaaacgcctgcttccttctgagtttcttgagttcaacgatataaacacggtgaatgatctcagcaattacttcaacaagattcctcgccaagaacacaatagtatcatcaataatttaatatcattgagcactgcaaaaacaattgctcatgataaagttgaaatacaaaagaatagttttaaacaaaataccccactccccctctgccaacccaatacagattttaaagattatatagccgatgaacatgatgtcattatgctaattcattctgctatcgaaagtttatctaataaacgacatcaatatattcttctaatgcgactcggcacagatgattcacctcattctctggcagatattgccgtcaaattaggaatttcccgtgaaagggtaagacaacttcaggaacgagcccttggcttactagctgctaaatctcgctatgaagggacacctggagcttgccttaaagcccttattaactcaataggtaattcaccatatgatatagcagtatggatttatcgtattgttcatcgggatttcgttacatcctctgacttagccgccaaattcattatttttaccgcaggcattcctaaagcaagacgagatgaaataaaaagttcgctctcattaatatcacaattacaaaagcagaggttacgtgaacgaagagcagaattagcacacgctcgcgctcaggaaagagcccgaatcaagaaagaaagagttgagttcatattcagtaaatggctagacaatacacattggccaaaatatatcgcacctcctccccccgtagaacagctatgttcacagagagcggttaatgatactgacatatctggattcttttactctcaaaaattaggtcgtacagtccagtacgaatcagggcttgagtttaaaataatgaatctattagaatgttgcgatcaggttcttttctatcaagaacaaccattttctattccatattgttttaaaaacaaatcaaaaaaatactatccagatttactcattgcgacagttgatggtcggtgcctacttatggaagtgaagccaacagaccgaatgaccttgagtctcacgagaataaaaagtaatgcaggtcgcaaatgggcacatactcgaggatggggatggttggtcattagtgataggttctcgttacgtcagctggaagaacatgccatctcaacaaacacatggaaacttatagaggctgaactgaaaacatcaaggattttagcatggcgtgaaatgatggagttacgtacacgatacgagattcatcgtttagatcttattgcatatatcattcagtctggtgctgaagtggataacttttatcgaattaccccgaaaatatctaataatacatctaaccagagacaactaaatgagagcgactgtcataattga

SEQ ID NO: 399300 - DNA, 153 bp, Salmonella enterica; identical to SEQ ID NO: 33539

SEQ ID NO: 399301 - DNA, 243 bp, Salmonella enterica; identical to SEQ ID NO: 31061

SEQ ID NO: 399302 - DNA, 369 bp, Salmonella enterica
atgaaagataacaacacaacctccaccccagaagcctggaaaatgcgttttctggccaacgggacatccggcacatggttttacactgacgacattgcagtcactgacgcgtggcttcgcgcgcacccggatgatgtggaggttatccctctctgccggatacagccccgccagcattcccatgaacaacatattgaagaactccgcgcagccctggcccggatgctccatatgcatcatatgatgctggaaaccacacattaccgggaaaatatcaccgatgcccgttgtatccgtgaaatgcatgaagcgccattacaggcgctcaatattctgtccagatacccgcataaaaaggacgaggtgtga

SEQ ID NO: 399303 - DNA, 216 bp, Salmonella enterica; identical to SEQ ID NO: 8252

SEQ ID NO: 399304 - DNA, 252 bp, Salmonella enterica; identical to SEQ ID NO: 8253

SEQ ID NO: 399305 - DNA, 681 bp, Salmonella enterica; identical to SEQ ID NO: 236407

SEQ ID NO: 399306 - DNA, 468 bp, Salmonella enterica
atgataaaatatatcttttcactcaccattattttttccgcttctctctgtgctgcacagattcaggggcacgtcatccgcgttcttgatggtgatacgctggaaatattacaggacaaaaagcctgtcagggtccgtctggctaatattgatgcaccggaaaagaaacagccctttggacgctggtcagccactcagctgaaggacctggtggccggaaagcccgtaaccgtgcaatacgcgcagacagacaggtatggccgtattctcggccgggtctataccgctgacggcacagaagcaaatcgctggcaggtccgtaacggcgctgcctgggtgtacccggactacaataatgactatactctcccgccgctccagcgtgatgcccgcgccctgaagcggggattatgggcagataaaaatccggtaccaccatggacctggagaaaacagaataagaaataa

SEQ ID NO: 399307 - DNA, 177 bp, Salmonella enterica; identical to SEQ ID NO: 8256

SEQ ID NO: 399308 - DNA, 1344 bp, Salmonella enterica
gtgtcttaccaacactcccccacaacagaagacccgatgaacatatggtatatcgttggcaccatatgtctgctctttgcgcttctcatctggctctttttacccgacatcgtctttgccacctgcctgatcctgcacacaatgtgggggatgactgactgggggccttttcaccattttgccgccccccgttacaacctgctggccatcactgctaacaacgcggcaaccatcactttcggccagtggctggatgttatgtcccggacagtggggatcctctggttgattctgcttcccatgacattcggctttctgtggatgtggtttcaccatccggcccagccccgttttacccgcaggccactgaatatccacacactgccccatattttttcagctctgtcaccggcgatcgcccccgttctggctgatggagacaacaacagactcttccacggacaaaaacgtcccgagcgccgtgtcgcactaacccccgaagtctttgtggagcagaacaaccttatccgcaacatgcagctcgatgttgcgtccacacgccagtgcttcatggcgcaactggggcaaccactgaccagctggaaagacatggccccacatgaaaaagcgctctttgccatctttggcctgcagttcttcctcggtgaccggaaagcagcggtagccctgatgaacaacctcaatctctcctgcaggctcaaaagtaaacgggaccaggggcgtttcagcacgccggtgtattcactggccagaaacgcctttatccgggtcatcaaaacagaaggcgcacaacagtggctcaggcagcaccgttacgttcgcagcggtctggtctggctttacgcacatgatttgcgcctgacgcctccgaactggctgtggctcaagggcgttgaccggacgctcttctatgcccttcaccgggcaaacaccacaaaaggcttcatcgaaggggccggcgtggtggccgttgcccgggcagaaaatgaagccagccgtctcggcctcccctgcccggaaccctgtgtggaagaggccattgaagggcttcgacgggacatgctggggctgggcctgatatgggacgaacctcagccagatcgcgatcgtaaacgtcagatcaggacccgctggtcactcacggatgacgtgataccccgccgccatgataacgacgaagacactgacactggtgaaaccaccgaaaccaccgaaaccaccgaaaccaccgaaaccaccgaaaccaccgaaaccaccgaaaccaccgaaaccaccgaaaccaccgaaaaacagcatcccgccgacaaggaaaaagaacaatga

SEQ ID NO: 399309 - DNA, 1125 bp, Salmonella enterica
atgaccatccactacactgcaacactgaataataaacacctgtccctgaccgccctgtaccctgacggtaatcgggaggtgattgccatcctgccggtaacagaactgggcgcactgattaaccgtaataacaggctgatgcacctgtccttcagttccccttttcgcgaaataaccgaaacggtgcttgttgataccgttgatgcagaacgtcccggacatcacatcggcagaatgctctcagcgattgatgcctgcctggatgccgaatatgccggaaaaggaaaacatccctcccggaaatatggcttctggcggacactgatgtgtggctttatcgccggaattgctctgccggcgacagttgcaggttaccactggatgaaggcagagcccccttccacgctggcttaccctaaatctcaggaatggagagctgaaccagtaaccgacacagagacaccacgcccacatacggaacatcatgttaacagcatcccggcccgcccggctcccacacagcaggaaccttcttctgcccccgccccgacggcagtgacggaagaacaacacgttcaggccgctgaggcccgccgtaatctggccacagtacttaaacgcaacgcagaccgggggatgttcaccattaacctgtccactggtcatgaacgcacgctgtacgccttccttgaccccgcatgcatcaactgccgtctgctggaacccgcgcttaagcaactggcccgggaattcagcgtggtgatttatccggtctccgtgattggcggggagtccagtacaaagcggactgctccgctgctgtgtgaaccggactcacaaaaacgggcgaccggatggcatcagctgtattccgctgacagtggtatggcccccaccggcgatgcaccggccgcacaggatggacagtgtctgaccgccgcacgtgctgccatcgatgtcaataaccaggctttccgccagttcggttttggcggaaccccctgggtgttatcagataccggctggcacctgccgtccggcatcctgaaagacgccacttccgttcgcctcttcctgaaagcaacagatagcgaggagtatcacaatgagccagcaccacgttaa

SEQ ID NO: 399310 - DNA, 2301 bp, Salmonella enterica
atgagccagcaccacgttaatcctgacctcatacaccgcacggcctggggaaacccgctgtggaatgcactgcataacctgaacatcattggtctgtgtctggccggcagtatcattacggccctgatatggccactggcccttcctgtctgtctgctgttcaccctggtcacctccgtgatattcacgctgcaacgctggcgatgccccctgcgtatgcccatgacgctcagccttgatgacccctcccaggacagaaaggtcaggcgaagcctcttcagcttctggcccaccctgtttcagtatgaagcagatgaaacatcccccgcacgggggattttttatgtcggttaccgccgtatcaatgatatcggtcgtgagctctggctgagcatggatgacctcacccggcatgtcatgttttttgccaccaccggtggcggtaaaacagaaaccacctttgcctggctgctcaacccgctctgctggggaagaggctttacctttgttgacggaaaggcacagaacgataccacgaggacaatctggtatctctcccgacgttttggcagggaggatgatatcgaggtcatcaacttcatgaacggcggaaaatcccgcagtgaaatcattcagagcggcgaaaaatcccgcccacagtcaaacacctggaacccgttcgcattcagcaccgaagccttcaccgccgaaaccatgcagtccatgctgccccagaacgttcagggcggtgaatggcagtcacgggcgatagccatgaacaaggccctggtctttggcacaaaattctggtgcgtccgggaaggtaaaaccatgtccctgcagatgttacgggaacatatgacgctggaagggatggcaaaactctattgccgtggccttgatgaccagtggccggaagaagctatcgcaccactgcgaaactacctgcaggatgtcccgggattcgatatgtcactggtgagaacgccgtcagcctggactgaggagccccgtaaacagcatgcttatctctccggtcagttctcggaaacgttcacaacctttgccgaaaccttcggggacgtctttgcggcagatgccggcgacatcgatattcgcgacagtattcacagcgaccgcattctgattgtgatgatccctgcactggacacatcggctcataccacgtcggcactcggtcgtatgttcgtcacccagcagagcatgctcctcgcccgtgacctgggctaccggctggaaggcacagatgcacagaccctggaagtcaaaaaatacaaaggcagcttcccctatatctgtatccttgacgaagtcggtgcctactacacagaccgcattgctgtggaggccacccaggtacgttcactggagttttccctgataatgacggcgcaggatcaggagcgaattgaagggcagacctccgccaccaacaccgccacactgatgcagaacgccggcaccaaattcgccggacgcattgtcagtgacgacaaaacggcaagaacggtgaaaaatgccgccggtgaagaggcacgggccagaatgggcagcctgcagcgccacgatggtgtgatgggtgagtcctgggtggacggtaaccagatcaccatccagatggaaagcaaaatcgacgtgcaggatttgatcagactgaatgccggtgagttctttaccgttttccagggggatgtggtgccgtcagcctctgtgtatattccggacagcgagaaaagttgcgacagtgatccggtggtcatcaaccgctatatttccgttgaagccccccggctggagcgtctccgccgtctcgtccccaggacagtgcagcgcaggctccccacaccggagcatgtcagcagcatcatcggtgtactgacagcaaaaccatcccgtaaacgtcgtaaaaaccgtacagagccttaccgtatcattgatacattccagcgccagttggcaacagcgcagacatcactggatctgcttccgcaatatgatacagatatcgaatcccgggcaaacgaactgtggaaaaaggctgtgcacactatcaataacacaaccagggaagaacgccgggtatgttatatcacactgaatcgtccggaagaggaacactccggtcctgaagatataccttcagtgaaggtgattctgaataccctgctccccctggagatactgttaccggtcgctgaaaataataaatcgcagacaataaataatgatcatccccagaaatcatgtggagcacaaccaacaactgacgaaaaatactga

SEQ ID NO: 399311 - DNA, 2721 bp, Salmonella enterica
atgaatgccatcattccgaaaaaaagacgtgacggaaagtcttcctttgaagacctgattgcgtacacctcagtgcgggatgatgtgccggaagatgaactcagaccagacacggaagtgaaaggtgaggttccgcaccggaatcgcttcagacgtcttgttgattatgcaacacgtctgcgtaatgaaaaatttgtttccctgattgatgtgatgaaagacggcagtcagtgggtgaatttctatggtgtgacctgctttcataactgtttatctcttgaatctgcggctgaagaaatgcagaaagcagcagaccttgctcatttttccaaagatgatacagatcctgtttttcactatattctctcctggcctgcgcacgaaagtccgcgttctgagcagctttttgactgtgtgcgtcacaccctgaaatcccttgagctgtcaaaacatcagtatgtggcagccgttcatacagacacggataacctgcatgtacatgttgcagtgaatcgtgtccaccctgaaaccggctatatcaattgccttccgtggagccaggaaaaactcagtcgtgcatgccgtgaacttgaacttaagcacggattcgcgccggataatggttgctttgtacatgcaccgggcaatcgtattgtgcgcaaaacagcgctggtacgtgagcgccgtaatgcctggcgacgcgggaaaaagcagacgttcagggaatatattgctcagatgtcgattgccgggctgcgtgaagagccagctcaggactggttatctttgcataaacggctggccagtgatggtctgtatatcacgatgcaggaaggggaactggtggtgaaggatggctgggacagagcgcgggaaggtattgcactcagttcgttcggaccgtcatggacagctgaaaaactggggcggaaactgggggaatatcagcctgtaccgacagatattttcagtcaggtggaggcacccggtcgttatgatccggaagccataaacgttgatatccggccggaaaaagtggctgaaacggagagcctgaagcagtatgccagtcgtcattttgccgaacgcttaccggcaatggcgcgcaatggtgaactgaaaagctgcctggctgtacaccgtactctggcagaggcgggattatggatggggattcaacacgggcatctggtactgcatgatggatttgataaacaacagacaccagtacgtgcagacagtgtgtggccgttaatgacgctggattatatgcaggatctggatggtggatggcagcctgtaccgaaggatatttttactcaggtcgttcccggagaacgattccggggacacagtattggctctcagcctgtcagtgattacgaatggtatcgtatgcggatgggcacaggtccgcagggggctataaagcgtgaactgttttctgataaggaaagtctgtggggatacggccttattcagtgcaggagcctgattgaagagatgatagctgacggggatttcagctggcaggcatgtcatgagatgtttgcgcgtaaagggcttatgctgcagaaacagcatcatggtcttgtgattgtggatgcgtttaatcatgagctgacaccggtgaaggccagcagtatccatcctgatttgacgttatcccgtgccgagcctcaggccgggccatttgaaattgcggctgcagatattttcgaacgggtgaagcctgaatgtcgttacaatccggaacttgctgccagtgatgaagtggaacccggcttccggcgcgatcctgagattcgtcgtgagcgccgtgaagcccgtgcagctgcgcgggaagatttgcgtgcgcgttatcttgcatggaaggagcactggcgtaaacccgacttacgttacggagaacggttacgggaaattcatgctgcctgccgtcggcgcaaggcgtatatccgtgtgcagttccgggatccacaattgcgtaagctgcattaccatattgcggaagtgcagcgtatgcaggcgctgatcaggctgaaggagagtgtgaaggaagagcggttgtcactgattgcggagggtaagtggtatcctttgtcctaccggcagtgggtggaacaacaggcggctcagggagacagggctgcagtatcgcagttacgtggctgggattatcgtgatcgtcgctcgcgtaataaggataaaagacgcacaactaatgttgatcgttgtgtcgtactctgcgaacccggaggaacgccactttttaataatgttgcaaaacttgaagctcgtcttcagaaaaatggaagtgttcatttcagggatacgcggacaggaaaaaatgtctgtacggattacggagatcgggttgtgttctaccatcacacggaccgaaatgaactggcagagaagcttaatttaattgcgccagttctgttcagccgcaacggaaagcttggttttgagccggaaggttcataccagcagtttaatgatgtgtttgcagaaatggtggcctggcacaatgcagcgggaataaccggaaacggacacttcaccattactcgtccggacgtggatttgcaccgtcaacgcagtgagcagtattaccgggaatatatcagacagcagacccgtttatcggagagccatgatgataattatacgttacggcaggagaaaacatgggagccaccatcacctggaatgtaa

SEQ ID NO: 399312 - DNA, 333 bp, Salmonella enterica
atgagtgagaagaaaacccgaagtggcagtgagaaacggcaaaagaatgtcctcattgctgttcgtttttcaccagaagaggctgagattgttaaagaaaaggcagaaaaaaacggactgacagtttcaactctgataagaaaaactgtgctgggaaaacagataaatgcccgcattgacgaagattttttgaaagagctgatgcgtcttggtcgcctgcagaaacatctgtttgtggaaggaaaacgcacgggagataaagagtatgcagaggttctcgttgctattacagagcttgctaatactctgcgaagaaatttaatgggacgctga

SEQ ID NO: 399313 - DNA, 390 bp, Salmonella enterica; identical to SEQ ID NO: 8270

SEQ ID NO: 399314 - DNA, 1347 bp, Salmonella enterica
atgccaatgatacttgtaaagaagaatccccggggcaaagtgattcgggagcttagcagtgaggaagagactgcagtaaagacggtctgtggactgaaaaagccagcaaccatggcactacataacctggccaatgatattctccgggaaatgcgtgagtatgatgcatggttacagtgtgactgtattccgggagattcgccggccatgaattttgctgctcttaaaaacaatacgggtactctttatctgtccagttttaatcatgagcatgcacctgaatgccccatgtatcgtcagttatccggaaatgaagaggaaacatcttccggagcaagccggcatcccgttagcacccgtataaattacagaaactttttaccacctgatgacagtaattctgttatcagactgcaggcccgctctgcttaccataatggtgagagctcctccgttcgcaagaaacgtccgcgccttgcccgtttactcctgtctcttattgacgatgctgggctgaataaactggattccctggctaatccccgtatccggactaattatcgtgagtgtcttgatgccatacggcaggttacactgcagcaggagtatattcggggaagatccttatctgaaattatccatttccggcctggaatgtctgaaaggtctcaggagcggttaatggaaacgctggagaattcagaacgacactggcctgccagaagaaaacatatgttctttcagatttttatggcgcagcacatctgtcgtgatgctgtggaaattcactgggcgaacggtaatattcaggtcatcagacctgtgcgggggatcagtattaatggtgaagcgcagggcggaatacgtcccccttactgggttattcttgctttttgccggagtgccgatggcagaatcatctgcagtgaagggtatgctcatgctctttatcaactgacatgtccggtgcctgtggacagcaaactggaacgaaacacgctcactgctcttctgaatgtggccagctggcttaaaagaaagccaggtacgccggaattaagtctggaaaggcccctgtttgatacagaagtttatgttaatggtgaaaagaaatatgtcctgccggatttcattgtcacagcaagggctcctgacggaaagacggccagagtggtcatcgaaacgatgggatatgaagacagtgattactgcgcgagaaaatccaggcagcataccggcatgaagcagattggtgttctgcataccgatccaccgaaatggctggataacgatcatcccccttttgagaaacatatgtacggtgtttttatgcatctcaggtactga

SEQ ID NO: 399315 - DNA, 642 bp, Salmonella enterica; identical to SEQ ID NO: 236363

SEQ ID NO: 399316 - DNA, 663 bp, Salmonella enterica
atgaccattctatcccaggaaaaccctgtcattctgttactggagaatatgctcgaagcactctccaccgccccggacaacataaacaacgaacggcgtcgccggcgttacctgctgaactggcttgacactgcccgccagatgcgcgagttcagaggaatggctgaagagttcactaccctgcgaaaactgctggccaccaattcagacataccggtagcaaacaccctgaaatcactgctggaaagtggcaataacgcagcattatacgacctgtaccgcttccgctcggctcttgccacgtgcaggagtctgggatggcagattggcacgtgcgcatggaatgaccagttactgagtgagacactttcccgcgcacagaccgggaaacgtcatatcctgcagctgaacagcaccggggacaccttttccaccacgggcagaatgatcagaccggtggcattttcattaatccatccggccaccatcaacacgtctgaggttgaagagatattccgggatgaaggttttatgctcgcacacgggcgcgaatgcagtctgaacggcagcggcagaaatatgctgtcacgcattcttcatgtgggccattcaggtttagcggaagaggaatggggcatggacaacagtctgcttttacactga

SEQ ID NO: 399317 - DNA, 621 bp, Salmonella enterica
atgacactgacgttacttaccgcgtataacgcaccctatctggcagccctgacttttgttctgcttactggtatcgctgaacttatcgccctgctctgcggacactccctctcttcagctatggatacacctgatttaccggagggtctgacaggagaggcgctggactggctgaacatcggacggatccccctgctgatcgtcctctgtatgctggcaggtttttttggtatatccggcattctcctgcagggtcttattattcatctgctgcaggctcctgccccgaacattctccttacaccactttgcctgctgctgacatgtcctctcgtacaccgcaccggcagactgattgccccctggttaccccgtgatgaaacaacggcgctcaccgaggaggcattcatcggctgtatggccaccatcaccggttatcacgcagtggcgggttccccctgtgaaggtcgcttcacagaccgcttcgggcaggttcattacctgttgctggagccggaggccgggaaagaattcagacgaggagacaaagtgattattgtctgccgtctttccggttcctgctggctgggcgaactgaatccctggccggatgttctttaa

SEQ ID NO: 399318 - DNA, 1695 bp, Salmonella enterica
atgtttaatcttccgggatggttgtttaccgttatagcgctggtcctcaccctgttcgttatcgggctgatatttgcccgcctgtaccgccgggcatcggcagagcaggcctttgtccgcacaggtctgggaggccaaaaagtggtaatgagtggcggtgcaattgttatgcccatttttcacgaaacaattcccgtcaacatgaacaccctgaagctggaagtcagtcgtgcagcggctgaaagtctcataacccgcgaccgcatgcgtgttgatgttgccgttgccttttttcttcgggtaaaaccatcagccgaaggaatatccactgcagcccagacgctgggacaacgcacgctcacacctgaagatctgcgtagtctggtcgaggataaatttgttgatgccctacgggccacggcggccagaatgagcatgcaggatttacaggatgcccgcgagaactttgttcagggtgtgcagaacaccgttgcggaagacttatccaaaaacggtctggagcttgaaagtgtgtcgctgacaagtttcaaccagactgcacgggtacattttaatcctgacaatgcctttgatgctgaaggcctgacccttctgacccaggaaacagaacgtcgtcgccgcgaacgcaacgaagttgagcaggatgttgaagtggccatcagggaaaaaaaccgggatgcactctcccgacgtctggagattgaacagcaggaagccttcatgactctggagcaacaacaacgggtaaaaacccgtacggcagagcagagtgccagtattgctgctattgaagctgaacgacgtcgtgaagcagaatccgcgcgaattctggctgaacgtaagatagaggaagccgaaatcgaacgacagcagatagtgcgtacccgccaggtcgaagccgaacgggaagtggccatacgggaaattgagcaacagcaggcaaccgaaatcgccagccaggccagagccattgccgtggcggcaaaatcggaagagcagtcacaggcagaagcccgggcaagtaaagcactggctgaggccgtacaggcccagcaggatgtggaaaccacccgccagactgcggaggccgaccgtaccaaacaggttgccctgattgctgctgctcaggaagctgaaacgaaagcggttgaactgacggttcgcgcacaggctgaaaaagaagcagccgaactccaggccgcagcaattattgaactggcggaggccacccgtcagaaaggtctggcagaagcagaagcacagcgcgcactgaacgatgccattaacgtgctttcggatgagcagaccagcctccgcttccgtcttgccctgctggatgcattacctgccgtcatagagaagtccacagaaccaatgaaatccattgacggtattaaaatcattcaggtggatggtctgaatggcggtgttacccgcggtaaaacagcaacaaccgacataagtggcggaaatctcgctgaacaggcagtaaccgccgctctggcttaccgtacacaggctccgctcatcgactccctgctgaaagaggtgggtttatccggtgaaggacttacagccctgacacgtccactggtcatgcctgccccggaaaaggttccggatgtcagcgaaccggtaaccgctccggataactcagaaccacaacaggtttaa

SEQ ID NO: 399319 - DNA, 243 bp, Salmonella enterica; identical to SEQ ID NO: 8218

SEQ ID NO: 399320 - DNA, 243 bp, Salmonella enterica; identical to SEQ ID NO: 375752

SEQ ID NO: 399321 - DNA, 243 bp, Salmonella enterica; identical to SEQ ID NO: 373967

SEQ ID NO: 399322 - DNA, 162 bp, Salmonella enterica
gtgacgcaggatgttacctcgaacgatctggtgacgttatacggcacaacatttaactccagcggactgaaaatgcgcggtaacttacgcagcaagaacgccgagctgattgaaaaggttagaacctcttatgaaattcaaaacaaacaaactcagccttaa

SEQ ID NO: 399323 - DNA, 264 bp, Salmonella enterica
atgctagccttttactcttatacatataatacactggcaatccccaaaaaacagttagcgagaacgataaaattagtccgtataaaataccaactattccataatgctctgcaaaataccattgagtcacaccaccaattaatgcctgacacgaaaatattgggccagataggaattatttatctgcagttaatatggggactggagattattgttggattttcggaagtgatgatattcttacaaaaaattcccttgcattga

SEQ ID NO: 399324 - DNA, 141 bp, Salmonella enterica
atggcacaggcggtaggctttcaaatgaaacaggttggcgaagcagttaaccgttatattagcattcgctataataagctttccacactgtcatcttcacgcagtcaaagtagcgatccgggaccaagaacctgtacctaa

SEQ ID NO: 399325 - DNA, 519 bp, Salmonella enterica
gtgcgccgggctggtggtgtaggagagtgtgccctgggcgtgcgcgccgtggctgcgtactgcctgcagggcggctttcatattgcgcgggtcgttcatggcatcgaagacgcggaacacgtccatgccgtttttcactgcccgctcaacgaagcgttccaccacgtcatcggcgtagtggcggtagccgagcaggttctggccgcgcagcagcatctgcagcggggttttgggcatggcttttttgagctcgcgcaggcgcagccacgggtcttcgccgagaaaacgaatacaggcgtcaaaggtggcgccgccccagcactccagcgacccgtagcccacgtcatcgagcgcggcggcaatcggcagcatatcgtcaaggcgcaggcgggtggcgaacagagactggtgagcgtcacgcaggacgacatcggtaatggcaatggtcatggatccctccgggaattaagcattaaggcggtgatggtggtggatagcggcggcaatgaccggctttaa

SEQ ID NO: 399326 - DNA, 1029 bp, Salmonella enterica; identical to SEQ ID NO: 386156

SEQ ID NO: 399327 - DNA, 348 bp, Salmonella enterica
atgtcatttaccaccactattgagaaacgtgcggataaccgcattttcgccggtaacgatccggcacataccgcaacgggagtcagcgggataacggcggccacaccgatgctgacgcccctgatgctggatgataccaccgggaaactggtggcctgggacgggcagaaggccggaacggcggtcggggttctggcccttgagctggacgggtcggaaaacctgctgacgtactggaagagcggcacctttgccacagaatcactggcatggccgaagagtgtggatgccattaagcaggcaaatgcattcgccggaagcgccgtcagtcacgccgctttaccgtaa

SEQ ID NO: 399328 - DNA, 1497 bp, Salmonella enterica
gtgcaacgtaatctctcgcacatcatcagccaggcaaccagtgctccgttgctgcttgaacccgcctatgcgcgggttttcttttgcgcgctgggcagggagtcaggcattaacagcctgcacattcccggtaataacgaaagtctggatcagtcggatatggcactggtcacaggcgattttatggcgaccggaaagccgcaggcacgtttttatcaggtagtgaacggtattgcggtattacccgtgaccggaacactggttcataaactcggcggaatgcgtcccttttcagggatgaccggatatgacggtgtcactgcccggctacaacaggcggtttcagatccggaggtaaaaggcattctgctggatattgacagtccaggcggtcaggctgccggggcgtttgactgtgctgacatgatttaccggatgcgcgaacagaaacctgtctgggcactggcaaatgaaacagcctgttcggcggccatgttgctggcggcagcctgttcgcaccgtcttgtgacccagacgtccagaatgggatcaattggtgtggtgatggcgcataccagctacgccgaaaaactgaaacaggaagggatcgatatcacccttatctattctggcgcacacaaggctgatctgacgcccagccagaaattaccggaaagcgtccatgccgactaccagcagcgaatggacgaggccagaaagatgtttgcagaaaaagtggcccggtacacggggttgtctgtcgatgcggtaatggcgacggaggcggcagtgtatgacgggcaggccattatcactaccggactggcagatggaatggtgaatgctgctgacgccatcggcgtgatggcagaagctatcaacagtaacaagacaggaggcactatgcctgaattaagtgcagctgacgctgtcacgcaggaaaaccagcgcgtaatgggaattctgggttgcccggaggccagggggcatgaggcactggcacagatgctggccgggcagccgggaatgagcgttgctcaggcgaagtctattctggctgccgccgcgccggcggacacgaccagcaccgctgaccgtatccttgccctggaagaagctggtggtcgggaaacactcgcacagacactggcggccatgccggagatgacggtggaacaggccagaaccattctggcagcatcgccgatcgctgcggcaacgtcacttcatgatgccgtgatggcgcttgatgaggcgaaaggccgtgaagagttggcggaaaaactggctgtcatgcctggtatgaccacagatcaggcccgtgacctgctggctgccgcgccggacaaatccggtaatgcggggctgagcatgaacaacgcatttgatgctttcatgcagtctcattccccgggccccatatccggcggtaaagaccacagtaatgataccgaaacgacgttgttgatgagtattcccggtacttcagccacctga

SEQ ID NO: 399329 - DNA, 546 bp, Salmonella enterica
atgaacgtgaataaaaaaaaactggctgaaatttttggttgtgacgtcagaactgtcacagcctggcaaagccaggggctgccacttgtttccggaggaggaaaaggtaacgaagcagtgttcgacaccgcggcagcgatttcatggtacgcggagcgtgatgcgtctattgaaaatgaaaagctgcgtaaagaggttgatgatttacgtgccgctgcggaatcagatcttaatcccggcaccatcgactatgagcgctaccgcctgacaaaagcccaggcggatgcgcaggaacttaaaaatgctgagcgcgaagggctggttcttgagaccgaactgttcacctacatcctgcaacgggtggctcaggaaatagcagggatactgtcaagggtaccgctggtattacagcgcaaatatcctgatctgtgccagtcgcacatcgatgtggtcagaacggaaatcgccagggcgtcaggcagggccgccacgatagcggatgtggagaagtggaccgatgatttccggagagcgcagggcgaataa

SEQ ID NO: 399330 - DNA, 303 bp, Salmonella enterica
gtgttcgtaatcagggttacggtcagtcttattgccaccgccagcgttggcgccgctttcagtgcgttgaatagccgatacacggttgcctttcgcccactccttaacgagcaaaccgcgatcgatatgctccgtctcgaaccatgttttaaggaactggataacagtcgccagttcaggagtttttccatcgacagggaatatttttttaacggcattcactattttgtgaatgtcatgttcaatggctttcttgaacgcttcaacattctcggcggcaagcagcaggttctggacatatga

SEQ ID NO: 399331 - DNA, 696 bp, Salmonella enterica
atgctgatgacgaggcggctgttgcgctggccgctgctgtacttgctgacgttgctgcatttgtctcagatgttttcgctgcggctgccgatgcggctgccgccttttccgacgctgccgccgcagtggctgacgcacctgcatcaccggcactggaagccgcctgcgtttctgacgtcttcgcggcggtttcggatgctccggcgcgctctgctgatgtctgcgccgccgtcgcgctggcggctgcggcagcagctgaatcgccggcggcagtacgggaggcatctgcattcgcttcagatgttttcgctgcggctgccgatgcggctgccgccgttctggctgtgtcagccgacgccgcgctggctgatgcctccccggcttttgtggtcgccgtacctgcgctgctctccgcagatgctgcggatgaggctgcctgtgtggctgatgcttctgccgctccggctgcattcactgctgccgtggcgctttccgatgcctgacctgctgatgtctgcgcctgttcagatgcctgccctgcggcggtggcattccgcgatgcctccgatgcctggcgggcaacttcttccaccatcgcctcaaaacgccgcagcgcctccgggcggacgtcgtcttctgtcatggcccccagaaaatcattcagggtgcccggctttgaatcatcgtaaaccgtaa

SEQ ID NO: 399332 - DNA, 243 bp, Salmonella enterica
atgactatgtcgcgcgtaatttcgctggcggcagggctttccctgtccgttttattttccactgctgccgttgccgataacggaagaggaagcggcaacagcaatattgaaaaccagacccggatttataccggcaccgaccgtgggcagaaacagcaccgcgaggcaaagggaaaaacaatcacgcggagcgtccagtgttctctgccggcatatttacgtgacccggataatcagtgctga

SEQ ID NO: 399333 - DNA, 555 bp, Salmonella enterica
atggtttcccgtaaaccaacgtattcgataagaccgtcaacgctttttcctgacagcgccgtcagtgtatcgtccagcggctgcttgcccgccagtttattcagtacagtggtggcaaagttcggatcgttacccagcgcgtcagccagttctttcagcgtgtccagcgtttccggcgcagaaccaaccaactgtgctactttcgcagccacaaacgctgccgtggcaatttcaatacctgcagctgtggtttccggagttggtgctgttggcgtaccagtcagtgccggactgtccagcggggctttagcctgcacctcacctataacggtttttaccgcctttggtgtggctgccagcgcttcgctgtcactgtccgtggcactgcttaacttaacgataccttttttcgtcaggctggcatcttccagggaaatcacgtccgcgatgtcttctgcccgttttgcggcatcttctgctctggtggctgctgctccggcagcagtactgctttgcgccgccagtgatgcgctggtatcagatgcggcggcgtga

SEQ ID NO: 399334 - DNA, 1086 bp, Salmonella enterica
atgaccgccacacgcgacggcgtgcggggaaaagacaagctcgacgtgccgatcaaatttttgtggtgctacgccagtaatacgctgatcaatcagcatggcgatatcgcccacacccacgaggtgcttcaggacgacagtaaatgtgaaatgatcgtcggcatcgagcactttatgaccgcgtcggcaaaatattgcgacattctgctgcctgatttaatgccgaccgagcaggaagatctgatttcccacgaatctgcaggcaatatgggctatgtcattcttggtcagcccgccacctcgccgaaatttgaaagaaagcccatttactggacgctcagtgaagtggctaaacggcttggtccagacgtataccagaccttcacagaaggccgcacgcagcatgagtgggtcaaatacctgcacgcaaaaaccaaagcgcgtaacccggaaatgccggattacgaagagatgaaacagacagggattttcaagaaaaaatgcccggaggagcactacgtcgctttccgcgccttccgcgaagaccctgccgccaacccactgaaaacgccgtccggtaaaatcgaaatctattccgagcgtctggcaaccctcgccaacacgtgggagctgaagaaagatgagattatccatcctttacccgcctatacgccaggctttgacggttgggacgatccgcttcgtcagcgctacccgctacagctaaccggcttccactataaagcgcgtacccactccagctacggcaatatcgacgtcctgcaacaggcgtgtccgcaggagatctggatcaacccgattgatgcgcaagcgcgcggcattcagcacggcgacaccgtgcgggtctttaaccagaacggagagatgctcattccggcaaaagtcacgccgcgcatattgcctggcgtcaccgctatcggccagggcgcctggttaaatgccgacatgtttggcgacaaagtcgatcgcggcggctccattaacattctgacgtcgcaccggccttccccactggcgaaaggtaatccgtcacacagtaatcttgttcaggttgaaaaggcgtaa

SEQ ID NO: 399335 - DNA, 834 bp, Salmonella enterica
atgaaaatgagtttttatgccatttattatagcaatggaaaagataactcaccatgtaacctttttgaatcactttcttcacaggtagtcgaaaagaaaggtaacgcccttgaagttgacgattatttcgttttcgcccatcacattattgacaaaagctttttattaacaaagacatatgattctgcctttgtaaaaagggtaaacaagaaaacattttctattgatgaaatgaagaatgctttgggtaatgatgaaacccttgctttcccttcctttcttttagtgaaagacaacatcatcggttatgcatcatctctacacggccccagaaccagagatctgcagatttatctttccaataaattggatattccgatgggcttcaaactttgtattgaacctctgatgcgtgatgttagtaaagatgatgctttagaaatgcagttcatcggtagaaccacgcttagggtggaaagcgggtctaagctgttcagccctttgcttagagcaacaggtattgaaactattgaagaagaacttttagacggtattgagatcacgctaaagccgaagagagcaagaaacattcgagacatggcgaaggaactcattaaaaacgccgatgacagccatagcgatatactcatcaaaggcaaagagcaagcagccgatcttcttacggaatactacctgtctaataaaggacatctggcagctaatctgtacaaatcgacaaacgaagatatcgctgaagagatggaaacatgcttcataagaatgaagtctgttataatgaaaagctataacgatgcatttgatagtgagctttaa

SEQ ID NO: 399336 - DNA, 444 bp, Salmonella enterica
atgtcacagaaccacaaagtcatgccaggtgtaattctttttgcattgccatactttcctgttattgcagcttattttgcattcagatacttgtttcctggcgtttcgttctctgaacatagagacgcgcttggagcggctatagcttcatacgcaggcacaacgatcgcaattctgatcgctgcgttaacgtttgtaataggtattggtggcagaaacatgcataaggtaaagtcttatggatacatgacaactgtcatcataatgtacgctcttacctttgctgagttagggattgttttctttatggggctttttctcatggctaccagcaaagaaccgattaattttctcccgactctgtcaattggtttcgcggctacttcattgatgcacattagtttgcttttagtacaactgttcaacttctccaagaaaaagtaa

SEQ ID NO: 399337 - DNA, 312 bp, Salmonella enterica
atggacgttttcttggaaaagctaacattgacacgaaaggaagctgctgaactacttggtatctctacggctaccgtaactcagtgggttctggaaggcaggcttaaggcttaccgtgtcagcagcagacctaaatcaccgtatctgttcaccagagaagattgtcaggctgcgctgttagcagtggaagtcgaacctaccaagctcagggacaaagagcgaaaagttgaagctgaggtggcgttcactcgtagccagaaagaagtgaatgaaaaattgcgtcggatgcttaacatgcctgaaaaagaatga

SEQ ID NO: 399338 - DNA, 741 bp, Salmonella enterica
gtgatgaaaaaagtttttgcgtctctgtttatatgcttggttcctttctcagctatttctgctgttaaaaacatcacatttagcgataacgaaaaggtcatggttaagcatctttttaaatatgaccttcaaaagttcatcaattccgacgcccatatgttttcttacgcaacagttatcgcttccgctgaaaagattgcagaggattatgatgcaaacgaagccaggggggacagagattataagggaaaacctattgttatttctggcgtggtcgaaaaaataagatccacaatgggcgacgttccagcagttgagttaaaaactaatgtgggtattcaaggggtttctctatacttcactaaagaaaacgagaagcttgcgattgatttgaataagggcgataaagtcagttacgcctgcataggtgatggttcagtattaggcgaccctgttcttcgcggttgtatgccaacagatgagtacgtggatacagcatctgatgctatgtataaagactcaatggcgatgctaaaggatattaaagaccctaaatcagacgctaatacttttattttatttactaaaatgattacaaggttaactgataattataaattatgcgcagccactgatgcgaaatgtatcgttaatataattgatacaacacctatggaaaaacgaaaggctatggccagggaaatgtccaaagagcttggtgtcaatgtcagcgtaaaatag

SEQ ID NO: 399339 - DNA, 351 bp, Salmonella enterica
atgaagcgtatgaagttagttctgacagtttcgttaatgttctcctgctctgcggctttcgctgatttgcaatgcggcggatatcgacttcatgcagctgataacggttggacgaaaattaacggcgagcaagttacatcacaaaaaatcaaatttcttggtaagaaagatgattgggacaacgttaaaacggatatggggctgatgcctgcacgcgacggtaataactatggtttcgaatttgttaagcgtggtggaaaatcgttcctcaatgtccaactacttcaaaatagtatggatgccccaaagatcattggttcttacccatgctcacaaattaaggataaatga

SEQ ID NO: 399340 - DNA, 141 bp, Salmonella enterica
atgaaaccagaactgatcgagatactccgcgcgcgctggcagcgccttcgcatttaccgccgtccggggtcggtgttggttgactaccgcatcctgcgcaattttgttcgtatttatcagttcacaggatttactcaatga

SEQ ID NO: 399341 - DNA, 588 bp, Salmonella enterica; identical to SEQ ID NO: 381791

SEQ ID NO: 399342 - DNA, 165 bp, Salmonella enterica
atgatggcggggaaaatccccgctttttttctgccggtccccggacagagcacaaaggaagtcgccgccggctccgctttacccggccatgcaggcatggccttgtgggttttcagttatgtggccgccgtgtcgtgtgcgggctgtgccgtgcctccatcttag

SEQ ID NO: 399343 - DNA, 579 bp, Salmonella enterica
atgaacaactcatggtggcaggagttaatgcgttttttcctgcaaggaatgacacttaaacagttgattcatatgctaatcatcctgatcgtattgattattgttatgccggtaagcgtaaaagaatggataaacctgcataatccagaaatacttcctcattactggatgtattacatcctgttgttctgcgttagctatgtgcttaacggtgttgttaattccgtttatcacgctgttactgaaagaattgaggcatcaactgctcagcggcgtaaggacagagaagaaaaagtcgttcgggatttgtttgattcgttaactcttggagaaagagcgtatttggcattcgctgtagccgctaataaccagctaaagacagaaaagggaagccctgaagcaatttcattgctcaaaaaagggattatcactcgattgccttctgctattggatatcctgatattgaccgttttattatcccggaaaagtattttaatgagtgctacatgagatttgccgggaagtcagacattcttatgaatgaacttattgtacaggacgaacagctcaaaaaataa

SEQ ID NO: 399344 - DNA, 696 bp, Salmonella enterica; identical to SEQ ID NO: 399331

SEQ ID NO: 399345 - DNA, 696 bp, Salmonella enterica
atgctgatgacgaggcggctgttgcgctggccgctgctgtacttgctgacgttgcagcgtttgtctcagatatttttgctgcggctgccgatgcggctgccgccttttccgacgctgccgccgcagtggctgacgcacctgcatcaccggcactggaagccgcctgcgtttctgacgtcttcgcggcggtttcggatgctccggcgcgctctgctgatgtctgcgccgccgtcgcgctggcggctgcggcagcagctgaatcgccggcggcagtacgggagacatctgcattcgcttcagatgttttcgctgcggctgccgatgcggctgccgccgttctggctgtgtcagccgacgccgcgctggctgatgcctccccggcttttgtggtcgccgtacctgcgctgctctccgcagatgctgcggatgaggctgcctgtgtggctgatgcttctgccgctccggctgcattcactgctgccgtggcgctttccgatgcctgacctgctgatgtctgcgcctgttcagatgcctgccctgcggcggtggcattccgcgatgcctccgatgcctggcgggcaacttcttccaccatcgcctcaaaacgccgcagcgcctccgggcggacgtcgtcttctgtcatggcccccagaaaatcattcagggtgcccggctttgaatcatcgtaaaccgtaa

SEQ ID NO: 399346 - DNA, 801 bp, Salmonella enterica
gtgcgcgaggacctcggctttatcccgctggtgacccccacctcgcagattgtcggcacccaggcggtgctcaacgtgctgacgggcgaacgctacaagaccattgccaaagaaacggccggcattctgaaaggcgaatacggccacacgccggtgccggtgaacgccgcgttacaggcccgcgtgctggaagggggcgctccggtgacctgccgtccggcggatttactcaaaccggagctggctgaactggaagcggacgtcaggcgtcaggcgcaggagaagggcattactctggcgggaaacgccattgacgacgtgctcaccgtggcgctgttcccgcagattggcctcaaattccttgagaaccgccacaacccggcggcgtttgagccactgccgcaggcggaagccgcgcagccggtggcaaaagcagagaagcctgccgcttccggtatctacaccgtggaagtggaaggcaaagcctttgtggtgaaggtcagcgacggcggcgatatcagccagctcactgcggctgttccggcggcctcttccgcaccggttcaggctgccgctcccgcaggcgccggcaccccggtcaccgcgccgctggcgggcaacatctggaaggtgattgccaccgagggccagacggtggccgaaggcgatgtgctgctgattctggaagccatgaagatggaaaccgaaatccgcgccgcgcaggccgggacggtacgcggtatcgcggtgaagtccggcgatgcggtctccgtcggcgacaccctgatgacgctggcgtaa

SEQ ID NO: 399347 - DNA, 546 bp, Salmonella enterica; identical to SEQ ID NO: 386151

SEQ ID NO: 399348 - DNA, 204 bp, Salmonella enterica; identical to SEQ ID NO: 386153

SEQ ID NO: 399349 - DNA, 1620 bp, Salmonella enterica
gtgcaatggtcgccgccgggcacctgtgggggtgagactgtgaagcgcaccccggttctggtggatgttcacggcacgccgctgcgggaaagtctgggatacaccggcggggggatcggtttcggcggacagatggctgactggatgcccccggcggaaagcgtggatgccgcgctgctgccttcgttgcgcctcggcaatgcgcgggctgatgatctggtccgtaataatggtattgcagcaaatgcggtggcgctgcacaaggatcatattgtcggacacctgtttcttatcagctatcgtccaaactggcgctatcttggtatgcgtgagagcgcagcgaagagttttgtggatgaggttgaagctgcatggacagaatattgcgatggtatttttggcgaaatggatgccgaggggaagcgtacttttacagagttcatccgtgaaggcgtgggcgttcacgcctttaatggtgaaatttttctccagcctgtctgggacgctgaaaccacgcaggttttccgtacccgattcaaggctgtcagtccgaaacgggtggacacgccggggtatgcccgcggaaaccgccagcttcgcgcaggagtggaaacggaccggaatggaaaagccctcgcctatcatgtctgtgatgatgactggccggtggctggtggggaacgctggacccgtattcctcgttttctgccgtccggacgacccgcgatgttacatattttcgagccggttgaggacggacagacgcgcggtgccaatcagttttacagtgtgatggagcggctgaagatgcttgataccctgcaggcaacgcagcttcagtccgcgattgtcaaagccatgtacgccgccacgatagaaagcgaactcgattccgagaaagcctttgaatacatcacggcggcagataacaaagatacgcctcttgttaacatgctggcaaattatgcccgctattacagtaccaacagtatcaaactgggcggtgtaaaaattccccacctgtacccgggtgatgagctgaatctgcagactgcgcaggattccgataatggcttttcagcgctggagcaggcgctgctccggtatattgccgccgggctgggggtctcttatgagcagctttcgcgtgattattctcaggtcagctattccagcgcccgcgcatctgccaatgagtcctggcgctatttcctggggcggcgccggttcattgccggacggctggcgacacaaatgttttcctgctggctggaggaggcgctgatacggggagttatccgggcaccccgggccaggttttccttctgggaggcccgatccagctggagccgctcggagtggattggtgccggacgtatggcgattgacggactcaaggaggttcaggaatccgtgatgcgtattgaggccgggctgagtacctatgaaaaagaactcgccattatgggcgaggattaccaggagatattccgccagcaggtcagggaatccgaagaacggcgggcagccggactttcgcgtccggtatggatcaccgatacctatcaacaacagatcgcggcgagccgtcagacggaggaggaaaagcgtgcaacgtaa

SEQ ID NO: 399350 - DNA, 1497 bp, Salmonella enterica; identical to SEQ ID NO: 386155

SEQ ID NO: 399351 - DNA, 348 bp, Salmonella enterica; identical to SEQ ID NO: 399327

SEQ ID NO: 399352 - DNA, 1029 bp, Salmonella enterica; identical to SEQ ID NO: 386156

SEQ ID NO: 399353 - DNA, 2046 bp, Salmonella enterica
ttgtcagtcacccttgatgatgccgggaactataccgtaaattgccaggggtacagtgaaacacatcgcctcaccctggacacagcacagggtgaggagggcacaggacacgcggaaggggcatccgggacattcaggacatccttcctccctgccacaacggctccacagacgccagcagagtatgatgctgtctggtcagcgtggagaagggctgcacccgcagaagagtcacgcggccgtgcagcagtggtacagaaaatgcgtgcctgcctgaataatggcaatgcagtgcttaacgtgggagaatcaggtcttaccaccttgccagactgtttacccgcgcatattaccacactggttattcctgataataatctgaccagcctgccggcgctgccgccagaactgcggacgctggaggtctctggtaaccagctgactagcctgccggtgctgccgccaggactactggaactgtcgatctttagtaacccgctgacccacctgccggcgctgccgtcaggactatgtaagctgtggatctttggtaatcaactgaccagcctgccggtgttgccgccagggctacaggagctgtcggtatctgataaccaactggccagcctgccggcgctgccgtcagaattatgtaagctgtgggcctataataaccagctgaccagcctgccgatgttgccgtcagggctacaggagctgtcggtatctgataaccaactggccagcctgccgacgctgccgtcagaattatataagctgtgggcctataataatcggctgaccagcctgccggcgttgccgtcaggactgaaggagctgattgtatctggtaaccggctgaccagtctgccggtgctgccgtcagaactgaaggagctgatggtatctggtaaccggctgaccagcctgccgatgctgccgtcaggactactgtcgctgtcggtctatcgtaaccagctgacccgcctgccggaaagtctcattcatctgtcttcagagacaaccgtaaatctggaagggaacccactgtctgaacgtactttgcaggcgctgcgggagatcaccagcgcgcctggctattcaggccccataatacgattcgatatggcgggagcctccgccccccgggaaactcgggcactgcacctggcggccgctgactggctggtgcctgcccgggagggggaaccggctcctgcagacagatggcatatgttcggacaggaagataacgccgacgcattcagcctcttcctggacagactgagtgagacggaaaacttcataaaggacgcggggtttaaggcacagatatcgtcctggctggcacaactggctgaagatgaggcgttaagagcaaacacctttgctatggcaacagaggcaacctcaagctgcgaggaccgggtcacattttttttgcaccagatgaagaacgtacagctggtacataatgcagaaaaagggcaatacgataacgatctcgcggcgctggttgccacggggcgtgagatgttccgtctgggaaaactggaacagattgcccgggaaaaggtcagaacgctggctctcgttgatgaaattgaggtctggctggcgtatcagaataagctgaagaaatcactcgggctgaccagcgtgacgtcagaaatgcgtttctttgacgtatccggcgtgacggttacagaccttcaggacgcggagcttcaggtgaaagccgctgaaaaaagcgagttcagggagtggatactgcagtgggggccgttacacagagtgctggagcgcaaagcgccggaacgcgttaacgcgcttcgtgaaaagcaaatatcggattatgaggaaacgtaccggatgctgtctgacacagagctgagaccgtctgggctggtcggtaataccgatgcagagcgcactatcggagcaagagcgatggagagcgcgaaaaagacatttttggatggcctgcgacctcttgtggaggagatgctggggagctatctgaacgttcagtggcgtcgtaactga

SEQ ID NO: 399354 - DNA, 555 bp, Salmonella enterica; identical to SEQ ID NO: 399333

SEQ ID NO: 399355 - DNA, 696 bp, Salmonella enterica
atgctgatgacgaggcggctgttgcgctggccgctgctgtacttgctgacgttgctgcatttgtctcagatatttttgctgcggctgccgatgcggctgccgccttttccgacgctgccgccgcagtggctgacgcacctgcatcaccggcactggaagccgcctgcgtttctgacgtcttcgcggcggtttcggatgctccggcgcgctctgctgatgtctgcgccgccgtcgcgctggcggctgcggcagcagctgaatcgccggcggcagtacgggaggcatctgcattcgcttcagatgttttcgctgcggctgccgatgcggctgccgccgttctggctgtgtcagccgacgccgcgctggctgatgcctccccggcttttgtggtcgccgtacctgcgctgctctccgcagatgctgcggatgaggctgcctgtgtggctgatgcttctgccgctccggctgcattcactgctgccgtggcgctttccgatgcctgacctgctgatgtctgcgcctgttcagatgcctgccctgcggcggtggcattccgcgatgcctccgatgcctggcgggcaacttcttccaccatcgcctcaaaacgccgcagcgcctccgggcggacgtcgtcttctgtcatggcccccagaaaatcattcagggtgcccggctttgaatcatcgtaaaccgtaa

SEQ ID NO: 399356 - DNA, 696 bp, Salmonella enterica
atgctgatgacgaggcggctgttgcgctggccgctgctgtacttgctgacgttgcagcgtttgtctcagatatttttgctgcggctgccgatgcggctgccgccttttccgacgctgccgccgcagtggctgacgcacctgcatcaccggcactggaagccgcctgcgtttctgacgtcttcgcggcggtttcggatgctccggcgcgcgctgctgatgtctgcgccgccgtcgcgctggcggctgcggcagcagctgaatcgccggcggcagtacgggagacatctgcattcgcttcagatgttttcgctgcggctgccgatgcggctgccgccgttctggctgtgtcagccgacgccgcgctggctgatgcctccccggcttttgtggtcgccgtacctgcgctgctctccgcagatgctgcggatgaggctgcctgtgtggctgatgcttctgccgctccggctgcattcactgctgccgtggcgctttccgatgcctgacctgctgatgtctgcgcctgttcagatgcctgccctgcggcggtggcattccgcgatgcctccgatgcctggcgggcaacttcttccaccatcgcctcaaaacgccgcagcgcctccgggcggacgtcgtcttctgtcatggcccccagaaaatcattcagggtgcccggctttgaatcatcgtaaaccgtaa

SEQ ID NO: 399357 - DNA, 240 bp, Salmonella enterica; identical to SEQ ID NO: 373927

SEQ ID NO: 399358 - DNA, 1209 bp, Salmonella enterica
gtgaaagatgctcgcgtgtcgctgatgtactttaacgcgcgtcacgtagagaagactatcgtcaaagagcgctctccagtgcttgatatgggcaacctggtacatgttctggctctacagccggaaaacctcgaagcggagttcagcgtagagccggagatccctgagggtgctttcaccaccaccgccaccctgcgcgagttcatcgacgcgcacaacgccagcctgccagcgctgctgagtgctgacgatatcaaagcgctgctggaagagtacaacgccaccctgccgtcgcagatgccgcttggagcttcggtagatgaaacctatgcatcgtatgagcagcttcccgaagaattccagcgcattgaaaacggcaccaaacatacagccacggcgatgaaagcctgcatcaaagagtacaacgtcaccctgcccgcgccggttaaaaccagcggcagccgtgacgcgctgctggagcaactggcaataatcaaccctgacctggtcgctcaggaagcgcaaaaatcgtcgccgttgaaagtctctggcacgaaggccgatctgattcaggccgtgaaatcagtcaacccggcagtggtattcgccgacgaattgctggatgcgtggcgggagaacaccgaagggaaagtgctggtcacccgccaacagctcagcaccgcgctgaacattcagaaagccctgctggagcacccgaccgccggcaaattgctgactcacccaagccgcgctgtcgaggttagctattttgggattgatgaggaaaccgggttggaagttcgggtacgccctgaccttgagctcgatatgggcggcctgcgcattggcgccgacctgaaaactatcagcatgtggaacatcaagcaggaaggcctgcgtgcgaagttgcaccgggaaatcatcgatcgggactatcacctgagcgcggccatgtactgcgaaactgcggcgctggaccagtttttctggattttcgtcaacaaagacgagaactaccactgggtcgccatcattgaggcgtctaccgagttgctggaacttggcatgctggaataccgcaaaacaatgcgagagatagcaaacggcttcgacactggtgaatggtcagcgcctatcacagaagactacaccgacgaactgaacgattttgatgtgcgccgccttgaagcgttgcgcgtacaggcataa

SEQ ID NO: 399359 - DNA, 135 bp, Salmonella enterica
atgacaacgagtcgctttattatcgcgctcgggttcggtagccgcctggacggttacttccgagaaaggcatttacaccgaatggtgtatagctcatggctggttttcggtgagaggcaggatgtctctcattaa

SEQ ID NO: 399360 - DNA, 342 bp, Salmonella enterica
atgcaacatatcgattctatccgtttatctgagaaacaaaaacaacaactgatcactctcaaacgtaaaaccggtatagaaaactggaacgtgctgtgccgttgggcactgtgtatatcattagcagagccaacaatacctccaaaggagaatattccttcggatagtaatgtcgaaatgacgtggagaacatttgctgggagtgaatacagagtttatgagtcaatagtgttgttcagaagcaaaaaagatatgatggattatgatattattacttttctgaaattgcatatttctcgaggtttgaatattcttttaaagtctacaatatctataacataa

SEQ ID NO: 399361 - DNA, 411 bp, Salmonella enterica
atgaaacgatatatactggctaccgcgatagcgtctcttgttgcagccccggcaatggcgctggccgctggcaacaatattctcagcgtacatattctcgatcagcaaacaggcaaaccggcgcccggcgtggaggtggtactggagcagaaaaaggataacggatggacgcaattaaacaccgggcataccgaccaggacggacgtattaaagcactgtggcccgaaaaagctgccgcgccgggggattatcgcgttatttttaaaaccggccagtattttgaaagtaaaaaactagatacgtttttcccggagattcccgtcgagtttcatatcagcaaaacgaatgagcactatcatgtgccgctgttattaagtcagtatggttattcaacctatcgcgggagctaa

SEQ ID NO: 399362 - DNA, 1563 bp, Salmonella enterica
atgccggcaaagaatattgctggctcgatcactttctcggtttccaatccagggtcaattcatcccataacgcgttattcagtgggaacctttatgaaaaagtattttgcattcgccgttacgctgctgggtatgggtaaagtcatcgcctgtactacccttttggtaggcaatcaggcttcggctgacggctccttcattatcgcgcgcaacgaagatggctcggcaaataacgccaagcataaggttattcatcccatcgcgtttcatcaacaaggcgagtataaagcgcatcgcaacaattttagctggccgcttccggagacagcgatgcgctatacggcgattcatgactttgatactaacgataacgccatgggtgaagccggtttcaattcggcgggcgtcggaatgagcgcaacggaaaccatttataacggcagagcggcgctggctgccgatccttacgtgacaaaaacgggaatcacggaagacgccattgagtccgtgatcctgccagtggcgcaatcggcgcgtcagggcgccaaattactgggagatattattgaacaaaaaggcgcgggcgaaggtttcggcgtcgcgtttattgatagcaaagagatatggtatctggagacgggaagcggtcatcaatggctggcagtacgacttccggcagatagctatttcgtttccgccaatcagggacgtttacgccattacgatccgaatgataacgcgaattatatggcgtcaccaacgttagtaagctttgcgaaaaagcagggattatatgatccggcccgcggcgaattcgacttccatcaagcctattcgcaggataacaaaaacgataccacctataattatccgcgcgtctggacgctacaacaccagtttaatccgcatctggatacggccgttagcgaaggggaaacatttcctgtttttttaacgccaataacaaaaattagcgtggcggcagtaaaaaacgcgttacgaaatcactatcagggaacgtcgcacgacccttatgccagtcataatccacaagaaccatggcgacccatatccgtttttcgtacccaggagtcgcatattttacaggtcagaccgaaattaccgcaggctatcggcaacgtagaatacatcgcctatggaatgccatctcttagcgtctatctcccctattatcaggggatgcgtcattatcaacccggagatgataaaggaaccgatcgggcgagcaacgactctacctactggacattccgcacgctgcaaacgctggttatgcaggactacaatgcgtttgcgccagatgtgcaacacgcctggaaaacatttgaacagcaaacagctaagcagcagtataagatggagcagagctatcttagattatatgcgtcgcatccgaaagaagcacaacgcttactgcaaaattttgaagataaaacgatgcaaaatgcgcagacgctcgcccgtcgcctgaccaataatattattacgacaatgacttaccgcacagatatgaaatatcacttttcaagtacgcaaccataa

SEQ ID NO: 399363 - DNA, 351 bp, Salmonella enterica
atgcgcgctgccgtcgctgccgcgggtaacttccgttgtgcggatccagccctgaacaggcaggaactccttgcgaaccttcatacgctgaaaagctgcattcatccggttcagcatctcgcccagttccccaatcgcacagttgcgcacggtcagggtcaggaacatccagcgggcatcagggtaatccgccacgatacgcggcagggactggtagaaacgggcttgccacatcagggagcgcctccactggcagacaggacagtgccggacacggcagaaatgcgcctcacgcagcctcagacgcgtttctccggtttccttgatggtagaccacccaaaacgcagtaa

SEQ ID NO: 399364 - DNA, 498 bp, Salmonella enterica
atgttcacgtttatttctggaatgatatgtaagaaaactgatgcaattgtcaaagccgttggtattttcagtccgcaaactactggaaaatatcttatgcatttaacatggcaattgccattacttaaacagggtggagagttcgcagttatccataataatataattgaggctgagccagataattcaggtggatatcatttatataaggttttttctaataatcttgcgacaatctttgatgttttttatcccagagagcaccgtgtaagtaaaagagttcgcgcatcagcatgtttattcttacttaacttcataggcgatgaagataaaaccaaaaattttgctacaaataattatttaagagattgcgatagtgcatttatagatttaattatatataaatatgggcttaggtttttctatctataccctaaaactgtgcctttatttagaaaaataaaatatattataaagacggttttaatgcgtaaataa

SEQ ID NO: 399365 - DNA, 351 bp, Salmonella enterica; identical to SEQ ID NO: 399363

SEQ ID NO: 399366 - DNA, 243 bp, Salmonella enterica
atggtggccgatcctgaatggttcctcgaactgacccgccagacgcacaagcgccgctttgtggcgaccggcggcgcactcaaagacgtgctgaaactcgatcaggaaaccgacgccgacatggtgatcggagatgatatttccgagggcgacgatgacggttcacgcatcgcgttcgaatggaaaaccgaggtcagaaagtaccgtcgctcaccgacgaaagataaaactgaatcaggctag

SEQ ID NO: 399367 - DNA, 1011 bp, Salmonella enterica
atgagtgcgttaaacaagaaaagctttttgacctggctgaaagagggcggaatttacgtcgttcttttagtgttgctggcgattattattttccaggacccgacttttttaagtttgctgaatttaagtaatattctgacgcaatcttcggtacgtattattatcgcgctgggcgtggcgggactcatcgtcacccaggggacagatctgtcggcggggcgtcaggtagggctggcggcggtcgtggcggcaacattactgcaatcaatggaaaacgccaataaagtgtttccggaaatggcgaccatgccgattgcgctggtcatcctgattgtctgcgcgattggcgcggtgattggcttggtgaacggcatcatcattgcttacctgaacgtgacgccgtttattaccacgcttggcacgatgattatcgtttatgggatcaactccctttactatgactttgtcggcgcttcgcccatttccggctttgacagcggcttttccacctttgcacagggctttgtggcgatgggcagtttccggctctcatacatcaccttttacgctctgattgcggtagcgtttgtctgggtgctgtggaataagacccgttttggtaaaaacatttttgctattggcggcaacccggaagcggcgaaagtttctggcgtaaacgtggcgctgaacctgctgatgatttatgcgctctccggcgtgttttatgccttcggcggcttactggaagcagggcgtattggttctgccaccaacaacctcggctttatgtatgaactggatgcgattgccgcgtgcgtggtcgggggcgtatcgtttagcggcggagtgggtacggtcttcggcgtggtgaccggcgtcattatctttaccgtcatcaactacggcctgacctatatcggggtaaacccgtactggcagtacattatcaaaggcggcattatcattttcgccgtggcgctggactcgctgaaatacgcgcgtaagaagtag

SEQ ID NO: 399368 - DNA, 483 bp, Salmonella enterica; identical to SEQ ID NO: 379699

SEQ ID NO: 399369 - DNA, 588 bp, Salmonella enterica
atgacccacatcatggatcacacaatggcgatgcgtgaaaagggtgggcgttacgtgttcctcattaaagcagcgacaagtgaaacgtggtggccggaagacgctgaccacatcatgtttatccgcggtcgtattggtttcgatctcccagtgtggtttgttcctgcggacaataagcagaaacccactggtgcattctttgctggcgccattgcaatcttcgataagtcatggcgcggcgagcgtttcagctacatcagccgtaccgaactggaggaaaaggggaaggcgttcatgtcactggtcgaatttgccgcgggtaaggttcagccaccagccaccacggttccagagcaagaagaacccattgtagcgccagcagtattaccttatgtggattcgcgtatctggccgcttgaggttggtctggtgttcaaccaggttgagggggcggattctctggacgcatcgcagcagaacaagctgaaagccaacattaatcaactctggctggaacgaacggccaccagcgaaatcattactactgctggtggactggtcagcagcatgcggcgggaggttgcatga

SEQ ID NO: 399370 - DNA, 696 bp, Salmonella enterica
atgctgatgacgaggcggctgttgcgctggccgctgctgtacttgctgacgttgcagcgtttgtctcagatatttttgctgcggctgccgatgcggctgccgccttttccgacgctgccgccgcagtggctgacgcacctgcatcaccggcactggaagccgcctgcgtttctgacgtcttcgcggcggtttcggatgctccggcgcgcgctgctgatgtctgcgccgccgtcgcgctggcggctgcggcagcagctgaatcgccggcggcagtacgggaggcatctgcattcgcttcagatgttttcgctgcggctgccgatgcggctgccgccgttctggctgtgtcagccgacgccgcgctggctgatgcctccccggcttttgtggtcgccgtacctgcgctgctctccgcagatgctgcggatgaggctgcctgtgtggctgatgcttctgccgctccggctgcattcactgctgccgtggcgctttccgatgcctgacctgctgatgtctgcgcctgttcagatgcctgccctgcggcggtggcattccgcgatgcctccgatgcctggcgggcaacttcttccaccatcgcctcaaaacgccgcagcgcctccgggcggacgtcgtcttctgtcatggcccccagaaaatcattcagggtgcccggttttgaatcatcgtaaaccgtaa

SEQ ID NO: 399371 - DNA, 555 bp, Salmonella enterica; identical to SEQ ID NO: 376473

SEQ ID NO: 399372 - DNA, 696 bp, Salmonella enterica
atgctgatgacgaggcggctgttgcgctggccgctgctgtacttgctgacgttgcagcgtttgtctcagatgttttcgctgcggctgccgatgcggctgccgccttttccgacgctgccgccgcagtggctgacgcacctgcatcaccggcactggaagccgcctgcgtttctgacgtcttcgcggcggtttcggatgctccggcgcgcgctgctgatgtctgcgccgccgtcgcgctggcggctgcggcagcagctgaatcgccggcggcagtacgggaggcatctgcattcgcttcagatgttttcgctgcggctgccgatgcggctgccgccgttctggctgtgtcagccgacgccgcgctggctgatgcctccccggcttttgtggtcgccgtacctgcgctgctctccgcagatgctgcggatgaggctgcctgtgtggctgatgcttctgccgctccggctgcattcactgctgccgtggcgctttccgctgcctgacctgctgatgtctgcgcctgttcagatgcctgccctgcggcggtggcattccgcgatgcctccgatgcctggcgggcaacttcttccaccatcgcctcaaaacgccgcagcgcctccgggcggacgtcgtcttctgtcatggcccccagaaaatcattcagggtgcccggctttgaatcatcgtaaaccgtaa

SEQ ID NO: 399373 - DNA, 414 bp, Salmonella enterica
atgtttcaggacaacccgctgctagcgcagcttaaacagcaactgcattcccagacgccgcgcgctgaaggggtcgtaaaagccacggaaaaaggctttggcttccttgaggttgacgcgcaaaaaagctatttcattcctccgccgcagatgaaaaaagtgatgcatggcgatcgtatcgtcgcggtcatccacacggaaaaagaacgtgagtctgccgagccggaagaactgatcgaaccgttcctgacgcgttttgtgggaaaagttcagggtaaaaatgaccgcctgtccatcgtgccggatcatccgttgctgaaagacgcgattccctgccgcgccgcgcgcggcgttcagcatgagttcaaagaaggtgactgggcgggttgccgaaatgcgccgccatccgcttaa

SEQ ID NO: 399374 - DNA, 318 bp, Salmonella enterica
gtgtgtaatgtgctggtcagtatgcgttcgagtaacgcgaatgaagacggatcgcgcatgagtaccggcgccatcatttggcattgtgaagacgaatattgccgccgaactttggtatgggctggaggatattctaccagactggcggcgggccgcgcggtttcaaaacccccagacgatatcaaagcgctgcatctcctggccgggcagttcgcgcacgggcagacggcaaaacgcctgaaatatcgccgctacccgcgcctgaaaaccgataaacccaatgatctgattgatgagtacggtatcccgggcggttaa

SEQ ID NO: 399375 - DNA, 936 bp, Salmonella enterica
atgaagatttatcttgaccacaatattttggacgaaataagcaagaatcgaatggaattagaggctccaaacgacacggtttgggtttattcggatgaaagctttaatgaaatcaaacgtgctaatgatatgcgttttttagatgtattgaaaaatcttaaagcaagaaagttagaactcgaattagataatcaatttagactcactgggcgcgcatttcttcatgattattgtgagccaaaagatatgtatcagcagtggcttgataacatcagtgaagtcaatgttgatgaactcatgcaatcacaaatgcagttcttggcgcggctagcaggcgcagataattacagtgaaatccttcatcagcctcgaaaattaaaagaatttctttatgctcttttgtcgccagatggcagtgctactaaagatatagagcttcagatagagcgagcagttgcgggtattgagtcagttgtttgcggtcaattgcaggaagttgagagtttggatgcttcgcgtacggcaattggtaccggcagaggccgcgctagcaacatttcaattaaggaaaatccccttgtactaatatgggaaatgttgcgtattaatcataaggaaatgactattgaacaattctatggatttgagccattagacaaacaggggtatgagaattggcctttatatttgggtgtcgtaggttgtcatactgttcttaattttctaggtttccatccagataaggggctcaatcgcattgaaaaaatcccaaccattttaagtgatgcgaaccacacggctatggcaatttactgtgatgctattttgagtaaagaccaaaggttttgtgccaaagcacgtgcgatttttgcatatttggatttggatattatggttattgaagccacgccaaatgataaagcactgagtagatag

SEQ ID NO: 399376 - DNA, 402 bp, Salmonella enterica
atgttgaaaaagttgataatgtttacgggcctgttgggcgggtcggtgctgttttcggggcaggcgctggcagcggcagattttggaccatgtactcctgaaggtggaacacatatcttcagtgccaccataaataaaacagtttcagatacgtcaaagaacacaacgggtgcgaccttcgtagatttcgatagctggaatttaggtggaacctatgcgatgtcctgtgaatgccctgatgatacctctcttataaatgacaccttatttaaggctgtggttcctctggcctttgttacgaatatagagagtcgctcctattaccagatcaataataatattgccattgcgagcgatgtactgatttcggggggacgaggagaatacgttaacacaccgtag

SEQ ID NO: 399377 - DNA, 165 bp, Salmonella enterica
gtgtggataacagtggataagatccaagggtatgtggggacgttgcacggcaacctatgggaacgctgcacggcaacctatgggtttgttgcacggaataaatatgaaaacaccagtaatatcaatgtgttgagtggtgatttagaacgcctaacctgtctttaa

SEQ ID NO: 399378 - DNA, 1005 bp, Salmonella enterica
atggaaaacattgcgctcattggtatcgatctgggtaaaaactctttccatattcattgccaggatcgtcgcgggaaggctgtttaccgtaaaaaatttacccggccaaagttgatcgaatttttggcgacatgccccgctacaaccatcgcaatggaagcctgtggcggttctcactttatggcacgcaagttggaagagttggggcattccccaaagctgatatcaccacaatttgtccgcccgttcgttaaaagcaataaaaacgactttgtcgacgccgaagctatttgtgaagctgcatcgcgtccgtctatgcgttttgtgcagcccagaacggaatctcagcaggcaatgcgggctctgcatcgtgtccgtgaatccctggttcaggataaggtgaaaacaaccaatcaaatgcatgcttttctgctggaatttggcattagcgttccccgaggagctgccgttattagccgactgagtaccattcttgaggataatagtttgcctctttacctcagccagttattgctgaaattacaacagcattatcactatcttgttgagcagattaaagatctggaatcccagttgaaacgaaagttggacgaagatgaggttggacagcgcttgctgagcattccctgcgtcggaacactgacagcgagtactatttcaactgagattggcgacgggaagcagtacgccagcagccgtgactttgcggcggcaacagggcttgtacctcggcagtacagcacgggaggtaggacgacattgctgggaattagtaagcgaggtaataaaaagatccgaactttgttggttcagtgtgccagggtattcatacaaaaactggaacaccagtctggcaaattggccgattgggtcagggatttactgtgccggaaaagcaactttgtcgtcacttgtgctctggcaaacaagctggccagaatagcctgggccctaacggcacgacagcaaacttatgtagcataa

SEQ ID NO: 399379 - DNA, 276 bp, Salmonella enterica; identical to SEQ ID NO: 25152

SEQ ID NO: 399380 - DNA, 639 bp, Salmonella enterica; identical to SEQ ID NO: 25154

SEQ ID NO: 399381 - DNA, 990 bp, Salmonella enterica; identical to SEQ ID NO: 25157

SEQ ID NO: 399382 - DNA, 858 bp, Salmonella enterica
atggacgtacaggacggtgcaaaaagaaaagccgatagttacgagctaccggcttccattgaatcttgtcataaggaccacttaatgacttcattaaatttagcagttcatgaaccaaatgtcgatccccagccgctgcctgttattgaatggagtggtttgcgtgttgttacgactgaaacgctggcttcgggttatggtacggatgaggctaacattcggaaaaacctgtcacgtaatgctggccgcttcattgaaggaattcacatcttcaccattaaaggccaagagttgaagaatttgcgagtgactaatagtcacgcacaaatttctaacaaagcacgttcaattgttttgtggacggagaagggcgcggcgcggatgtcgaagattgtcgatacagacgaagcatggtctttcttcgagcggttggaagatgcttacttccgtcccttggtaaaaagtatcctcccgcagacatacgagcaggctctggaagatttacttctaaaggtcaaagagaatcggcttcttgagcaacagcgtgacagagcggtaaaagaaaagttgtggattgcagaaaaacgcgaagctacagcaatggctaccgcatcagcagccgtccgcgccaaaaacaaattagccgaacgggtaggggaaggaaagaactacgccgccattatcccggttgaaaagaagcttgggcagaagttcaaatggcagccacttcgtaagtggtgccgggataatgatgtctcaccgcatgatgtagatgacccgcgatttggatcggttaagtcttggcctagagccgcttggcttgctgtgtatggcgtagatttgcgcaagatattttaa

SEQ ID NO: 399383 - DNA, 792 bp, Salmonella enterica
atgaattcagcagatttatcgaagattcttgaagaacacaaagtgtggattacctcaatgcgtgagagcggatcgagagccgacctgtacggtgccgacctgcgcggtgccgacctgcgcggtgccaacctgtgcgatgccaacctgtgcggtgccaacctgtgcggtgccaacctgtgcgataccaacctgcgcggtgccgacctgtacggtgccaacctgtgcggtgccaacctgtgcggtgccgacctgtacggtgccgacctgcgcagtgccgacctgcgcggtgccaacctgtgcgatgccaacctgtgcggtgccaacctgtgcggtgccaacctgtgcgataccaacctgcgcggtgccgacctgcgcggtgccaacctgtacggtgccaacctgtgcggtgccgacctgcgcgatgccaacctgtgcgatgccaacctgtgcggtgccaacctgtgcgatgccaacctgtgcgataccaacctgcgcggtgccgacctgcgcggtgccgacctgtgcggtgccaacctgtgcggtgccgacctgtacggtgccgacctgcctgatctcactttcgtaatcctgggtgagaaatacttcataagtataacgaacggtgaatatgtacgagcagggtgccagaaccacacagttgaggaatggagaaaatatagtaagcaggaaattactgagatggatggtcgtaaagctctaaaattttatccacgattgctttcgataattgacttttacctcggggccggagaatggcctgattgggtttaa

SEQ ID NO: 399384 - DNA, 222 bp, Salmonella enterica; identical to SEQ ID NO: 25144

SEQ ID NO: 399385 - DNA, 318 bp, Salmonella enterica; identical to SEQ ID NO: 19179

SEQ ID NO: 399386 - DNA, 534 bp, Salmonella enterica; identical to SEQ ID NO: 19180

SEQ ID NO: 399387 - DNA, 1146 bp, Salmonella enterica; identical to SEQ ID NO: 19181

SEQ ID NO: 399388 - DNA, 492 bp, Salmonella enterica; identical to SEQ ID NO: 15993

SEQ ID NO: 399389 - DNA, 738 bp, Salmonella enterica; identical to SEQ ID NO: 13703

SEQ ID NO: 399390 - DNA, 225 bp, Salmonella enterica; identical to SEQ ID NO: 13704

SEQ ID NO: 399391 - DNA, 1494 bp, Salmonella enterica; identical to SEQ ID NO: 13713

SEQ ID NO: 399392 - DNA, 822 bp, Salmonella enterica; identical to SEQ ID NO: 25148

SEQ ID NO: 399393 - DNA, 306 bp, Salmonella enterica; identical to SEQ ID NO: 25146

SEQ ID NO: 399394 - DNA, 225 bp, Salmonella enterica; identical to SEQ ID NO: 25145

SEQ ID NO: 399395 - DNA, 138 bp, Salmonella enterica
atggttcttgttatcagtgccacctatctttgtcgccgcggggatattgatggcgcggtttacgcaggtatagcaattttcggatttattgagcttcttgtagagattgctcttctcgcttcagtattaggaaagtaa

SEQ ID NO: 399396 - DNA, 396 bp, Salmonella enterica
atgactactattaccaaagaacgtattgaattgtacgttaaatcgccgcttgaaaacgggcttacccgtggtgaacaaatggatctggcgcgtatcgcgctggcatcgctggaagctgagccaattggctatatgaatcgctttacagggcgcgtgttcagtcttgacgaacaaccaggcgctgacactgacacagatgtttatgagccagtatatgccgctccgcccgcgccggtagtaccggatggttacgcacttgtacccgtcgaacctacggacgaaatgatagctgcggcgatgaactgcgaagatgtgatgttcaatagcgatgagtcattctgcgtacagttcggtaatatctacgaggccatgctcgcagcagcaccgcaaaaataa

SEQ ID NO: 399397 - DNA, 474 bp, Salmonella enterica
atgtcacagcaaacaattttggacatgtgctgcggctctcgcatgttctggtccaacaaacaggattcccgcaccgtgttcgccgatatccgtgccgaagaacacacattgtgcgacggtcgccgtctggttatcagtcctgatttgattgctgattttcgcgcgctaccgtttgctgattcgtcgtttccggttgtggtgtttgatccgcctcatctggaacgtgtcggtcaaacggcctggatgggtaaaaaatacgggcacctgaataaaaaaacatggcgcgcggatattcgcgccgggtttaaagaggcattccgcgtattgcggccacacggtgtactcatttttaaatggaacgaaacgcagattccggtaagccagattttggcgctgacggacgtaaaaccaattattggccagcgaaccgggaagaacgataaaacccactggattatttttgtgaaggactaa

SEQ ID NO: 399398 - DNA, 450 bp, Salmonella enterica
atgagcgagattaactatcaggccctgcgtgaaaaggcagagaaagcaacgtgtggtgtgtggtcgctcgaatatggagagggccgatttgatggtgatgatgcactaattcatcgcgaggctgctggatatattcccatttgcagaattgaaggagcgcatcctgaaagcggtttcgatgaagatttccaaatggaacagcaggccaatgctgaattcatcgccgcagccagtccagctgccgtgctggcactactggatgaacgggaagcagccaaaaagcgcattgcagaactggaagcacggacggtcaacttaccaaaacgcagcgttggtgaggtcatgcacctgagcggattcagccgggattacgccgagggttggtgtgctggtaatgacaatgcgatgcacgaaatacgcgccgctgggatcaaggttaaggagtcgtga

SEQ ID NO: 399399 - DNA, 300 bp, Salmonella enterica; identical to SEQ ID NO: 383321

SEQ ID NO: 399400 - DNA, 399 bp, Salmonella enterica
atgaaacaaatgacactaattgagatggatggatttctgaaaggtaaatgcatcccacgagatttaaaggttaacgaaacaaacgctgaatatctggtgcgtaaatttgctgaagcggaggccaagtgcgcggcgctggcagcggagaatgcggggatgaaacacgcaatggccgtaactcttgagcatgtgtcggtcacggatgcagggcaggccggagttgctgcaatgattatcaacgatgccctacaccacagcgaaactccagctaccgatgcattcctggctgaagtgtgggcgcagggggtagagatgtttgctgacaatctgttgtgtccagaccttgatgacactatccgtgactttgctgcccagcttcgcaaaggaggcaaccagtga

SEQ ID NO: 399401 - DNA, 294 bp, Salmonella enterica; identical to SEQ ID NO: 383322

SEQ ID NO: 399402 - DNA, 285 bp, Salmonella enterica
atgagaagattaaacataactccagcggagatggagtcagtttgcggtcgcatggtagcttgccgtgcagcagaacatctgggcctaaacataaatcagttttattacatagcaaaaaaactgtcattaaaaacggcattcgttaagccaagatggagcgaagacgaagacaaaagaatgcaggcgcttatctcatcaggctatacacaaagaaatgtagcaaaaattctcgggcgaagtgaagagtcggtaaaaagcaggctatcacgtttacgaaagaaatag

SEQ ID NO: 399403 - DNA, 708 bp, Salmonella enterica
atgaatctggatcagttagatgaaccgttcgcagctgaagatatcgaatggcgaatacagcaaagcggtaaaacacgcgatggcaaagtgtgggctatggtgctggcttatgtcacgaacagggcaatcatgaaacgcctggacgatgtttgcggcaaagcaggatggcgcaatgaatatcgcgatattcccaacaacggtggcgttgaatgcggcatatcaatcaagattggttctgaatgggtaaccaaatgggatgctgctgaaaacacacaggtagaagccgtcaaaggtggtcgctccggcgcaatgaagcgtgctgccgttcagtggggaattggtcggtatctgtataaccttgaggaaggttttgcgcagatatccagtgataagaaacaaggatggcacagggccaaactgaaggatggaacaggattttactggctccctccatcgctgccggactgggccatgccagcctcatgcaatcaaccatcaccagaaaataccaaccagaaatctccatcggttgactgcgaacaaatcctgaaagacttcagcgattatgcagcaacagaaactgacaagaaaaagctaattgagagatatcagcatgactggcaattattggctggtcacgatgatgcgcagacaaaatgcgttcaggtaatgaatatcagaataaatgagcttaaacaggtggcttaa

SEQ ID NO: 399404 - DNA, 144 bp, Salmonella enterica
atgttgcatgattttgatgatgaagaatttattgctctcatttctcctaaaattgaggaggaagtggagcagcaaattaacttagccgcagaacggcagaatccggttattagctgggatgaatttgcggggtattactcatga

SEQ ID NO: 399405 - DNA, 189 bp, Salmonella enterica
atgaccattacgcctgttaatggaacaattcttgttcagcaaggaaacagggagttcaacaagctatatgagaaagtatttccggatacaaaacagggaatgtctgatgcttatacatgggctgccggaatagctcttggttgggataagtggcaggacgaagaatgggaggcgcgtcatgttgcatga

SEQ ID NO: 399406 - DNA, 159 bp, Salmonella enterica
atgacatttactatcgcgggcggtgccgtcatgggtatcgcacaccttaatgaatcacttttagagcgtatcaccagaaaattacgggccggattgaaacgtctcggtgaaattcttaatcagccaggagtgccacgccatgaccattacgcctgttaa

SEQ ID NO: 399407 - DNA, 126 bp, Salmonella enterica
atggaaataaataaagagcaggcatcagaaattatcaaacttatcgaacaagcattacttgatgggtttgatgatgaaattttggtttcgctacacgaaagtcttaccaaatttgtcagcgaataa

SEQ ID NO: 399408 - DNA, 369 bp, Salmonella enterica; identical to SEQ ID NO: 24296

SEQ ID NO: 399409 - DNA, 411 bp, Salmonella enterica; identical to SEQ ID NO: 24297

SEQ ID NO: 399410 - DNA, 474 bp, Salmonella enterica; identical to SEQ ID NO: 375788

SEQ ID NO: 399411 - DNA, 186 bp, Salmonella enterica; identical to SEQ ID NO: 375789

SEQ ID NO: 399412 - DNA, 315 bp, Salmonella enterica
atgaatatcgaagaatttatgagtgaagaaaactatatgtgtaatctgggccaagatcttttctttagaattttcgaagtcggagctatttacgatttacctgataatgagtttaacagaaagattgtttactggttaagccagtatttagtggggaatctaagagaaccattagattcgatctctgagcttaatattttcgaacagttttatgtttatgagacatggttctcgctaattaaatgccctgatgaaattaggaatttatcgaaacggataattcgatatcagattgggctgaaaactcttttataa

SEQ ID NO: 399413 - DNA, 1203 bp, Salmonella enterica
atgtgttttgtggtcgattcatttgtgttcagcgatggagagaggtattgtcatataaaaaataggaatacaggcgagcctttatactatcctaatctttatttaacgacacaagtcagaaataaatcagagtcagtttcgacaatgaaggcagtaggagggagtattgctttattatataatttctttgaaattcaaaaaataaatatagatgaaagaattttgaatttacagcttttaaatttacatgaaatagacagtcttgttgattttacagctttaagtctgaaaaaggacaaaattacttcttccaatgaaaatgttttagtagaaagatcaacaaaatattttagattaacaactatatccaattatctatactggctctgtaaaatacatttgggaacttcatcaaagaaatatagcaataaaatagttaatgagttcatatgttgtttgaaagctaaaaggccaagagagttaaaagcagaaaatgtcaatcttgataaaagtttgacagatattcagataaaaaagctatttgaaataataaaacccggagcaagccagaatccgtttacggtggcagtacagaaaagaaatcacttgatttttatgttgttataccattttggtttaagggggggagagttactaaatatacggataagtgattttgatttttcgagttcaacccttgatattttaaggagagcaaatgatgaatcagatacacgggtaaggcaaccattggtaaaaacttgtgaaagacgattacctataaaagaagagttgttagaagaaataattaattacataaaaacggatagaaagaaggtcaaaaaatctaacaagaatgattttctttttatcacttataaatcaggattatcgcagagtgaacctttgtcaatatcatcatatcaaaaaataatatacatagtcagccaaacaactcctgaattgaataatttaactggacatatgttgaggcacacctggaattatgagttttcccaagcaatagataagtcatccgaaaaaataacggaagaaaaagaaatgcaaataagatcatatcttatggggtggaggtctggttcctcaactgctgcaatttataacaaaagacatttaatagaaaaatcgcataaaacctctcttgatttgcaaactgggttattaaaaggaaaattacaatga

SEQ ID NO: 399414 - DNA, 1323 bp, Salmonella enterica
atgaatagagatcttatagaaaataaattttataaactgcaaaataaacctaacggtttcaatttgcatgaccctgtttgggtattggataaaaatacaaaaatctatgttggtcgagtgttgaatatattggataaacaattggttaacggttttttgaatacattggcgatatatgcttgtgaatatagtggaggttatgtgaagggtttaataaaattcatgaagaactttataagggtaatgaacccaacatatataaatgatttggtaataatgaattacaaaaaccacttattaggaaacaataaagaatactatttggcaggaataaaagcttttttgataaaatggtatacattaggtcattatggtgttgataaaacagggattgtgcttttgaatgatatgaaattcactcatcctaaaaaaggaaaggccattttgaatgaatcaccagataaaggaccattaactaaaacagaacatgaaatttttaataatgcaatggtaaagtgttttaataataagagactgtcgctatcagactttgcggcatgtatgttaattagtcttcttgggagaaggccaatgcaggtggcattattaaaatataagcatttaagaacaattactacaacagaaggtgagttgagaaactcaattttcgtgccgagaattaaacaacgaaacggttcacaacagggagttcgggaattagttctacattttgaaatggctgagattatgtataaacaagccaactactctctggaagctatagaatctaaatttggtggtgtgttagtaaaagaacttagggacaatattcctattttcttggatgaaatacagttaaataatttaaaaaacaaggttgaggtagttaaagctatacaatcaggagagcttcacaataaaccgtcttttgtggctaaggctatgaaaaaaatagtatcttatgagaatgttctctcgaatatcactggtgaacttttgaatgtgaccccgattagatttcgttatagcctcggaacccatttggcacaagatgggcatgatttgaagattattgcagaacttttagatcataatacaccagcgatttctggtggatatataaaaaacttatcagataatgtagggaacatagataaggctatttcagatcagctttcatttatagcttctttgttcatggggcaaaccgttcataaaataaagaatccacccatggatagttgttcttcacagtacgatatttctttgtgtgccaactctaaatatccgtgtgtaaactgtcacttattctcagagtattag

SEQ ID NO: 399415 - DNA, 1884 bp, Salmonella enterica
atgaaagatactattatatttagttcaaaaccatcaataagtccagaaactaatgtttctaattttattgatttttgccgttatcaattgaatgcattcggaaaagaacttgattgggaatctccagtttggaagggatttgtgacttttaaaaaggtagggaaaggaaactaccgtattaaaaaagaagacataatgcatgacgattatattgactttgcaaaggcttatttaaggtatcagcaatttctgaagcctgtaaaaaattatggtaacattatgattgctttgagatgccttgaaatggctcttttaaaagtgtgcagaaacgcatttatttataatatttctgttattgttcttgatgaagcaatgcaaattgcaaaacaattctttcataaaaataccgtgattaaatgtgggtttaatcttgagaaattagcgaaatttgtttctgataataaaatggcaaaaagtgaatttattgaatggagatatccagagagatacactgtcaaacaaaattaccttccaatggaaaaaaataaagacagacaaaaaaaattacctaatgaatcagcattatttgccattgctggaatattttcaaagcctgatagtgagctaaatgatcgagatctttttacgacctctgtttttgctttacttatgtgtgctccatgtcgcattagtgaaatcttagcattatccgcagattgtgaaattactcaaactgatagctatggcattgaacggtatggattgagatttttttcattaaaaggctatggagcaaacataaagtggattcctactgtcatggttccagtagcgaaaaaggctatttcacgattacttaaattatcagaaaatgcgagagcacttgcaaaatggtatgagaaaaaccctgacaaattttatcacttatacaaatgtgactcagttattaacgaaaaggagccactaagtgcaaaacaaatctgccatgctattggttatacatttgataaaacatacaaatacaatcgtaaaataaaaattatgagctatgatgactgtaaaacttttcttaacccatcgaatgggtattataccttgaatactttatggcatgttatttgttccaactttcctgctgatttcccatggtatgataaagagaaatcaattaagtatagtaatgctttatgtctacttaatgttcaccaatgtgataaaacaagactaactatttaccataaattatttaaacctaacaaggattttttctgtgacgatattagtgctaagaagcaaaaacaaaaattaaacatatttgcacgatatggcttttacgatagtcaagaaaaaccattattcattcgctcccatcagcccaggcacctacttaacactatggcacattatggtgagctatcagagcttgataccgcaaaatggtcggggcgagtatctgtaagaagtaatggtgactacaatcatgttacccaagagcaaatggttgaaaaggtcaaagcactaaatttacccgataaatcatacggtatggagatttctgtgaatgacaaaaggatcaatacagcacagaagttagaggaagtttctcatggggccgttcacataactcagaaaggatattgtatccatgattatttaattcctccttgcaagaaaatcactgcttatcttgaatctgagcataattcaagtgaatgttcatttcttggcatggacagagatacggcaataaaattgagaataaaaatattagcattaataaatataaccaagttggcagtagtagaaggtgaatatggtgcggataaatggctggaacatcacgagttgaatctaaaaatactcaataaaattataaacaaataa

SEQ ID NO: 399416 - DNA, 396 bp, Salmonella enterica
atggcaaaacatttaagtaaagtagacattaaaaatataaaaaacatcatacaaacatgggaggaaaaagacgaaaaactaacttgggaaaatttatgctgcattatacataaaattttgaaacgatccattaccagacaaacactacatacccatgaagatatagttgaagtcttcaaaattaaaaagaaattaatcacttccaaaaagtctattttgaaaaaaccagctaatctgactattgctgctcaacgaattgaaaatctaaaaatcgaaaatgaaattctgagagcggaaaataggatgttcaaagaacaatttactctttggcaatacaatgcttatgttaatggaatcaccaaagaacaattgaatagaccattaaacaagaagtga

SEQ ID NO: 399417 - DNA, 429 bp, Salmonella enterica
atgaacaaaaatgattttaattcagtaatgacactggaagaacagcttatcgttatcgtagacaaatatatctctaagcgatatcagccacatgataaaagtttctcataccagctatacctcctttttgtaggatatcatttaaagtttttttaccctaaaaacatttattctcaatctaatcgtaatattgataatataatgactatgtttagctcggtatacaagagcctgacaagcaatctactacaacgattaaataacaaagaaggggttcttagggagctaaactgtctcgtgaactatattgataacaatcgagaaaaagcagaggaaatttatactgttgtaagaacgcagtatgaagtaaaggttatcgagaaagagttaatctatgaagtcgtcagagtaagaaatgttagattataa

SEQ ID NO: 399418 - DNA, 387 bp, Salmonella enterica
atgaataaatttgttgttgcctccttttttattgcgtcatttttaattactggctgttctacatcaggcaaccaaaaaataaaaaatgaaactgctcaaagtttacaatcaaaaatcattaaaaacaaaacaactaagacggagctactcgctcaacttggtgagcctgatacaagaactacactcgacagtggcaacgaacaatggagatactttatgtataacaatcagttcaatgcaacaacttttataccagtagtcggtttgctaactggcggttctcagactcagtctaaaactcttgaaatagacttcaagggagaaactgtcaataaatggtctttctcatctgataatagcaacactaaatctggtgttcttaattaa

SEQ ID NO: 399419 - DNA, 279 bp, Salmonella enterica
atgaataaagaaaccattaagtgcccattttgctttaaagaaagcgaatttggagtccgtgtttgcactggctgtcattccaagattagttatggcgaagtttcaggatgggctgctttgctaatagtatttattttattagctattacttacatcatactttatataagtcaaaatttattagtaggtatcattactttttttacattagtaattttaatgaaattatatattcgcaagaaatttgcacacagagctatttttacacatagaagctaa

SEQ ID NO: 399420 - DNA, 1200 bp, Salmonella enterica
atgaagggtatgcggaagattcgcaggggtaagaactttgttggtgtggtccaatacgcattgaaaccgggagcacaccacaaaagtgatccattcgtcattggcgggaacatgttaagtgattcagccgttgaattgatcgctgaattcgatagcaccaagcatcttcgcctggatgtcgcaaaaccagtttggcacaactcacttcgcttacccgacggtgaaacactaacgaatgaacagtggtccattatcgcagatgactacatgaagaggatggggttcagtgatactcaccttcgttgctatgtgcttcatgacgacgatggccagcacatacacattatcgcaagtcgcatagatctcaatggtgggaagctctacttgggtaggaacgaaaacctcatcagcacacagatcatcagtaaactcgaagtcgctcatggcctgacagtgaccaaaactgcatctcccccctcgcaagcacaaccgaagcggaagagagtgtcccgcaatgaacagatgctttcagaacggactggccttccttcccccaaagaagctctccaacagatatttgataaaagtttggcagatacaccagatcttttaacttttatcaagaggctggaggaagccgaagtcggctggacagcgaatgtcgcttctaccgggaaaatgaacgggttctcattctcataccgcgatatagctttcaaagcttcgcaattgggtaagggctactcttgggcaaatcttagtaacaggctcaactacaacccaggcgatctagaagctctgcgatccagcacaccggcaaaagaccaccctgctcctgctcctgctcctgctcctgctcctgctcctgctcctgctcctgctcctgctcctgctcctgctcctgctcctgcaacagtgttgaaaaccactgagagaaaggaaagtatcgttgaaaaaattgcagaactggaattacgactcagagaagacaaacgaaacgaaatcaaagaaaagattcttcaaaaaaatgcagtacaaaggcaaaaacactccaggcttagtggctggattccatttttaagaaggttcacagagcttctcagaagatatggtaagagcattcttcacaaaacccacacaaacttctcaaaaatccatgcaatgcaacctctaaacaagtcgagaaaaattcgtttatag

SEQ ID NO: 399421 - DNA, 798 bp, Salmonella enterica
atggctaataaaaccattcctttgaaactatttcgtacgcattatcaagtagcagaagttgctaagatgctaaattgtgaagaggcggatgttttttatctggcaggagagaatgaactttcattctctgcatatgttggcagggagggtaatttctcaaagcatcgagttagatgtataaatgaatttattaatcatcttgattcattggataaggatgacgaggggtatagttatattagtcaatatagtctcataaaaatacatgagataaaaaatgacaagaatttagttattttacgtataaaaggttattttaaatacccaccaagaatccagaaggattttatttattttagtgggcaattcccagtatacccatctcttcttgttccagcaggggaagtgttttcagaagagataaagttctttcagatagactggaaaaattctgatgggcttttttttgagcatgatggatatatagaaagcgatgatgttcgaaaactgtataatattattaataatgatgtttcttcttcggaggtatataagtcgctatcaattgcacaacaagagcgacatgcaacaaagcgaaatcaagttttgagtgtggccatttatctttacaaagaaaactctaatatcaaaaaagacaatgctacagcgctaacaaagcttgttttttcccgagcagccgaattttggcctgataagaaagaaccacccttatcattcgaagtaatctgcaaaatgattgctagtattttcaaaaaaccaatctttacaaataattaa

SEQ ID NO: 399422 - DNA, 1977 bp, Salmonella enterica
atgagtggaatcaaaagaaaaacaacgaacactgggcaaagcgtactgagtcagttagagaacttggctcctaacaaggcactttgcgaatatgtctggaacgcctttgatgcaggtgctaagaatatctatattaatgccacaccaaatggaatgagtggattatccgagatatcgattttcgatgatggtgcaggaattaggtatgcagatctcgataaaacatttgacagatttctggactctcaaaagaaaatattaaggacacctgtaaccaggggtagaaaaggtaaaggtcgtttttcttttgtgaaatttgcggatagagctcgttggaacacgtatactcttgatggcgaagaattttcaatcgagttaatgtctagccatgtcaatgagtatgttgtttctcaaccgaaggaatcaacaaaagatactagtggaacacttgtaacgtttgatcctatttcttttggaatcgatgcttttgagcaggacgttattccttacgtccaaaatgatgtgtcttggttaatgctcgcgcataaagatatttctctttatatcaataatgtaaaaataaaaccgatagattatattagccaagtttatacaaaatccataagcgatcactcatttgatatcaaaactgtacaatgggcggaaaagcctgttgttgaaaaatcatatatttattttttgaatgcaagtgggcgagttgtacataaagagttatctgagctgaatggtaagcaattttattgttctgcttatgtacagtcagagtggtttgattcatttgatattaacaacgacttgataagtgagtcctctcacagtgtcgattcagatgagtttaaatttatacttacttatgtccgatcctgtctgcgtgaagaatatcgacgatttaaaacttgcgttgctgatcagttgattggccagtatttggctgaagggatattcccagagtattcaagtgataatgttatgtacaatgagttcagaagggctcagcttatcgaaactgttaaggtcatttatgaggctgagcctgctcttttctcgaagaatctaaacaaaaagcagaaaaaaatattaataaaattattggacagaattgttgagacaaataatttagccaatctttttgatatttttgaagggataatagaattatcagatgctgaggttgataaacttgctggtgttattagaaggagttcattatccaatattacgaaaacaatatcttttatcaatgatcgtttagatgttcttgattacttcagaaagttacttgaggattctaataaagatacatatgaagttaagcatattcaaaaagtaatagaagaaaatctttggctttttggtgagcaatatactttgttagcttctgaagaagataaattcgatcatgctttgagagtgtttttgagggatgtcaaaggttttaatgaggaacactatgacaaatacacagtggatcacccagataaatataaagagatggatatatttgcagcattaaaaggcaaacgttgtgatgataaagataatccatattttcactgtgttgtcattgaacttaaaagaccaagtgtcaaactcaccgataaagaatttgaacaaataaaaaaatataaaaatgttataagttctcatgaagagtttatgggggataacactcgttgggatttcatattggtcgggaatgaaatttctgatagtcaaattacaaccgcaaacattatggatgaaattgagagtaataggcaacatggtgagttcgggttggtgcaaaagagcgggaacaaaaaaatatatataaaaacatggaagcaaattataaatgaatttgagttgcgctatcatgagctcaccgacaagctcaagctgaaagaacttgatattaaagaaaacacgccagatgtgctgacaactaaaattctggagttgaacaaagcaagttag

SEQ ID NO: 399423 - DNA, 201 bp, Salmonella enterica
atgaaagaaaaactcaccatcgaccaaaaaatccagatcgcacaaattgccagtaacatcgttacagcaggcatcaacaatcaaatgcaacctgtggggttagcaaaagacaatccagaaatccattcagaacaagaactgtttgaacatctgtaccgggtgattgtgaaaacagtcagtgacgaacctgagcaaaactaa

SEQ ID NO: 399424 - DNA, 198 bp, Salmonella enterica
atggctgacgaaaaaaaagagtacaaaagctcaacggagctggcgctggaactttatcccgtcgttaagggcatgattaacgacgatcctaaagtgcattcccaaaacatggctgaagccctgtatctgcttatgcagatggttgacggcccggcgactgcgggccggataattagttttgctcaggttcgtcactga

SEQ ID NO: 399425 - DNA, 177 bp, Salmonella enterica
atgcgacaaaactggcaaacactgcttacccgcgcccatgcaaatgcattcagggttgcggcgttatcgccacaggtcactgagcgtttccgctgtctggtttcgctggcgatcactgagggtgtggcgtctgaaaaattccgttatctggctgagaaggaaatgaaaaatggctga

SEQ ID NO: 399426 - DNA, 579 bp, Salmonella enterica
atggaaaagaaacccacccgtggccgggcttcaaaagtggatttactaccggaaaacgtgcgtaaaacgctgcatgaaatgctgcgtgataaggcccttccgcaggcacagatccttgatgagatcaacgcactgattgaagacgccggtctgccggaagatatgaagctgtcacgctcagggctgaaccgctatgcgaccagcgtcgaacaggtcggccacagtatgcgacagctacgcgaagcgacatcgcaactgaccgctgatctcggcgacaaaccaatgggcgacaccaccaaacttattctcgaaatggcccgtggacagttgttcaaactgtttatgtcacaggtcaataatcccgatatgcaggttgatatcgacatgctgaaaaacgccatgctggcggcgcagcgtctggaatccactgccatgtcaagccacaggcgcgaaaaagagatccgccaggcatttgccgaagaagcggcaaatgcgatcactgaagagttgcgcggtcaggatggcatgagtgaagaactggagcagcaaatccgcaacgtactgctgggcaaggcgtag

SEQ ID NO: 399427 - DNA, 450 bp, Salmonella enterica
atgactatttcaaaagaacagtggaacggtatccagaatactctgggcgatctgtacagccaggttaagtttaaaatgccgtcaggcgaagagattagcgtcatgaagtcattcgtctctgagaacaaaaccgcgctgatcgtctggattgatgatacccgctgcgatgcgtggggctggaaacgtcatgatgaatatcggccagtgactgagcttgtgtggcgtcgtaagacctacaggccgggagcttccatcattcgccgcgcatccaaaaccagagacgggcaacggtggcttaaacggaaagagaatgcgtatgtgcatgaagtggtggaataccgtgtgtgctatttcaacacagccgcctcgctggttcgccagtaccgcaaaattgaggggctggaactggtaacgccagtttctgaggtgatgaaaaatgcagagagctaa

SEQ ID NO: 399428 - DNA, 258 bp, Salmonella enterica
atgacaatttccctgcataacccccggacaagcgcccctaacaccgcagcggcgaccagcgtatccccgctggacccgtcaggctcctcaaaaacgaaattttcaaaaaacagaaaggatatttatcagaccgttaccgacaacatcattgcagcgctggaagccggtgttaaaccctggtcctgcccgtggcagcgtgtatccgcatgtctggtctgccatccaattacacaaccggagcagcctatagcggtatga

SEQ ID NO: 399429 - DNA, 360 bp, Salmonella enterica
atgtacatagcgatagatggcgatgatgtggggagaaaaataacctcatcatacttatccaactcagaagagaggttgatatacataagcaacaaattaaatgacaccacaaaaaaaatatctaaaatgctcttatccaatggatttgagataattttccaagcagcagatggtgttacagcgaaaacagacaacgaggtcaatcttaacgttgtttttgataagataaaatcctattcctttgacgaaattacattttcagctggtgtgggtgcgaatctaagagaagcctatgttgcactgttaaattctaaaagcaatggtaagaatatgatttctatttacaaagacatattataa

SEQ ID NO: 399430 - DNA, 186 bp, Salmonella enterica
atgataatggatgctaatgatgatattgataacaatttgaacaggcttaagtcagaagacagaactgtcttaaagatccaaaatgaaagtattgtgacaaataaagagattagtgataccgtttttaacaaccagtcaaatcttattattctaaacatttcgcaccattataatatgtctttgtaa

SEQ ID NO: 399431 - DNA, 462 bp, Salmonella enterica
atgaacataaatgaattggtattcatcgataattttgacaatcatgtagtggtcatgagcgaagtcgttcgactgctcaagtcatatcgccaaatgcaatatgtcagcaccgaagctggaggggttctgataggagaacgccggggacctcacatcgttattactcacatttcggaaccagggccgggtgacatcaggacacgtaatcggtttgaaagaaaaggtgaccatcatcagctgaaagtagatgaactttttaaacagtcagatggctttcttgtttatttaggcgaatggcatacacatcccgaagattttcctcaaccgtcttatacagacatgaaatcttggctgactggactgatcgcaacagagacaatgctcctgattattgtaggcagaaaatctgagtgggtaggaataaaaaacggaaatgatataaaaagtataagagagaagtaa

SEQ ID NO: 399432 - DNA, 1770 bp, Salmonella enterica
atggaggacgggcagctccatcaagtgatgacgggatgcgggtatcgctatacgcgtgcccgcaatctccctgaaaaatcgattctgcacagcagggagcgaggtgcaggatattacacgaaagaatacgcgactgatgccggtaattttaatgttgcattggtgattcatcccgaccctttcacagaactgccgacagcattcattattgagcaacctgaacagttcaaaagttgccttatgccccatgtcgccctggaagggttcctttgctatgttgagcagatggaagcagactgggattccaacgatctggaagggacatataaagaagttgatgcacagatacaccagaccctcattaattcggtatccgctgctacgcaaggggtaaatgctaagagagaactggaaggggagtttgccgcatactggcatcccagcgagacactctttcttctgtcaaacgcaagtcgggggaccgcacttaaaacctctttggcaaaattacttaagtctgatggaactaccagacaggagtacataacggttgaggaatcatccccggaggactcggaagccgttatgaccaagtggctcaaacaaaggtatttccccagaacttcgttaaaagaaatacccatcagcacgcattacatttctgtaaatcccagccgtcttgccgggatgaaatggccaccgtcttcattccgggacttactggaatggcttgaaaaatcagaccacaatgccagagatagagtcattgaaaacatcaaagccgaagggaagaaaaggtacatttttctctttgatgttttaaaccaggacatcttagctatctatgttgagttcaatacgcagtctgttgatttcagaaggtaccggaagtcagccaaaaactcaacggtcaagcttgcggcgatgttgggtggcaaaagtgtttgcacggaatatcaaaggctgggtgtcattcgtgctgacattgcgacgctccttagccggaatacacgacggaagggggcagtaagtctttcaacaaagcgtatagcgttgataggttgtggaacaattggagggtatctggccgaattattactacgcaacggagccggatgtggtaagggttctctgcatctttatgatgatgatatctacaaacccagtaattttggccgtcataccctatcgtcacatgatttcgggtggcctaaatccctttcacttgcggcaaagctccaggactctgtgcatttacagacaaagattgttggatttatggaacaattccgtatcagcgcagatgaaatgcagaagtacgacatcattattgatgcgacaggacgcccacctgtatcaaaacgcatcgctgcggtggttagacagattccactggagcaaagaccatttattattcacgcgttcaatgatggcaacggccgggcatcaaaagtctttattgacgatggccgaagctgttacgggtgtatggtttctaaccctgcaaaataccataaaggaaccgattcacggtttattgatcttgatatatcaagcgaaaaaaataaaagttgtggcagcacttacaccctttatgatgcagcagttagtagcataacgtcatctctggcgcagatggccgtgttaagtactctagaaccagagttaaagtggacttacaacgaacatatccttgagggggggcgttcgctcaggcctcaatttttgccacatcagcctaattgccctgtgtgtaatgaacataaatga

SEQ ID NO: 399433 - DNA, 1299 bp, Salmonella enterica
atgccttgggattttaacaattactatagtcacaatatggatggcttaatcagtaagctcaaattgagcaagactgaatccgataaactcaaagcacttcgtcagatcgtacgtgaaaggacgagagatgtatttcaggaagctcgccaagtcgcaattgacgtgagaaagcaagcgctgacacttgaaagtgtcagattaaaacttgagaaaacaaacgttcgctacctttcccccgaagaacgtgctgatctagcgcgacttatttttgaaatggaagatgaagcacgcgatgacttcatcaaattccagcctcgtttctggactcaaggaagttttcagtacgatacgttaaacaggccttttcatccggggcaggaaatggatattgatgatggcacctacatgcccatgacggtgtttgaatccgaaccgagcattggacacactctgcttctccttctcgtggatgcatcactgaaatcactagaagctgaaaacgatggctgggtatttgaagaaaagaatacctgcggacgcatcaaaatctatcgagagaaaacacacattgatgtaccgatgtatgcgatccctaaagaacaattccagaaaaaacaaacagcagcagattcagcacacctcataaagtcagattcggtgtttgaatctttagcattgaaccgggggggacgcgaggcttatgccgttgagtccgacaaagtgaacctggcacttcgcgaagggatcagaagatggtcagtcagcgaccccaaaattgttgaagactggttcaacgaaagctgtaaacgtatcggcgggcatctgcgttcagtttgccggtttatgaaggcctggcgggatgctcaatgggaagttgggggcccttcatcaatcagtctgatgactgcggtcgtcaacatcctcgatagagaatctcataatggctccgacctcaccgggacgatgaaacttattgctaggttgctgcctgaggaattcaatcgcggtgtagaaagtcccgacgatactgacgaaaaaccattgttccctgcggaaagtaaccataacgtgcaccagagagctatcgttgaaactatggaaagtctgtacggtattttacttgccgctgagcaatcagaaagtcgggaagaagcgttacgtaaaatcaacgaagcatttggtaaacgtgtgactaatgctctattaatcacgtcaagtgctgcagctccggcatttctcaatgcaccatccaaagagccagcatctaaaccaatcaacaaaacgatggtaagtggctga

SEQ ID NO: 399434 - DNA, 1086 bp, Salmonella enterica
atggggttttcaatgtctgaattgcatgtagtcaatgaccatggggtacggctactcagcctaaatggtggtggggccagagggatgtttacaatcagtgtgcttgctgagattgagaggatacttgcctctaagcaccctgaccaagaaatcagaattggcgattactttgacctcatcactgggacatcgataggtgggatcctggctctcggccttgctaaaggcaagagtgctcgcgagttggaatgtgttttcttagataaagcgaatgatatttttccaccaagatggtggctgttcaatctccttaaatcacttgttgctcccatttatagtagtaaaccacttcgacaaaccattgaaacgatgatcggtggtgagactacctttaaggacctggcccggagagtaatggtcccggcagtcaatctttcaacagggaaacctcagttcttcaagacaccacataacccagattttacccgcgacggtgcacttaaattgattgatgccgcactcgcaacctccgctgcaccgacgtactttgcaccacaccattgtgaagaccttggttcttattttgctgatggaggtttggtcgccaacaaccccagctatatcggacttttggaagttttcaaggacatgaagtctgattttcctgatgttgctcataaagacatacacatacttaatatcggtactaccggggaagagtattcacttagcccaaggctgctgagcaaaaaatggtggaatggctactgccgactttggggcgtgggtaaaaaactggtccttacaaccatgacggctaaccaacatctccataaaaacatgctcctgcgcgagcttacgctccatggtgcctccgataactacaccagtctggatgaagtgatccctaatgaagcagccagcgacatcactctggataatgccacgaagagttccattgaaaatctgagtgcaaggggaagacaactcgctactgtgcagttcgctcagaaccagaagcttaagagctttttcactacacctgcaaaaccctttaagcgcgcaatcgcgcaggagaaactctga

SEQ ID NO: 399435 - DNA, 1746 bp, Salmonella enterica
atggcaggtagcattattaacctttttatgtggggatatcaggacagttacagaattcacatccagatcctggcacggaatgtactgaaaaaattgggagcaccggctgatgcagaagtgctgcttgttggcgctcgccgccccagtagtaaaaatgcgaatccggtatgcgtagagccagaagatggtaagtggtatctatcattatttgaaggattgctggattcagttgaattgatttataaaagtcaccggttacagaacatgatttttggcgatgagccgagcatgcgtgacaagccagagtggatgcgtcgcgattcagtgcgaacatcggttagtaaggcacttgaagcttttgatacagagcataacgtgacgtcattttgcggagagcctagacgaatagatgactattatgttaccccagtcatacagattccaaatgacactttcgagcaattccctcctttgctctccaagcctgttgacgaaaaccaacaaggacatggatttcgcagtctgatacatgcagcgatgtatgccgttcttcgtgaggctaccgaggaattacataaccctgatccaggacgatttacccatggcagcatgagagatgccgaggaaataatacggattgctgcaaaagactttcttcacacgcccggtctctcgatcgaacgacgatacattcatactgagcttttcgatgctttgaaccttgtctcctctcttatgtatgaggggacgaaaggcataggccagctcattctcgtcgatccagataatgaggcggttgagttccaggcgaagtttgttgagccagttccctttcgtgagcctcgatgggttcggaaagtcttgcagatggcagcatcaggtgtcggcattatcgcaaatagtcagtgtatttatgggcttgggagactcaaggagtcgcacaattccagtgcacaagatgcgttcacggtagatttcatagatcattatcactgggagttgtactgtggtaaccaagcattacttcgcagtcaatatgctgtgcccaaacttccacaggaaccttttgacaaggctgccttcctggcaaattacgcgaggctatttccgttgtcgtcacaagataacggcttgcatttgtggaaccttctgatcactcaaactagtcagaagcatggtagcatgcttgtcgttgcagaagatgcagccagcgaggcgcatcggctttgcaagcaaggtactagcatcgtgccaactaggctcactgaatcactccttcgaagtgtcagcggtatcgatggaacaatactgcttgatcctacaggtctttgccatgctatcgggattattctcgacggtgaagtgaccgatgagtgtacgccatcaaggggatctcggtataattctggcgtgcgttacgtacaaacgagcagcactcgaaggcttgcgatcgtagtatcggatgatcggacggtcgatatcattcctccaattaagcgactgtgcagtcgttcaagaatagaacaatgtgtcgtaacactggaggcggcaacgctcgacaactatcatgattctcggaattggttaaacgaccatcgcttctatatcaacgctgagcaatgcgctcggattaatgtcgtactcgacaaactagatgccgttccaaaagaagtaggtcttatctattttgaaactgagagatttgaagttgacccagagatggacgaaagctatctcatagactga

SEQ ID NO: 399436 - DNA, 894 bp, Salmonella enterica
atgggaatacctgaatcacagctcgatacatggtcccaccaaggatctattacacagtctgcctcgacttatagcattataaagaatgcattagagagcgcaaacactgagtatcatggaaagaattttaaagtattccttcagggctcctatggaaacgatactaacatttatgctgaaagtgacgttgatgtagtcatatgtcttgatgatgtctactacagtgacctcacacagttatcaccagaagacaaagaggcgtacgaccgtgcatttgttcccgcaacctactcgtatactcaatttaagcaagatgtgcttgaggcgcttacagagcgcttcgggtctgatgttaaggtcggagataaggccatagttgtagcggcaaatggaagtaggcgcaaagctgacgttatcgcatcaatgcagtttcgtcgttattggaaattcaaggggcattacgactcacaatacgatgagggcatctgtttctttaatagcgctggtgaacggattgccaattaccccaagcagcattcagaaaatctcaccttaaaacatcaggccagtaataaatggctaaagcccatggttcgcgtactgaagaaccttcgaagtaaactcattgctgacggaaaattgaagtcaggacttgcaccttcctattaccttgaaggtttgctctacaacgtgccaaatgaaaagtttggcaccagttattctgattgttttgtcaatgccatgaattggattcagacagaagcagataaagacaagctgctatgcgccaatgagcagtattacttgctttgggaggggacacatacctcatgggagaaagcagatgcggaagcgtttatcggcgctgcaattaaaatgtggaatgaatggtga

SEQ ID NO: 399437 - DNA, 963 bp, Salmonella enterica
atgacttattctgtttcgccgtcatcactgctcaccgagtacgacaacgacaatatatgccgtgttctcgcacttgatggtggcggtgcaaagggtttttatacactgggtgtcctcaaggaaattgaggctatgcttgggtgcccgttatataagaggtttgatcttgtgtttggtactagcaccggtgcgattattgccgcgcttatcgctttaggatacgaggtagatcaaatacacgcactgtataccgaacatgtaccgcgagttatgtccagccggtcggctgcggcaagaacaatggcgcttcaggatttgtctaaagaggtttttcaagacaagacattcgaagatgttctgatgggtattggcatcgtcgcgactcgatggatgaccgaaagaccaatgatcttcaaaggtagtgttgtacaggcccatggtcgcaagggaaccttcagtccaggattcggggtcagcatcgctgatgcagtgcaagcgtcttgctcggcttatccattcttcgaaaggaaagtgattgttaccgcagcaggagataaggttgagttgatcgatggaggttactgcgcaaacaaccccaccttgtttgcaatcgccgacgccactgtcgctctgaaaaaagatcacaaggatatccgggttataaatgtcggtgttggtatctatccagaaccaaaaccaggtctccttatgcggattgctaagaaatggctcgcagtccagttgcttcaaaaaactttagagatcaatacacaatcgatggatcaactacgcgacattctattcaaagatattccgacgattcggatcagcgacacattcgaacggcctgagatggcgacagatttacttgagtacaatttagataaactgaatatccttcgacagcgtggtagagagtcttttggagctcgtgaggcacaattaagagagtttctaatatga

SEQ ID NO: 399438 - DNA, 246 bp, Salmonella enterica
atgaaaaaaattgcgattattggaagcagtggaggcaacctctacaacctgggtggcgccgagccagagaagttactccaggagatttatcagcagtgtgaggctgcgggcgtgaatgtggccgccgtacagtttatcgcggcagaagcctcgatggacgtcgccaaaccggataccccggcatcggtttatgcattaaccacagaaaaccacagcgcatatttcagggcaaactttcggaggtaa

SEQ ID NO: 399439 - DNA, 915 bp, Salmonella enterica
atgttaaatcagcatgctaatgactatattcagctacggcaaatgggtggttttaagtacaagcaacaggaaatatatgtacgatcatttgtccggtttgcatgtgagcgtggagactcatacattcacaccgacacagtcatagaatgggctgcgctgggagcctccgctgataacagggaagatcggttgaggtcaattgttgccttcgcccggcactgtcgggttgaagacgactcccatgagctgccaccaacgcatgtgttttcttccggtcgaaaaaaacgccctgttgcatatacattttctccggatgaaataaaacaaattttagccgcggcacttaaactggaaccctgtgcatcgcttcggccagtcacgtattacaccctatttgggttactggcatcaaccggactgcgaattggggaggcggttcgattacgtcaggatgacattaccgcagacggcttattcattcgggaaactaagtttaaaaagaatcgaatagttccaattcacaccaccactgtcaacgtgctgaaccaatatctgactttgcaaaagcaactgggtgtttccagcaaacagatttttgttggaatgaacgggcaaccacttcggcaggcttgggcacgacacgcatttcaccaggtgatgacgaccattggccttgatggcgctcgctatggatattgcccccgactgcacgatttgagacatacctgggcgattagagctctcgaatctgcgccaactgacactgaacaggtcaaccaacatgtccgggcggtcatgacttatcttggtcattcgagtgtggctgccagttattactacatgcgcagtacgccaatagttatgggccgcattgcgaatgcctgtgaggctcttgaacggggggatatatcatga

SEQ ID NO: 399440 - DNA, 1002 bp, Salmonella enterica
atgacaccgctggcgccgcatctgacaagttttctgctggaacgtttgaaattacaccaacaggccagcccaaacacctgcgatacctacgcttatgcattccagctattgcttaattttgccagcaagcggcttaagactgccccatcctctctggctattgaacaactggatgagcggctgattctggactttctgactcaccttcaactggagcgtaacaatacaccacgtacacggaattcccggttagcagctataaagtcatttatgcgctttcttcaatatcgggtaccaactgcattggaacagatcaaccgcattcttgctattccaatacagagaatggatcgtaatttggtgcgccatctaaaacgggaagaggaacaagcattactggatgccacagatccaaccacccgtataggcattcgagacagggctatggtgcatcttgctctggctggggggctacgtgtgtccgaattagtagggctcagaatggacgatctacatttcaataattctaatgtggatttacttgttcgtgggaagggacggaaacagcgtgaacttcggctctggaagagcgttgcgcagtctattcgtgcctggttatctgtacgaggccacgcgactgttcctgagttgtttttaaacgctcaggggaagcaaatgacgagagccggatttgaatacgtgctggagcggtgtcgggtaaaagcagtaaagcaatgttcttccttagttgaaaaaaaactgtcaccacatgttctgcgtcatacatgcgcgttgacagttttgaaagcaacgggagatttacgccaggttgccttgtggctggggcatgagagtactgcaaccactgaatgctaccttcaattggatccactggaaaaactacaaagtatcgctgggtttgtaccaacctcactgaagccaggtaagttcaggccatcagaccgccttattgcgatgcttcgaggggataatattatgtag

SEQ ID NO: 399441 - DNA, 225 bp, Salmonella enterica
atggaatatgcgaacaatcattcagataatcagacacttatttcggcaagagaagttctaaaacgtgtgcagcgtagcaaggcttggctatataagcagctttctaagaatgctttcccacgcccagttaaaattggaactcgcgcaatttcatttattgagagcgaagttgatcactggattaaagagcaaatatctgcatcccgcagtggaaaaactcattaa

SEQ ID NO: 399442 - DNA, 1005 bp, Salmonella enterica
atgtcaaaagaaaacacaccaatggaaccaagcataaatataaaggcagacttcactgagatattaaattcatcaccaaagggcgttaagtatatattcaatattctcttcggaaaaaaacacgcagaggccgagagaaggattaggctatcgaacgctcaagattatgcagatatgaaaaaaatcatatctggagaagcaacatatgataatgagaagaaccaaataacaccttctaaccaagacattaagtcattaattgttagcgcattgcaggatgaggaaatttcaaatcttataggctgcatcagaagcgcctcagaatacattaaagatgatactgataacgatggtggtccatcccaagactttattaacagatggcgaagcgatgcgaaactaatcagtgaacagtctatccagtacgtttgggggcgaattctagcggaagaaataaacacacctcaaactgtaagcgtaagaacccttgatgtaataaaaaacctatcaaaagaagaggctgaatatttctcagaggcacttgactttatattttacgattcttatttgattgataatggagataccaagaatccattcatctcaccagaaaaaggtcataaattgagagatgcaggattaatagttacttttactcctggaatgtatcgctccgggacatgggatacacaacgttttgttctcagcggagccaccataccaaaagtattctacatcagcagttctgataagtattactttatcgatgcaggcaaaataactgacgaccctaaaattctggcatgggagttaacaaatgctggcaaagaattatatgaaattctaaagaaagatcataaaaccaaagaagaatcagtaaaaaaaattattgactggatattaaacagcactaaagcttctgagttttactatggagatattgttaagcattcagacaatagcctgtcagttgagaacttactgactataagcagaaatagatag

SEQ ID NO: 399443 - DNA, 183 bp, Salmonella enterica
atgttttctcttattaaatcacgtaaagttttattcataacaactcttctgctgttgtcgtctgctgcccagccagcgttcgctctggggtgcttaggggacggtggtagcactaaagaatgtgcagaggtttgttccctggcggcaggtttaggcccccttggttttctcatttgcttttaa

SEQ ID NO: 399444 - DNA, 123 bp, Salmonella enterica
atgtttgtaatccatctggaaggttatctggctgatagcatcaagcgccagttgtggccattgcttcagtacccagtgtgccactacagtgccactacattggtggccgtaggccaaaactga

SEQ ID NO: 399445 - DNA, 279 bp, Salmonella enterica
atgatccgtaacgtggacatacgacctgtttttaagcctcacggggcgttctttacgcgggcggacggctcaaccgcgttcactgccgtgacagggggcttgtgtggtgttacgcgcccattgctcttaccttccaccactgcaacgaatcgaatccagttgcggtctttcccgcatgtcatcgtactggcggcgacccgcgaatttgtgcctgtctttccagactgtcagaacgtttttctgaacaactgccgcgtggttagtgcgtcgttgatatga

SEQ ID NO: 399446 - DNA, 294 bp, Salmonella enterica
atgaaaaaaatcgacctgacaaagcaggcccgcgatcgcatgtgtactgtacgaattccggggatctgtaatttcaatcctgaaaccagtgtgctggcccattatcgcatgagtgatacctgtggaacgggcattaaaccacatgacatgcaaggtgccattgcatgcaactcttgtcatgacgtaatcgatggtcgtgtgaaaaccgatattgatcaagacaccctgaggctatatcacgctgaaggtgttttccgtactcaacagatatggagagaggaaggctttatatga

SEQ ID NO: 399447 - DNA, 1293 bp, Salmonella enterica
atgagtaaagaatcatacccaactggcgttgagaaccacggcggaaaactccgcatctggttcaaatttaaaggtcggcgtgtcagagaaaacctcggagttcctgacaccgccaaaaaccgcaaaatagccggagaattacgaacttcggtctgctttgccatcaaaatgggaagttttaactatgcagcacaatttccggactcccctaacctcaggatgtttggtctggggagaaaggatatcactgttaaagctctttcggataaatggctggaactgaaaaagatggagattagcgccaatgcttttaaccggtatgagtcagtggtaagaaatatgttaccaagaatcggggaaaacagactggcttcatcggtaacgaaagaggatttgctttttatcaggaaggagctgttaactggtaacaaaataccgcagaaaaatcgtcttcctttgattaaggggagaactgttcctacggtgaactactacatgaccaccatatcaggtatgtttcagttcgccactgaaaatggctacatcgaaacaaacccatttaacagaatctcccctttgaaaaaagcaagggcgaagccagatccattaacccgtgaagagttcgtgcgtctgattaatgcctgccagcatcagcaaacgaaaaatctttggtcactggctgtatacaccggacttcgtcatggagaaatcgccgcgctggcatgggaagatattgatctcaaagccgggacgatgactatccgccgcaattatacaaaaatgggcgaatttactctaccaaagactgacgcaggaacagatcgcgtaatacatcttatcagtcctgctattgacgcacttaaaagccaggctgagttcacacgtcttggtaagcagtacctggtggaagtcaagttgcgcgagtatggaagggttgatcaccatgcctgtacgttcgttttcaacccacaaatcccccgaagcaacagcaaagcgggttataactacgctgttggttcgatcggggcaatatgggattcagctatcagacgagcaggaatacgcacaaggaaggcctatcagtcacgacatacatatgcctgttggtcgctttcatccggagccaaccctacgtttatcgcatcccaaatgggacattccagcgctcatatgatctataatgtttatggtgcctggatgccagaaagtagtgctgagcaagtcgccatgctcaatcagaagttgtctgattatgtcccaagcgtgccccataaggatgtagctaaagcataa

SEQ ID NO: 399448 - DNA, 249 bp, Salmonella enterica
atgaatacaccagtgattatttatcagattgcccccagcgaatgggtatcaaaaagcctacttatcgctactaccggcataaaggcaggcactattgaacgagcacgtaaaaaatcatggcttatcggtcgtgagtatcgacactatgcaccggaaggtgatcccggaccgaacagcgaatgcctgtacaacattgaagccatcatgtgttggataaaaaaccagaagcagccaggcgagttaagttga

SEQ ID NO: 399449 - DNA, 147 bp, Salmonella enterica
atgaacaaggtgtttgaaatctgggtgcgccagcggtacggaaaccgctacgacctgacgcaggatatcagtggatcttactgtcgtgagattgtacggcgcatgtttgatgtatggcgctacttacgtggcctgagcgtggtgtga

SEQ ID NO: 399450 - DNA, 462 bp, Salmonella enterica
atgagcaaaattcaaaaccctgtcgtgcttatccataagcgcaaaaacagtgacacctacgccgttgccatcaccagtggcagccagaactatcacgatgcattgttgatggcgtcaatggagcctgacatggtcggcgatgacatcgatacctggagtaaaaccggctactacatggcggcggagattgagcgcttacgtcagcagcttatcgctccgctgagtattggggaattattacaacgcctggaatcacagactgatgagaaatgggagagagcggttaacgatgccaccactggtaaacagttgaccatcaccctgccagataccagctcgaaagcattctggagcgatagcggtaaaacggaggtattccacccggaaagctataaacgccaggtaaaagaagcgattgaacgagcttgtgttattgccgggatcggcgtggaggtgaagtga

SEQ ID NO: 399451 - DNA, 225 bp, Salmonella enterica
atgaaaatcaaataccaggactacggcgctgtagcaaacatcgttatcaccagcactgtgtttgagttccgcaagcataaccgtgttgtcgacactgctcttttttcaaccttaggaatagttgcaaatcgtagtggaatattctttatgaagtcggttttatccggtaaatctcgcgatatgttgcgggcttacaaaacaatcctgcgggaggagcaacgatga

SEQ ID NO: 399452 - DNA, 480 bp, Salmonella enterica
atgtcacagcgatattctgaccttgaggcgctaaggatggtgctggttgatcttgagcgtaagtttcctgggtctgtaattatcgacccagccactgggggtgtaagtctcattgggtggtcattggaacaatttaataattccaaagatgataagtgcgctaccgataacatcgaaggcaatcccggccaagctggcttttctggggtaaccggacagcttcccggatgggcggccaaaaactccggggatcaatacctcctggtaggggtggttaatccattcgccgactccccacaaagcgcagccaagggaaataagtccagtacctgctgtcgggtatgcagtgaggatcccggttccattcaccaagaagacaaagaatccgcctgcaataagtactttgtaccagtagttaagagcaagtttggcgatcgggttttccatgttctttctcggctgatgttttggaaggagtaa

SEQ ID NO: 399453 - DNA, 912 bp, Salmonella enterica
atgagtagcaaaattctcggtaacgtttgggacgcttgtgccgctcatgatgtcaagggggctaagctggtaattatggctcgcctggctgattactcaaacgatgatgggatctgctatcccagtgttgaaactatttgccgacagctgggtttgggcgaaagcacggtaagaatggctattgctgaactggagtccgcaggttggctgcgtcgtgaatcccgccgtaaaggtaatcgcaacacttccaatctttatcacctgaatgctgaacgtctagaggctctggcccgcgttgagaaggacaaggtagctgctctgaaacagcagcgcagggctaacggttttcacccgtcagattctgaaccttcaaaatctgaaccgtcagattctgggcgttcaaacggttttcacccgtcagattctgacaaaaaaggagttttcacccgtcagaatctgaccccagatccacaagatttaaaacatgatccacaagtaaaagatcatgaaccacaagaagtgcgcgcaaagcgccagaaaaaatcttcgttcgacccggcagggctaaaacctgaaaacgtcagcgctgaaatctggcaggactggattaaatttcgccgggagaagcgccagcccctgaccgaaacaacctgcgcataccaggctaagcaacttgcaagccatcagaatgccgatgaagtgatccgacgctcaattgctggaggctggcaggggttgttcccggagcgtgtgcccaacaagcccgcaatatcactagatgaaaacgaagcgctgaccgcaagtcaaccgcctgctgtgtcatggtgcacaccatctggagacggaacagcggaggtatttatcaaccaggccgctatcgagcgcatgaagcgcggtgggtatcgccaatga

SEQ ID NO: 399454 - DNA, 336 bp, Salmonella enterica
atgatgaaaaacaaacaagccactatcgcaatggaaaaatatattcgtatccacgaagaaattaaaaagcaggagcgcgagagcattgcagacgatcctgatggaataggttgcggggctgacgcatatctttttgaggaactggctcaggcgcgtgatgaattctgcgaggccataactccatcttattatgctgaattgctgagacaggttgccatgcacagggataacacctgtgaactgattcttgaaaatatagtgttgaaagcagagattcgccgtcttggcggcaatccggattttctggggaacgtggattcagagggtaaggcctga

SEQ ID NO: 399455 - DNA, 540 bp, Salmonella enterica
atgcagacagggaaaaaacttaagtatggtctttccgctgccatgctggcgctgattgccgccggtgccagcgcaccgcaactactcaaccagtttttacaggagcgggaaggaaatacgctggtggccgttcgtgataacggcggcgtctggtcagtatgccgtggcgtgacccgtatcgatggtaaacccattgtgaaaggtcagcgactgacgcaaagccagtgcgaccattacaacgccatcgagcgggataaagcgctggcgtgggtcaataaaaatatccatgttccactgaccgggccgcagaaagtggggatcgccagtttctgcccgtacaacattgggccgggtaaatgtctgccctccacgttctacagaaagctgaacgccggagaccgtaaaggggcatgtgcagaaattcgccgttgggtatatgacggcggtaaggattgtcacaaccgggccaatcagtgttacgggcaggtaatacgccgtgatcaggagtctgcgctgacatgctgggggatagatcattaa

SEQ ID NO: 399456 - DNA, 465 bp, Salmonella enterica
atgaatcgtataaccgctggcgcaatagtctcgttgctgattgtcgccgccgcgctggcgtggactaccgaccactatcacggtaacgccgtgaaatataaatcgcagcgcgataccgctactcataagctggtgttggcgaacgaggcaattacagacatgcaggtacgccagcgtggcaatgcagccctagatgcaaaatatacgaaggagttagccgatgcgaaagctgagaatgatgctttgcagcgccgtcttgctgctggtggccgggtgcgcgtcaaaggacgttgtacagtgccagccagcgccacacccgccagcaccggcagcgtgggcgatgctgcctccgtcgagctctctgcagttgctggacaaaacgttctcgatatcagatccggaattatcagcgaccaggcaaaactgaagtatttgcaggactatatcagaacacagtgcaggtga

SEQ ID NO: 399457 - DNA, 324 bp, Salmonella enterica
gtggctaaaaactatgtggaagacggtaaaaccattacgttaacggcgtctgctgcggtaaagagcggaagcctggtccaggtcggtgacatatttgtcgtagcggttaccgatattgccgccgggagcgccggaaccggtatcgcagaaggcgtgttcagcgtaccaaaactggcaacagaagacatcgcagccgggaaaaaggtgtatctgaaggacggagcagtacagacggatgcgaccggcggactgccgtatatcggggtgacatgggcaccggcagcaaacggcgacgggaccattccggtaaaactcaatggctga

SEQ ID NO: 399458 - DNA, 1428 bp, Salmonella enterica
atgagcgttgatactcaacctgctgcacgacgcagccatacattattttctgaacttacccagcgtgaagaacggggaaactggttcaggattgaagatttaccgggctcccgtaccgggcggcctgcactgaaaagagcgttgatgccttacattgataatgttatggctcagctgcttggtactatgccgatgagcgatcagtcgtttctgggatgggagcagaaatacctgacatttgattttttcatccgaagcagtagctatgcactggagattaaataccggtacattatttattgtattgaggacggactcagaaataacaatgaagcgtatatattaaaaataaaaaaacagtgttgcgctgaagatgaagatattttcaattttgtaaaaaaaattaaagccagggagcccgctaccgaaccctctgcattctcgagctcaattccattcctgtctcaggatgagcgtaaaaaggttatttataaattatatgacttttataaaatgcaggccgagccctttaaaacctcagagatatcagaacaattcggcatagatttgcatatcatttctaggtatggacgctcttacgttagcgaactggctgatcttctccttgacgaagatgtttctgatgatttagcctactttgaatggaacagaacggtaacgaccttcaagaactcactgcaaaatacagcaagatcaaaagaaattggcgagaaaaaagtggttcttgccattgattacttaagccggaataaccgtgaagtgacatattcagaaataaccaccatagtctgccttgaccacaggctagttaaaagagtggtaggtcaatgggaaaagtgcactgataccaaattggtgaaaaaagatgcctggaaaacaatctctctggatgagctcatcgccacactcgacccggttcttcagacaataccgctgacgtttctggactcgcctgcaacaggtaaaccaatgaccaatgcacagatacgtatgatttacgagattaagcaaccgggtctgagaaacacggcattttttatcatggcgacctgttacagtaacagaagaaatgacattacttttttttattacatgccccggtttcttaacgcaactggcctggatgacataggccagtttgactgtgataccttttttgaggcgtatcatcaaggtgaccttatcccggaagacaatataggacagagggctagaataattcagacatattttcggttactcgttaagcaaagcgattatttcagcaaacttaacacagaccagcgagaaaaatttgccccctttgcactgccgcgagtgtccgacgatttattctggaaaaaatctaccctgcacagagctgtctcacaggaacaaaaaaataaaagaaagtctaaaaaagtctaa

SEQ ID NO: 399459 - DNA, 264 bp, Salmonella enterica
atgctacaaagtatgatctatttgaacatattacctcaccggatagctaattactttttcaattgttttttttcaaattttaccagcgtaataaagaatcatagttacaataaaaataataacaaggtagctagcaaggaatttgaatatacgtttcatatcgtgattgtaaactttcataatatcacctataacagaacactaaagatagcagcactaatagcacctaaacagattccagctatacgcattaatgctatatga

SEQ ID NO: 399460 - DNA, 519 bp, Salmonella enterica
atgaacaaattagcacgcttattattaacagccagctcaattgcacctgtttgcgcaactctattttttattggatatgtaaaagatacggtttggctgatgcaatatagcttatgcgttggcatagcaagttggttattagcaataggcctgattcaatatgctgagaaacaacttgaacctctgacaaaaaatattagttcagtttctcccgctaacaaagaagtaactaattatttcttaagctatttattccctctcctaggaacagactctattgctgaaaataaagcatatgcgttattcttttatttgtcattgttattttacatcagcttttccgagaactataactttaacccagtattgtcacttatcggttataaattttacgaagctgaagatgacaccggcgtaggttttgtattgatttctaaatcagtcattactgatattaaagatatcaaatttacagttattcaattaacagactacacatttctacatgttaaaggataa

SEQ ID NO: 399461 - DNA, 885 bp, Salmonella enterica
atggcactttttgcagtaatagataatacaattgcaacgagaattgttagagtcgaacttgatgcaacagcaagtacttctgttacggccattttccaacaacagcgtcaatattttgaaagtcatcataacaatatgataccattctatgccggttatacaccaaaacatagtgagtgttttgaaatacaaaactttactgattctgcacgcctgattgacgcagtcaataggcctaccgccgtgcctgtctgggatcccagccaaattgatattggttatattaaagcattatttgttggtgttgacgcgccagcaaaccccaatattattgcgctacaaactttcaacaaaaaacaaatcttagatacctcaaaatcattctttggaaagctttttgcaagcaaaactacctttagtaaagctaatagcatcggttttaatgttgatgataaactagttgcaataattatcaatgatacaatacgatttaagagtttctttaatctaagaagcatttttgacatgtcgtcctatttttctgctgctactgaccaagaacttaatgcatttagtcaacttagtgtattttctactccccaaggttttgatctaaaatccgttgcagatacagtgataagaaataaagtaacactaataaatcagactgggatgctaacaccccaaaatatgtcaaagtttaaatccgaagctgctaaagtcaatttccccttacaaaccataatagttggcggtgttgagaaaattgtcatgccttcatcaaaaaaagaaataaaagcccttcttgactttcttgaggaagacatttggatttctggaataagtggaagacgctttaaatcgaattcaaagcgcccaatataa

SEQ ID NO: 399462 - DNA, 348 bp, Salmonella enterica
atgcgtgatatgtatgaagtgatggatcgttggggagcttgggctgcttcagacaatagcggagtggactggcaaccggtagccgctggcttcaaggggcttttacctcatggcaaaaagtcccggattcagtgtgatgatgatgaggggctcatgatcgatgggtgcgtagctagattaagaaagtacaaaccagaagagtatgagttagttatagcccattttgtggtagggatttcattgcgagccattgctaagaagagaaagtgttcggatgggactatcaggaaagagttgcaaacatcgcttggtttcattgaaggcattgtttgcactcttgccttttaa

SEQ ID NO: 399463 - DNA, 705 bp, Salmonella enterica; identical to SEQ ID NO: 8686

SEQ ID NO: 399464 - DNA, 507 bp, Salmonella enterica; identical to SEQ ID NO: 18147

SEQ ID NO: 399465 - DNA, 201 bp, Salmonella enterica
atgctgaaaggtgaaccgtcattcgcgtctctgctcgtcaagcaaagccccggcatgcactacggccacggctggatcgcaggtaaggacggcaagcgctggcacccgagccgctcacaggctgatttactggctggcctctctactcaaaagcagggggaatcatggctatcgaagctgtttccgcgactgttccgctaa

SEQ ID NO: 399466 - DNA, 480 bp, Salmonella enterica
atgacaatcaataatttgactgagaaaagccgtttcaccaaagagcagttaatcgagcacgcgcagagacatatcacgcatgacgcgtggctaacatcgaaatttggtaccgaccacaaaacacccgcaactgtagcactagctgaaatcgcgctggcaacattaatggccgcgccgattggtgcttttcatattgctaatcagcaggtcgacggaaccacagactacatcaaggatggggagtggcctgtagacaatggggttattgaggtttatcgcatgccactaatggaagggcttatcactaccgggcaatgtggaatttgcgctgagtgcgtcccactggtagacggaggttcagggtttagcaattgtgccgaagcgcatgcagcacagatagatgatttactggtttgcgatatgtgcggccacatattcgaagtaaatcgcaccgctcttattaagggtggtctggaatga

SEQ ID NO: 399467 - DNA, 282 bp, Salmonella enterica
atgagcattcgtatcgagataggtaataaatgggttattaccagcgaccaatatcaattcattttgaatgaaaagaaagtcgttaagtccggtaaaaaagctggtgaagaatggctcgaaactatcggctattatccgaagattaaccagcttatttccggcctgatacaccatcagattcatggctcggatattactgccattgacgctatggcggtagaaattgagcgggtagggcaactatgcatagcagccattcaaggggctagcgttgatgcatag

SEQ ID NO: 399468 - DNA, 570 bp, Salmonella enterica
atgacttttaaaatgagcagcaaagcgcagacaattaaaattttcaatctgcgttcagatactaacgaatttattggtgcgggcgatgcgtatatcccgccgcacactggattaccggctaattgtactgatgtcgcccctcctgaaattccgaccagccatattgcgatatttgatgctgaaacacagacgtggactctgcatgaagaccacagaggtgaaacggtttatgacacaacaaccggtaatcaggtttatatctccgaacccgggccgttgcctgaaaatgtcacatcagtttcgccagagaatcaataccagaaatgggatggtaaggcatgggtgaaagatgaagttgcggaagctgcagcacgacttattgaagcggaagggacaaaaaacaaccttctgcaaatggctttgacgaaaatagcgccattacaggatgcagttgagcttgatatcgctacgagtgaagagagagcgcagctcaacgagtggaaaaaatacagggtactggtaaacagggtggatacatctgcgcctgactggccggatataccacgctaa

SEQ ID NO: 399469 - DNA, 930 bp, Salmonella enterica
atgagtaaaaacctgtcatatatgttaaattttttatatcaaataaaaaaccacccagatattctctcttacagaaaagttgtgcttagtgacgactatggggcttcacttggtgattttagaccaatacatttaggtatcggtccagataatcgaatgtcagcaaatagagtggtcatggatctgtgtttgtttatgctgatagatgccttaatagatagggataatcctgaccttgttggcgaggattttataaccaaatataagaaacttgatgctgaaacaacacattcatttatacaaaaagaatgttttcgattaattagattaattagaaatgcaatcgtccatgataatgaagctgtaacttttgaaggtgaacgtaaaaaaataaaagaggatgaggtaggaatagccacttatcaagatacaagaaaaatgcttgtcaatttaaaaggcaagaaaaaagacgaaaaacttgatatgtatcttttaggtaaggaatatttaaattttgtcatttggtttttagtgttcgaacaaaaccctcaaggatatagcttattaattttgaagagtgcttttaataaattaatatcaaatataaactccatttcagataggatgggggattctataaaagaatgtccgagcctttcatcctctgtgctattgaaagggttcaataggcatgtctttttcaatgctattattacggaggataatgaaaacattttcataaagattaaggattattattcaccttgctgcgactactactgggagagtggttcagatgtttatttgttacctctagagtccttagctattgataaggaaggcttagggaaagtaaataaaaataaactctctgagttcaaagtttcgaagatatttctgtccaaatatttaaataaatctataacataa

SEQ ID NO: 399470 - DNA, 705 bp, Salmonella enterica
gtggcattaggtttgctactcaacggtcttgttgaggacattttcattaatgatatagacccagcactctatgctttttggtctgccgttgtacatcataacgaatctttatgtgaaatgattgacgaaatccccgtaactattgagaactggcacatacaaagagacatactacttaataatgataaatatagtatgcttgaagtcgctttatcgactttctttttgaacaggacaaaccgctcaggaattctaaaagctggagtcattggcggtaaagaacaaaaaggaaagtggaaattagatgcaagatttaataaacaggatttaataaaaagaataaagctaataggcacctataaagataaaattcacgtatcgaatcttgatgctgtagattttctgatggctcaaaaaagctcattacctaagaaaagccttatctatcttgacccaccttactatgttaagggtgccgagttatatcgtaatttttacttgcatgatgatcatgtaaaaattgctaatactttgcgaaatatcacgcttccctggattgtttcctacgataacgttgatgaaataagagaaatctatcggggtcttaacatggctgattattcattaagttatacggctcaggataagaagaaagggcttgaggtgattatttataatgacggggtaaatatccctgagatttga

SEQ ID NO: 399471 - DNA, 1692 bp, Salmonella enterica
atgattaaagatattggcttcaaaaagttcaagaaacttatcgacatcgatttttcattcgatgaggatattaacatcatctcaggaaccaatggcacatgtaaaacaacattgcttcacttagttagcaatggttttcaaatgccacctactcggtccgcaaactattcaaataataattgcctcaaagtaattaaagctataaataaaattgccaatccaaaaatggaagcaatcgtcagagaatcaaaaagctatacagaccctgcagagggagcaaaaggaaacctcttttccataaactatttagatggaagtgagttgggctttagaaaacataactcccggaatccagacgaagctcaacggtatgcgattaagccattatatccaagaggtggcccaaaacaatccctcccctctaagcctgttctatatttaggtttatcacgattgtttcctattggggaaacaaaggatggggaccttacaaaaattgctttaaatctacccgatcaatatgtaagttacatatcccaactttacaaagatcttctccaaataaacataactaacattgaatcaaataatatcggtgattttaagtctggacctttatttgacacagataatcccgaaattgattcaaatacgatatcttccggggaagataattcgtttattataataaaagctttagttagtttaagatattacttcgaatcattaattgaatctaatgatattaaagaaagtatattgttgattgatgaattcgatgcaactttacacccttcattgcaaataaggctactcgataaaataaatgaatacgctaaggcatataaaatacaggttttctttaccacccatagtttaactttattagaatatgctttcaccaagaaatttaatgttatttatctaatgaataacatgagtaaagtcttttgtcttgaagatccagactatctcaagatatcgatgttcctgaaaaatcaaaatagagatgaaacatatactcgtaaaaagataccactcttcactgaagatgaagaagctcgtttctttctcgaagaaatattttctttttggatacacaaaaagcctgaaatggcaatagtaagaagttatttccattttgtagaatgctttattggggctgataacctaagaacgattttcagagatccgcatttatcagaaacttcattgaaatcgatctgtattctcgatggagatcatcaaactgatttaaacctaagtactattgcacttccaggctctttagctccggaagaattattttttgaacatgccgaattaatctataaaagcgatgatgaatctttttggatcaaccctgatatatataatcaaggttttacaaaagaatattatttaacaaaaattcaacccgaaatactgtctattgaaattgattaccaaaataaaaaagaacttggtcaatcgactaaaggttttaagcgagagagaaataaggctctttttaatgataatataaacttcttccgcatggttttacgcaattggttagagagggatgagaactataaagctaacgaagccttttataaaggattaagaatcttattccaaaaagtttgtgctcaaaatggtatcgatagaaacacatggaattttgaatttaaagaactatcagatcattaa

SEQ ID NO: 399472 - DNA, 444 bp, Salmonella enterica
atgccgaatagatttttcatatactcaatattcgtaccaaaaaacataattattaaccacataggttctaatgcatcaatcccaaatttcagtgatgattccaatgcaactacagaaatttttttgatttttgactcaataagaaaagtttcactttcctatgctttcactgataatagactggcattagaaaaatgtaattctgaaaacaagggtgtcggagcagattattttgaatatgagagcaacatcaatccagaaaatacaataaatttaaatgacaatgattataatttttcatgtaacattgagcatgtaaaaatactcaaagatgagctaacaaaatcttctgaaagcagagagaatatcaccgatgggattaaaaaaattgcttttgagctaattccatcacctccttcaagcagcagtacctacaaaccatag

SEQ ID NO: 399473 - DNA, 288 bp, Salmonella enterica
atgaaaattgttcagttatattatttttatgaattagagtcaattgcagatgtaatattaaataaattatttgaaagaatagaaagtgagtttagtatttttttcaatgcaaataatattttttatctgaaaagatgcgtgaaattaatgattgatctagaacgagttagaattaacattgcgaatatatataccaaatgctgtaatggaaatgttgataatggtaagaaactacaactgtatattaatgaaataaaggataaaatgtatttgatagaggttgaatga

SEQ ID NO: 399474 - DNA, 297 bp, Salmonella enterica
atggaacgtctacccaccatgccgcacgatgcggtatttcgacagatgctgatgcaaaaagaggtcgcccgcgactttctggctatccacttgccagaagactttcttgcaatctgcgatctggattcactgaagctggagtcagggagttttgttgaagacaatttacgcagccgctattcagatatcctctactctctgcatacccaacacggccccgggtatgtttacgcgctcattgagcacttatgcggtgcaccgcataaatgttcttatgcaaagaaaatgattatgtga

SEQ ID NO: 399475 - DNA, 546 bp, Salmonella enterica
ttgcgatgtttccagagtgccatcctggcccgatattgcgcagcagcaataccatatatcgaccggcattcgctggttattttcaatgctgattttgattcgcggcttctgaagcagacagtggtagcgcatagcgaccctgccagctggctggaccggggaggcccacctggcattgtgcgccttggtggcgttatttcgccggcacaggaaaacctctttcacccccgatggctggcgaccgcgctggaaacagcgaaagatatgctctggaactaccgtctgctgagcgatcgggaatggtccgggcggaatgccgtgccgctcagtgcgggcgtcaatggcatttatctctcacgggccaaccttgatgttgcttttgacgacagcggccgacagataaatcccctgactgcgcgtctgacggggaacgtagcgggggtaatgaagctgtttaatcgctgtggctggctagcagagcctgaatctggtgcctccctgccccaccagtattcgctgatgaccggacagggggggccaggatag

SEQ ID NO: 399476 - DNA, 1356 bp, Salmonella enterica
atgcctggattcagttatggtggtaaaggtgatggtacaaactggagttcagaacggggaagtggtccggagcctggtggtggttctatggggaacagcggaaacaacgacagagccaccgctcctgacagtcagattaaggctatccggagtgataagaccgcgatggcaaaaatctcgaatgtgctgaaggcggcgcgcaaaatcaatccaaatgtccatgccaccgtgatgaggttgacgccggaaggtattatggtcgttagtctggaggggctgaatgcagaccaggctaaacaggcaggtctcaccgggctggtgatgggtattaccgtgccaggctatgtcggtgctgtaggcgatattgatactggtcataagttcccggttaaaaataccgaaaaaaaatatgcgacggaaaatggctcttcactggatgacttcatctttagtggaaatttaaccaatacaatacggaaatataaggactgggcgtccggtgatgagaaaacttactattatacacctaggaagatgcctttaggattactcgatcatcttacggtggtgacaaaagaaaacgtggaaacctacactttatatcgcaaagataaaagggtgatgcctatctatcaggtagtcgtgactgacggcaatctcggtggaatgaaaataacatcattaggtaatgaaaacgcattctattcaatagagtgggttaaaaaagttataacagatatcagcactgtcagaaaagaggcggaaggtgaagttcttaaaaatacagctgcaattatcatcagcgttggtgataaagcaggagcgtatctgggggataaatataaggcactgtcccgtgaaattgccagtaatattcagaattttcaggggaagcggatccgcagctatgaacaggcgatggcatcaatgaataaactgatggctaatcccaatatgaagatcaacgctgcggataaaactgcgatcatcaatgcatggaaaagctttaatgcagatgatatgggaaacaagttcgcggcgctggggaaaacgttcaaggtcgcggactatgccctgaaggcaaacaacgtcagggagaaaagtctcgagggttataacaccggcaactggggaccccttatgcgggaggtggaatcctgggtgctcagcgggatagcctctgcggttgccctggccgtcttttcagccactctgggggccatgctgatcgccgccgcggtgccggctgttgttgtcgggataatcggcattattgttgcagctctgatcggtgcgttgattgatgataaattcatcgacagactgaacaatgaaattatccggccagctcattaa

SEQ ID NO: 399477 - DNA, 534 bp, Salmonella enterica
atgcctggtaaaagcggaaattacaggtactcaaacagaattttactgatgtcctgccttgcaggaatggttcctttattactgattttctccatatgtttgtttaacccgaactcgtctttcctaaatactatctataacagcacgcaggaaataccgtcagtcacttccgctttcaacccgctgatgaccagactgatggatatatactgtaaaagtgcgcctttctttgcgattctgattttttttgttttattcagacacagagaaataagaataatttctgacaaagaaaaactcatcacagcctgtatattcagccccttcgtctacgccttttatgtgtattttattctgtggcataacctcgaactaaccaccgcgggcatgcctgtcagactgatggcagaaagcaatgtgttattgctgctgctctatactggtctttatgctgccacgttttttatgacctacgggatttgttatctcccggtactggcttctgaactgctgaaagagaggctgtcacgatga

SEQ ID NO: 399478 - DNA, 528 bp, Salmonella enterica
atgggggataaatataaggcgctgtcccgcgaaattgccagtaatatccagaattttcaggggaagcggatccgcagctatgaacaggcgatggcatcaatgaataaactgatggctaatcccaatatgaagatcaacgctgcggataaaactgcgatcatcaatgcatggaaaagctttaatgcagatgatatgggaaacaagttcgcggcgctggggaaaacgttcaaggtcacggactatgccctgaaggcaaacaacgtcagggagaaaagtctcgagggttataacaccggcaactggggaccccttatgcgggaggtggaatcctgggtgctcagcgggatagcctctgcggttgccctggccgtcttttcagccactctgggggccatgctgatcgccgccgcggtgccggctgttgttgtcgggataatcggcattattgtcgcagctctgatcggtgcgttgattgatgataaattcatcgacagactgaacaatgaaattatccggccagctcattaa

SEQ ID NO: 399479 - DNA, 237 bp, Salmonella enterica
atgaataccaactccggatgcctcaataaatgtattctgaaacagggattgcagttgggtgtcaataagaagctgaccagcaagctgaattacatctggcgttcctgcactggcgagctgactgaacagaacgatctgttccggctgacctatgcgctggaaacagcgaaagatatgcactggaactaccgtctgctgaaccggcgatatgaaaaagcgagcataatcctgacataa

SEQ ID NO: 399480 - DNA, 645 bp, Salmonella enterica
ttgccccttcaggcaaaacgtgtgctgtggctttgccttatgcaatgttatccgataaaagatgatccggattctgtgtcacctgtattcatagtgaccgttgcggattaccagaagttttttaaggtcagtgtggataccgcgtctactgacgttaaaaaaggcgtgactgcactggccgacagcagcgtggtgttttatccaaaagaaggggagtttgaagaagtgaaacgcccctggcttgccgaagctggactaaagaaaggtcgtgggaaatggcaaatcgagttcaactacaaggtaatgccatacctgatggggctgaccagtcagttcacaacatactccctgtatgactgcgggaaaattaacagtgtgcgggtgatccgcctctatgaaagcctgtgtcagtaccgctccagcggagtgtggataactactcaggactggctgtctgaacgcttcatgctccctgaatcacaacgcagtaactttgctgatatgaaaagaaccttcatcaacccggccctgaagaaaattaacgccaaaacacctcttaaagccgcgatgacacagaacgatgacggtcggctagtattcaatcctggatgcgaaaaactaaccaggggtatttcccatacctga

SEQ ID NO: 399481 - DNA, 270 bp, Salmonella enterica
atgaacaggaaaaaaatcagtactgctggtttgcatactttcgccggtgagcattttgattcgatcgacttcagtgaggctgaactgaacaaggataatatgagcgataccgtattccagtcctgtaatttttacaacagtgaaactcaatcggggtgctcgttccatgggtgtaagctcaggaatgctgttttcatcaactgcgatttgacgctgtgccggtttgcatttgcagatctctttggcgcggagccgtactgtacgggctga

SEQ ID NO: 399482 - DNA, 1095 bp, Salmonella enterica
atgtcagccatagttttcgccacaggcggaactaccgcggatgcgagaaccgttgagcatccctgggaaaactaccagtttgtaacgtcggcagcagcgcaggcacttgggccattgttcaacgatttgaaggttcgtgccgtcgcgaattgcctcacggcaggcaatctgtggggcggttttttatttgctcatgagatttgccgccatctcggtgtgaaatattatcctttcgcctcggttgtcgagcatgatgccctcagcgaggccgtgtctgtcggtaacatcgacacgataatatgcctgccaagctttgctgaacgcttgctgacacccgcgcgaaaaattcagcttgcttccgtaaggaacattttttatctcggggaaatgttcccggacacactggtcgacaaggcgcaggcactgcttccgggagtgattatcaagcctttggcatatacgtcacaggaaaccgggccagtaggctttcagtgcgcacatctgagtggcagccattatcatatttatgatcatattgagctggttcactcatcacatggcggtgaattcagtgttacggtgaggtatcctgaaaaaaaacatctgctgaatcacactatgggggatgttggcatcctcgaacgcaatttcaggtgtccttgtggtcagactggtgatgttctgcatcttcatggacggatacccacatcaaggaacattcttggcacgtcgatttcaatccatgagtttgccctggtactgtcagagggctctggtcgtctcgtttctgacactgacctgcaactggttgaagtcgatcaccacgagcacggactgggactagttttgatggtatctgaacgggtcctgaattcgtttgacgcaattgacacatggttaaaatcctcaccgctaatcagcgagttaattagcgattctttatatttccatgtatttattgccgataagcgcagttttttaacatcggaaactacgcacaaaataaaaacctttatcaggacgcagacacgccctgttgaagacaaggcttcatatctggtaataaaggacgttgataaccatcagggaacatga

SEQ ID NO: 399483 - DNA, 1170 bp, Salmonella enterica
atgcatgcgaataaaacgatcctctttatttttttaacggtatttctggcggagttttccttcttctttgctctcccgctgctgggtaattccccggaactgagtgcgtccggtgtggctgcctgccttgcgggggctgttgtacttgaaagtctgctgatgctgaccgcaaccggctatcttggatgtttctccagaagaaaattaatattcatttccttgctgctaagaagcgccgcctttataactatttatctgactttatcgctatccggctggttgctcttcttcctgcttattgcggtttcaaaatcggtttccaagccttttttaagggaggtcctcgcggaaactcttgatggcccccaactgaaaaaagcgcttaacacattttccctgtgccagaactcagcggtctttgtggcaccgatgctggcggtggcggcgatgaaatttgcgtttattgacaccatactgctgatcttgaccttctccggcgtcgcgatggctttgatggcactgcgactcatctattgtcttcctgccaacgttaaaccgccccccggctccccactgatgggcatgcggacgggctttcagggcgtcatggccagcgcagacatacagcgcattctgctgtcgtcgtttttctgcttcctcatcatgggagtgtttatcaccgccacgacgctgctggataaaatcaatcctgatctcggcgaatattccggggcctttttctcaattgtcggcgtgaccatctgcttatggcagggaggtgtggcgaaactgacctctttcggtgaccgatacagctcgcaaatcattttggttggtggagtattatcgtctgcctacttgttgggctcagtgtatatcgcgattgcagccctgattgcgtacagtatttatgagtccgttattattccggaattgtattttaaagccacgcacattccttccggcatctctgcaagcgttctgttcagttacatactaattgtatccaatgctggtgaggcattcggttcctggcttaccgggtttgcgatcacacatatacctgattatgtaccactgtttatcttcatcacggtgttgagtgcggccttgatttcgtttatctgcctgaaaaaaacgtccaggaaggaggcgccatgtcagccatag

SEQ ID NO: 399484 - DNA, 966 bp, Salmonella enterica
atgaatttatactggatcgtcgcaaaggaagaatacagcaatgttgctgaaattgagcaggcttacgcagagtatatccgtgagttcggtaaacgggatattgccttcagatttatcgctctggaagactgcattgtttcatcatgtccggacgggaggttggcattactacaccaaaaccagctgctggatgagtccaccgctgcttttattatttctcccgccaacctcaatccccaggcccgggctatctcctcaacactgcgctatttccttcgtgtcagaagagcatgcctgctgaacgacgggatagtcgggatcgaaaccctggaatgggataagatcggccagatgactctggccgcaaaagcgggcgcaccggtgcttcctttcaccatgctcggatatcaccgtcaggtcattcccgccattgagcgtttcatcggcagtcatcccggcgaatacatttttaaacccaccggtactggcatggggtttggagtaatcaagtcaggaagctctcagcacgcgatcagtaccggaaatctaatttctgcctcatctgtcgaatatttcatgatgcctttcctgaccgatgccagtgacgtccgatttttctttatcgcgcagagactgacttttgtgaagtttcgcaaaccgcgcggtaaaggctatatcggaaatgttgccctgggcggtgaacagacgatcctgacagagcaggagtttctggctgactatggccatttaccttatttcgcaaaaatgctgcagctgtcccgtgacatcatggcgcaggcaggcagtgcagtattgtccgtcgactggctaatgaataatgatggtttttactttaatgaaatggccaccgctgaaaccggcctgacgaaactccctgaagagattagggcatttgtattcgatcagctcgcaaggataattcacgataatcatgcatgcgaataa

SEQ ID NO: 399485 - DNA, 963 bp, Salmonella enterica
atgctgactgagatgataactgcttatcggtattcagcagccctgcatgcgttcgtcaaactgggaattccggtatggttgggccgtatgggccctctgagacttgctgaactgtcttccatctgtagagtcgatcccttccgtctctcacgtctgcttgatgtaatgacagaacgtcacgtcgtgtgcattggcgaggcggggtactctttgtctgaagaagccgaaccacttgctgacgagaacagtcttgagtcgctatgggtattatgtgaactgggtgaagagtactggagcatgtggccagattatccttcttccctgcactcagacagctctgtttctgcttttgaacaccggcatggtgagccttttttttcacttctcctttcccggcctgcgctgaaagatacctttgacagattaatggcaaagataacagaagaactttcaaccgaacttgttcgttatatagagtgtgatgcgcaggcggaggttgtggatgtcggcggtggtcggggcgtactcatgaaaaagttgcatcagatgtacgacctgaaatctgccactgtactcgatgtatattccgggaacagcaggacggaagaaggtattgactatctggatgatgatttctttgcaagggttaccgaagataaggatatctatatactgaaaaacatccttcacgactgggatgatgccgatgccctgaaaatattgcaaaactgccaccgggccatgagagcggactcgaaactttatgtggttgaaataatcaaaaaatctgacagtaataagggtaaaacgctggacctgcttatggacgcgctatttcttggtaaagagcggttttatgatgaatatgccgcgctggcgcagaccgctggtttcgtcattgagggaacatttgccacttctctgtctcagtctgttatggtctggcgtaaggaaagcgcatga

SEQ ID NO: 399486 - DNA, 1239 bp, Salmonella enterica
atgaccgcaaagcaaaactggttgtcagatcgcatcaattcaagtaaaccccatcaagagcaaatatggatgcggggtataaatgatttaagtatttcatcccggacttatggaagaggtattgtgtgcagttctggcaatgaatatatcgatttcatgtcctgttcttatctcggccttgagaggcatcctgctcttgtacaagcaatcaaagagtctgtagataaatttggtgtacagtatgcggcggcaagaacgcgtgcaaaatgtgatatatttgatgagctagaagcaaatctgaacaccatatttctcaattcgaatactgttattttcaactctgtaggagcggctcatttagcagtattacccatcttgggatctggagaattacccggatatgacattagtccaaaggggatacagtggatcgtggataaaacgactcatgcctccgtacagatattacggggaatccttgaacaatttggtagctatgacaggattggcttctctgactatgataaattacatacggtgttaagcctgtgccggaaaaatggaaaaacacctgtgcttatatctgattccctggggtccatggggggaagtaatgatattcgttttctcacggaattagcggcagaatataatggttattactatgtcgatgatgcccacggcacctctattataggaaaaaatggatgcggctatgctctttatcaattgggagaattcagtgataatcttattcttctatcttctctctcaaaagcattcggttcccacggtggttcagcttcattcagacaccctcaggccgcttcatttatcaaaaaatatgcgctgaattatatttttagtggacctccatcattaccgggtattgcggcatgtgtggcctcagcagagattcacctttccgaggaaattactcagctccaaacaaaactgaagcgaaatatacagatttttgacagtctggttcgtaatgttgaaataaaggatgtagtaagtcccatccgcacaatacatactggatgcgaaactgaagccgttaacgcctcaggtacactccgccgccagggttttctggcaaccgctgctatgtatccgacggtacctaaatctgagagcattattcgtgttgccctctcagcagcgcattcttctgccgatcttgaacgcttcgcagcgtcagtaaatgttctgacagggatacatcatgctgactga

SEQ ID NO: 399487 - DNA, 1758 bp, Salmonella enterica
gtgcatatcataaagcttaccccgctggcctgcctgctcagcgtttctgtatgggcagctcctgttccggctcctgatgccggagcgctgggtaaccagctccgccagacgtcatccactccggtgcgccccctgatggtgccctcgctgatattacctactgacacgcaggggaacgctgttgcctcatctggcaatcaggctcatgtcaccctgaaaaaaatcgtcttcaccggagacgtcagcgttaccggcatccgtcagctcagcgaggccggattacagcaggttgtcctgccgtgggtggggaagtctttgagttttcaggatatgcaggctatgacccgtgcagtaacgcagtattaccgccggcagggcgttatcctgggccgcgccattcttccgccacagacggtaaaggacggtgtgctgacggtccgcattctcgccgggcgatatgataagtcagatattcacaatgcgacaacactcaggacgccggttattcagcggattgtgtcggtaacaaccccggaaggtgacgttgttcgtcaggctcagttagagcgtgttgctctcctgctgaatgaaataccgggcgtgaaagccagcgtggccctgaaggctggtgccgtggaggggacctctgcaccggatattaacgtcaggccgggaaagcgggctggcggctatgtcggcctggataatcagggggatccggctaccggacgcagccgggtgatggtgggcggatacattaataacctcaccggactgggagaccagctacgggttgatgtcctggatgcctgggaaaagagcgacctgtttaacggcagtctggattacagcctgtcggtgggaggttatggcacccgtgtcggggccagctacagccacctgacctatcactataactttgaacagcaggggtttaacgggtattccgacaactggctgctgtatgtcacccgaccgtgggtgcgtagcgcccgggcgcgtgtcgatgtccgcctggaaggcggtcagcagttcctgaccgataaatacccgtcccgtttatttggtgaggcgacgggcagcgaagggcgcaagcaggcgtccctgggcgggctggatgtgaacggcagcgtggccagcacgccgggcgggctgagcgcttttgacctgcgtgcgacggtgggaaatatggactaccgcaatgatgtggcgcgcctgatggggttcagtgaggaggccggtaccgccggggagtttgcccgccttaattatcaggtcaaccatgaccagcagattttaggtcccttctccttatatgccagtctgagcggacagatggcgaatcataatctggatacgtcccagaagtttctgctgggtggcccttcggcagtgcgggcttatgacatcggcgacgggtcagtggatgaaggtaatgtcctgacagcagaactgcgcagtcactgggatatcccggtacatcgctggccagggagccatcccggtctgacagtggcggctttttatgaccagggctggggacagcagtacggggataaccgcaatcaggccaccacgggtgaactgactgatcataaccgggtcaacctggcaggagccggactttatgccacggtatcagatgcaggtaactatgccctgacgatgacctgggcgcaccgtaccggtaacgttgacccggtgtcgggacatgatgaccgtgaccgtttctgggtctcggcgataaaaaccttttaa

SEQ ID NO: 399488 - DNA, 5544 bp, Salmonella enterica
atgaataagatatataaactgaaattcgacacccgccgcaatgaaatggtggtggtcagtgaaattaccacggggccgggcaaaaccgaaagtaccggtcagattggcggcgccggatatttacccttccgtaagctcatgggaagactgacaccgctgtcgttgcttacgggactgatgtgcggggtattcccgatgatggcgctggccgtccctgacctgccggccggaggccagattgtggccggggcaggcagtatcagtacatcgggtaaccagatgaatatccatcagaacagccagcacatggtcaccaactggaacagctttgatattgggcaaaaccataccgttgagtttatccagcccgacagcagcgcggtggcgctgaaccgggtgaccggggggcatgagtcacagattatggggacgctcaaagccaacggacaggtttttctggtgaaccccaacggggtgctgtttggtcagggggcgagtgtcagtacggccggcctggtggcctcaacccgcaacatcagtaatacagcatttatgaaggggcagtacaccttcagtgacagcggtaattctggtgtaccgggcgcgcagattattaatcagggtaacctgataaccactaaagggggctatattgtcctcgccgcagaccgggtgaaaaacaacggtacggtcaccacgccatcaggcaggacggtactgacggcggcacaaacggtgacgctccagctggacggtcatggcctgacgtcggtatcggtcagtggcagcgtggtgaatgcgctggctgaaaacagcggcttaatctcggccggtgacgggtcggtctggctgactgcccgtggccgggatatgttgctgaacacggtggtgaacaataccggaacgattgaggctaaaggactggcatcccgcgggggagatatcgtgctggatggaggggagagtggcgtggtgaaccagtccggtcagttgctggctgacagccagagcagccggggagggaaaatcatccttgaagggcagaatatacacctggtgtccggcagcagagcctcggcgacggggaaaagcggcggtggagaggtctataccggcgggggctggcaggggaaagacagccatatccgcaatgctgaaaaagtggtggtggatacgtccgcagttattgatgtgtcagccactggtcatggtaacgggggaaaggcagtgttgtggtctgaagactacacaaactttcagggacacattctggcgaaaggggggacgtcaggtgacggtggtcaggtggaaacatcatctcatcagaatcttcaggcatttggtgaggtggatgcgtcggcaacggacggtcggggggggcagtggttgctcgacccggcagatgtagtcatcgtggacggtagtacgaataccaatgtaaatattaccggaaagggagccgacaagggtctggatacggacgcggcacaggtgttctcaccttcggcaaatggcgcacagattggtgcgcagaagattgccgaccagctgaataacgggacaagcgtgacggtgcagaccagcggcgcgaatgtgaccggacagtccggaaatattacggttaatgcggcaatagagaaaaccagcggtgccgatgccagcctgacactacaggcggatggcaatatcacggtcagcaggaatatcagcagtaccgccggaaagctggatatcgcgctgctgggtggcggttcggacagtgcgatcattcaggtgaccaacagcagcctgaccagtaacgggggcaatatcacccttgaccagctgaaccactccacaacaggtgctgacggcgaagcgagcgccaaccccggagccctgaccattaaggtcagcaacagcacgctgaatgccagtaataccagttcggcaggtaatatcacgctcagtgcttataacccgaatgtgaatctgagtctgccacagtataccggcaccatacgcaatggcggctcagtgctggaagtgagcggtaacagcgcgcttcatggcaacaacattgtgctgcagtcgcaactggacggtaatctttcgaccgggctgccggtattcctcaatggctccacgctgaccgcggataatgacctgaccatccgtggcgtggtgaccaatagttccacggcggtgaatatcgagttcaggggggcggccaataacctgacggccacaaagggcaatatcacgctgagcaataccgtactgaagtccgcatcccatgcactgaaggtcggaggagggacatggacggcgggtcagaatattgtggtgaatgcctccacaactaactccgcttatcagggactgaatgcatcaaatctcaccatgacggcagggagtgatgttcaggtgtcaggaggaggtgtctccctgactaacggcacgatcgctggtcagaatatcacagtaaatgcgtccgtggcgtctggtactgcgctcagcatgacgggggtgaccctgaatgcgtcccgcgccagcctgtccggcagcaacagaggtaccgggaccgggttcactctgtcaaatctgacctggcagggcggccttacggatattaataatatcaccctgagctcggcaggtagtgccgcttccgtgatcaaccgactgggtgttggtgtggttgacagcagcaagcttattacactgatgaaaaaggggattgagaataccacatatgtggataagtccctgaatgatgtcgtgaagagtagcctgtcggttgacggtaatggcgatattaacgcgacatttggttctggtgacagaccaggggcctggacatttgacgggatagacctgaatgccacccggaacattaacctgtcgggcataggcttaaccaacagtacgctgcaggctggtggcgggttgacgattaatgacggaaattctctgctgaacctgtccggcagcaatatgacggcgggacagaatatcagcctgaccggcaacggtggtattaccctgacgaagtcagatatagcggcaggtaatgacatcaccatgctggccagtaacggctctgtcaacatcagtggagccagtacgacagacagagctaatgtcacctccactgccgggagtattaccgtgaacggtgcggtgaaggggtattacacaggcgtccggataaccaacacagatatcagtgccacgaagggcgtgattactgtctccggggccagtgataacgctttgtctccaggctcgggggcggttatgctgggcgggcagtcatcgtttaattcaacattcacttcagttactggtacagataccaatacagtagcagcttcttggtcaggcgggatagcaattgaggcgggctcaaacatcgccttttatggtaataccagtatcacaggatcttctgcaggcaacgccggactcatatttttgggcggatattacgctacaccgacaaaacttaccttttctgacgggattgtgaatgttcagggatacgctaataccaactctacaccctacgctttcttatccggtatcgcttttgtagcttgggaatcactaccccagacaatttattttaacctgtccaatgcaacgctaaatttgtctgcatacggtaataaggtgcctggttttagactagacataactgctcccgcctgggataaaaccaataacaaaggatttatcttcacgggtaacggcagtgtcaatattaacggtgtctccgggaccagcactggcgttgaggcaagaatactcgacaatacggggctgaacgggacctttactgtaacgggtgaaagcaccagtggcgtgggcgttaacttctccagaaatgtgaatgccacgctggtgaatgccaccattaccggaaagagcggcagcggggtgggtgtcagtatcaccaccggcgatacctacagtaaggtcgcagacctgaacaacaacaccattaccggcacctctgatacctcatcgggtattttaatcaacggcaacaacgtcaccatcaccaacggcagcctgaacggcacctctgcaggcaccggtgccggtgtggcgctcaccggcggtacggattacaccattgacggcgcggttatcagcggccagtcagcagacggggcggggatcagcgcatcgggcaatctgtcagccaataacaatgccacgctcagcggcacggcgaccggttcagggtccggggtgaccgtcaacggtagcctggcgagtaacgggggcgtgaccatcagcggagcggcgacgtccggggacggggttcaggtcagtggcgacacgctgctcagcaatgcaacagtcaccggcacgacggatacgggcagtggtattcacgttagcggtaatctgaccaacagcaacaccacccttgccggggaggccagtggtcagggggccggcgtggagattggcggtaacatcagcggcggtatggtgaccgggctgtcagacaccggcgacggcgtgctggtcagcggcggagcttcgaccgtgacgaatgcggtcattaccggcaacaccaccaccggtaccggggtcaccatcagcggcaacctgacgaatgcgggtaataccaccgtcagcggcagcgcggcgggcaacggcgccggggttgagctgggcggcaacgtgaccggcggtagcgtcagcggcagctctgacactggcaccggggtgattgtaaccggtgataacagcagtgcgacggatgcggccattaccggcaacaccaccaccggtaccggggtcaccatcagcggcaacctgacgaatgcgggtaataccaccgtcagcggcagcgcggcgggcaatggtaccggggtagcgcttaacggcaccctgaacggtaccgtcagcggaacgtctgacgggggcgttggtgcacacatcagcgatggcgcaattattaccgacggcagccaggtgagcggcagttcagcacagggcagcggtacggttgtttccggcggtatcaccaataatggcagcattgccggcaactccatcaatggagatggtctggtgctgaacagcacggttgccggcggtggttcactctcgggtgactccaccaacggtgccggcgcgcacattaccggggacacccatctggccgggggcagcctgagtggcaccacgacgaatggcagcgggatgcagctcgatggcatcctgacgcacactaatgacagtcaggtagatatctcagtacaaccgggaggtagcggcagcagttacagcggcaacggcaggctgcagtccacgacagagaacgggcgacagtttgcccgccatcagcagtccgtcatcagccaagtaccgcatgcgcgtccgttaactcagagtgcgggataccaggccgcgccgcagccgctggacatcagcctgtgttccggggaggggccgtgccggtccctgacggtaaaccagacgctgacggccacaccgcaggccggtaaggcgacatccgggccggagaaagccgcgccttaa

SEQ ID NO: 399489 - DNA, 2058 bp, Salmonella enterica
atgcaatcacctgaaaaaataaataaatccgctgaacccggtctgcctgagcaggcgactgatgccgggacgaacccggccgacgtggcggcggttaactcgtttagcctggaggcgtttgagtggcaggcccagtccggggataccgaaccggcctgccgtgcgctgctgtttttacttaaccagctggaccgtttttatggccagtggggcgcggactttcatttctgcgccccggacctgccggaggacgcgctcaaccgccatctgtgtacccgtctggccggtgccatcaccaccctgttttcccgtcccggctttagtgtcagtgacgatggttatgtgcagctcatgaattaccatcgctggctggcgctgatttttgccgtcagcagctacggtcatggcgaccatattatccgcaatattaatgcagcaggtggtggggtcattgatccactgacccttaacggcagcaacctgaagctgttctgtctgtgctattacccggattcccggatagccctgcagcccgatgcgctgtggcaatatgaccgccggaccgtggcccggctgttctttgcactcatcagcgccagggcgctgcccacgccggccgcacacggaaagcgggagcagttgctggcctggctaccgtcacacctttccggcctggactctctggattttttacccacagcggtgctgcacgatgtggtaatgcattgctcctacgccgacctgccgggcaagcatgccatcaaacagcacatcaaccgtcttataacacagcatcccgggcaccgggccctggcatcccgcctgcctttttctgcccctcctgcacgcagcaggccggtggtggcggtggtgctggagtggtttacctgccagcacagcatataccggacgcattccaccaccatgcgtgcgctgcgcgagcattttcatgtcatcgggctggctcaggagggggcgactgatgccatcacgcagtcggtatttgatgaatttatcgcggtacaggctgccacggcagtggcagatatcgtggacaggctggccgggattgtgccggacgtggtgtattacccgtcggtggggatgttcccgctgaccctttatctggtcaatctgcgtctggcgccggtacagctcatggcgctggggcatccggccaccacctggtccggctgcattgacggcgtgctggttgaggaagattacctgggcgatccggcctgtttctccgagcaggtatatcccttacccgtagacgcactgccctatctgccgccggcgcatacgcagcgggtggtcccggagcgaaaaccctttactgagcgtcagtgggtatcctggccgtttgcgcagccggtccggatagctgtctgtgcctccattatgaaagtcaatccggtttttctgaacacgctggctgaaatatcacgccgcagccgggtaccgctgcagttctgtttctggatggggtttgctcaggggctgacggtcgattacctgcgggaagccattcatgcggtactgccgacggcggaggtgaatgcccatatgcccgttcagctctatcagcaggcgctgaacagctgtgacctgtttgtcagtccgttcccgtttggcaacaccaacggcctggtggataccgttcgccagggattaccgggagtgtgcctgtccggtccggaagtgcatacccatattgatgagggactgttccggcgcttgggactgccggaagccctgatagcgtccgataccgaatcctatatccgtgccgtcctgaaactggcggaggatacggagtggcgtgaggagctgcagcgtcatctgcgggagaatgatgtggagcaggtgttgtttaccggacacccggataagtttgctgaggttgtccggcagatatacctccgtgccggtgggggggagggcgctgcaggacgtactgaatgttcaggcaccgcccagcagccggccgtaacggagaccccggataacccgccggaacaccaggaggcgcagggccgtcatgaccacgattaa

SEQ ID NO: 399490 - DNA, 507 bp, Salmonella enterica
atgaccacgattaaagatatatcccgcgggcaacgcccgcccgcagtccggacgttccggtaccgggagcaggattatgacacgaacggtcacctgaaggcgcctcccggtctgtgggtgtgcatcatctggctgctgttgccgtggtggctgaccggggcaggaatggcacaacagcagatgacagatattgcctgcctttaccccacgctgacggacagcgtggtggcactggcgtgtggtatccccgcagtggcagtgtgttttgtctacccgcttcgcggggagtttccgcgcacggcccggtggagttatctcctgatgctgatatccggcctgtctgccgacgggtattctggttttcagctgaccacgggcggtatccgtgacagcgattcagtacttctgcagggcggtgtgctgtgcctgaacctggccgcgctgttgttcctgatacttaacacccggctgtggcatgtgtttgcccgcaggactgagcttcactga

SEQ ID NO: 399491 - DNA, 438 bp, Salmonella enterica
atgaaaaaaacagaaaaaaccgtgcggatagcacataccgtgaagcgcactccgttttcagcgtcggtgttattccaccgggaggcccggcgctgggtacaggtgctgatgtccggcgtcagatacctggacgccgccggctggttgtctgttccggagcatgtccggcagcttaaaggactgcagcaacagacagcggtgtttatgacactgacgggagaggaggctgaccggccacggcgtcagcagcagtggcagtacctgcaacaacactgcgcgccgctccccggtgaggtgctggtcttcatcgggcggcgccatcagtatctctgtttacaggcctgtctcggggagcgatatgccggcgcggttgtgcacctgtatctcagtcggttgctggcccgcttcggcagtacgcaccgggcggtatccgcctga

SEQ ID NO: 399492 - DNA, 483 bp, Salmonella enterica
atggccggcccgaaaaaacgcgccccgcaccccgcaggatacgcaagaaccacgccaaagcagagtaatcacgacggctgccggcttcctgacggactcagcgtctggcaggatgagcccctgtatctcctggtcgcccggtggtgccggatgcagcaggggtgggtggggcgtaaagagatagccctggcgtttcagataaccgaacggcgtgcgtctttccagatatcttacctgacgcgtaaacctgaactgattcgctgcggagtacggcgggtaaggaacgaaggggcacccaacagcagttatgaggtatgggtgcatgacgtgtacgtacctggcggagctactgcgaaggccgcggacccggccgtccggaaacccgctggcagcagtcgcaggcgggtgggcaatgcggacagcagcgtgcgtgacctgctcagtcagttgtggccaaaaccccgccgggaggaggataaataa

SEQ ID NO: 399493 - DNA, 1104 bp, Salmonella enterica
atgcttccggtactgatttacgctgacagatggcctctggcgcacgcgctggagacactgtgccggcagcagtgtccgggccgtcccgttctacgctgtgactccctgagcgtgttgtcgcacatgctgcagtctcatccacagggccccctgatgctgggagtgtcagcccatgaacaggtttttctgctgtatgccatacatcctttgctgaggaaacgaaaggttatggtggtggcggacgatatttactacagtgaccgacttgtgctggagtgcgcgggggtaagtggtattgttagagtcggcagcctgtgttccctgctatcccggtcaccacaggcaggccacccgctgtacgcttttctggccgggccggatattccgcgggtgacggtcacgccagtgacagtatggggacatgttgacgacagtgaagagctgctgttactgatgaatgccctgatgacgtaccggctgggtctgtccggcctgaaagcacaggaagtcagggtgttacgggggttatggtcaggtgtaccgatggccacacttgcctggcagatgggaataacctatgtaacgctcagcggttataaggtcagggcattacatatgctggggataaagaatcatcctggcgtgtttatgcgcagcgggccgccacgggcagacctgcagcgaacgccgtttatgacgacgatggactttatggggccgggacgggaagaacaactgccggtacgggacaggaagaaaaacagaaatgaggacatgatgaaagacggtatttatacggtggcgtttgaaagcagcctgcagtccgtgggcgaggggatcgcggtagtgagcggtggtcgggtacacgggggtgatattgcctttacctgtcagggcaggctgactccgccatggcttgagctggaggtatgtccttaccgtaatgatataccgtccacgctggggatagaggggaattacacgctggagatgcgttaccgtgaagagagggaaggggaataccattttagtggttatgtcagggggtacccggcgcgacggctggatgcgcatgctgtgtttttaacccccctgctggaataa

SEQ ID NO: 399494 - DNA, 186 bp, Salmonella enterica
atggcaaaacatttcacggcggaatttaagctcgaagcagcgaagctggttgtcgaccacggctatacctacgttaaggccgctgaggcggtcaacgtcagccatttagctattacccgctgggttaataaactcaggctggaacgacagggtaaaaccccctacggggcttcccctcacctctga

SEQ ID NO: 399495 - DNA, 489 bp, Salmonella enterica
atggaggccaggaacgccagcggcggctccgccggcacccgaagcatcgcgagcatcgttacccgggaccccggcgtcaaaatggggcgctggctggccggtaagctgatgacggagctgggcatcgccagttgtcagatacctgcccacaagtacaagcgtggcggtaacgagcatgttgaaataccgaatcacctcgaccgccagttcgcagttaccgcgccggatcatgtctggtgtggcgatgtgacctatatctggacgggaaaatgctgggcttatctggcagtagtgctggatctgttcgcccgtaaacctgtgggctgggccatgtcgacgtcgccggactcggcactgacggtcaaagcgttgcagatggcccgggagatgcggggccgcccaacaggcgtgatgttccacagcgacagtaataatgccggtgtcagtttttattatcattcggtttgccgtttcacccgattgatgtga

SEQ ID NO: 399496 - DNA, 207 bp, Salmonella enterica
atggagcggttcttccggagcctgaagaccgaatgggtaccgacggagggctataacagcttcaacgaagctcaaaacgcggtagtccgctacatcacgggctattacagtaccatccggcctcattggtataacggcggtctgacgccaaacgaatcggagcgactgtactacatacagtctaatgcggtggccagtattagttga

SEQ ID NO: 399497 - DNA, 327 bp, Salmonella enterica
atggacatgcttgaacagcagagtacgctcgcactgcttcagagctttgagattgctgccagacatatgagttttactcttgccgcaaaagagctgaatctgactcaaggagcaatgagccaccgtattcgccagcttgaggcattgttaggcttccgcgtatttatccgcatgacacgcaagcttgcgctgacagtggaaggtgaacgcctgctgctaacgttgagtccttctcttagggctattaatgctgaagttgaagatattcgcagccagtcactttgtagtgatcaactaatactggccaccgcattagactgtatgtag

SEQ ID NO: 399498 - DNA, 1305 bp, Salmonella enterica
atgtctgaacttaagatcgttattatcggtggtggctcaagctatacccctgagctcattgaggggttgattaatcgcgcaactgaactgccattacgtgagctgtggatggttgatatagagctggggcgtgaaaaaatggccattattgccagtctggctcgcaggatgctcaaaaaagcgggattgcaggtgagcgtccacgaaacgctcgatcgtcatgctgcgctggcgggagctgattacgtctgctctcagttccgggctggctgtctggcggcgcgtatcagcgatgaacgcatttcactaaaatacggaatgattggccaggaaaccaatggattaggtgggttcgcaaacgcctgccgaaccattcctgttgcattagaaatcgcacgtgaaatggaacagctatgcccggatgcatggcttttgaattttactaatccgtcgggcatggtgactgaagcgatattacgccatagcagtattaaggctgtcggtttatgtaatgttccggtgatcatgcaaaaaggggtttctcagctactcggaaataaaaatgattttatcttgcaagtagccggattgaaccatttcatatttgcccgtcagatcttacagaacggtaaagataagctcaatgaggtaattgatgaaattgtcgcaggtaacgacccattagtaccgcgaaatattccaccgttcacctggcctgctcatgtattaaaaggtctgggcatgatcccttgtgcgtatttacgctactactatatgaaggatgacatcctgaagcaggagatcggagaagcgaacggtgagggaacccgaggtgaagtagttaaagcacttgaacatcaactttttgaaatttataagaatcccgaccttgcggaaaaaccaaaagccttagaagggcgtggaggacaatattattctgaagccgcctgtgaattgatgagcgccattcacaatgacaagcgtatcattatgcacgttaatacccttaataacggtgcaattaatggcctcccggatgactgcgtagtggaagtgagttcgcttattacgcgttcaggccctctcccattgaacgtagccactttcccacaggatacacttcgactactccaactgatgaagaactttgagcaactcactatcgaagcggctatcaccggcgatcgtcataccgcatggcgtgccttggttttgaatccgctaataaccagcggttcactattagaggaagcactatcggaagtgattgagaaaaataaaatacttttgaaggcatttcactaa

SEQ ID NO: 399499 - DNA, 831 bp, Salmonella enterica
atgcaactgacgctccagatagtcataaccgatggatcaggcgtaagtcgaacggacgaactgatgaccttgcagaagtcaggagataccctgaatgatatcggactatcggtttcagagtcgaagcggttgctgaataccgtccagcagtcggtggttcaacagcaggcggacgaatatactcgccagcatatccggtgtcctcattgccttgcggcgcgcaggatcaaaagccaacagaaaattcagtaccggacactgtttggcgttattcctgtatcggggctcagggtataccggtgccgctgcgaagaaagtacaacaaagaccgccagtctgctcagtgactgggctggcgaccacactcacccggctctgaaatatacagaaacccgctgggcctctttaatctcgtatgaaatgacggcccgtttgctgaaagatattctgtcggtgggccaccgtctgaatgcctcaacggtgaggaatcatttgtgccaggtggcgcagcgtcttgatgctgaagcagaatcacatcctggttttctttccggctgcccccgtgactggggaaacctgccaaaaccaggaaaaccgcttgtggtgggtattgatggtggttatgttcgcgatcgggatgacaaaaaacgtaattttgaaattattgccggtaaatcattttcagtggggacaccggcggacacgcgccgctttggttttgtccagaagggcggctgccatccggaacgccgactcatggcacacctttcggcccagggaatgcaggccaaccagcagatattcttttatccgacggcgcggataacctga

SEQ ID NO: 399500 - DNA, 237 bp, Salmonella enterica
atgatgtcggcattcagccagtttgaacgagccttactgaaggaaaggcaggccgatggcatcgccgcgaaaaaagcacggggtgagaaaaccgggcgccccagcgccgatatcaaaaagatccaggaaattgacgcactcagaagcagaggtgtcaggctccggatcgcctgcgaccatgcgggccttggcgtttccacatactataagcttcgtaaccagatgaacaaccagtag

SEQ ID NO: 399501 - DNA, 4443 bp, Salmonella enterica
atggaagaagggtggaagaaaataatacctgttactttgttgacgattaatttcattgggcctggctctgcacaagcagcaatgcctgttacctgcaacatgacaggcgtgagtgaaagagatttgttttgtggtgttgatagcagcaccagtggagcgttggaaagtatagcaattggtagttctgccttcatcccaaaagccaatattccaggaaaatccggcattgagcaggctattgcaataggaagtcgggttcaggcggcaggagataattcacttgtcattggtaacgatgctatcgcaggaaaaagcggatctattgctattggaggagatgatgctgccgagacatataatgcaaatggtaagggatatatattaagagcgtctggtagggacaataatctcactaatttcagagccaatgccgcacttggtaatgccgctgtatcgttaggtgccaactcacaggctttggctgatggagccatttcaatcggtgccgctgcaactgcaggagatggcacccaaagtggaactatctggagcagtacatctggaaaacagtcaatagctttgggaggagaaagctcagcgttgaaggataattctatggcactgggataccgtactactgcaacaggatattcaagtacagcgatcggtaataatgcatcagcaacgcacaatgattctatcgctatgggcacgaattctcaggcaagggatatgtacagtattgccattggcgctaattctgttgcacaaaattcttcccgtattattgttgcgaattcagtggcgataggtcagtcagcaaaagccatggcaagcaatacctttgcagctggttcattggctcaggctctttcacctggagctattgcttttggtccctcagcaacagcgggtaatacagatggagcgactcaaggaaataatgccattgctgttggttatcttgccagtgctcccgctcagaatacactggcttttggacgtggggctactgctaccggagtacagggtatagcaatggggtacggtgccagatccagcgcagaagaagcaattgctttaggcatgaacgctaccgcagctggctctgatacacttgctttggggaaaaatgctcatgcagatgcggcaggagcaataataattggtactggcacaaaaaatacaaaaagcacactgacgggaattgggcttcccgccgataacggtattaatgccatcggtattggtagctcagccaaaagtgcagctaatggtatcgctattggccggggagccgaagctaaaatatctgaagccagagccattgccatcggggatggtgcggttagtgcgggtggtatagcgcttggtcagggtgcttcagtcgtaaaaggaaataacctttcgggtacggcaagcgcatctgttgccattggtcgtcaaacgacagtggctgattatggtgtggcgttggggtcaagagcttccgtggggatgactctcactgcgggcgggaatcctgaaaaactgactaccggggggctgtacggaaccgccgttggtatcaatagcggcgtatattcgaattcggcactggcggtagggcataatgctaaagtcagtgaaaacgctaatgccgcactggctgtgggttataactcacagtcctctgcacaaaatgcaattgcaatagggaacagtgctaaagcaacggccgtaaatactatcagtattggtaccggaaatacggtgagtggcaataattccggtgcgataggtgatccaagtactgtatcaggggcagactcttattctttaggtaataataatactgtctccgccagtaatgcttttgtgcttggcaacgtagtcaataatgctgttgataattcagttgttcttggcaatggctcgacggttttgaccgccgttgcaacgcctgaatatactgtgaatggggtttctcacgtgtttgctggttcagcgccagtgtcaacggtcagcatcggggattccggaaaagaacgcacgttaacgaatgtggctgctggtcgaatttctgctaccagcacggacgctattaatggcagccagctgtttgcggttacatccgaagtagaaaaaggtaatcagttcgccgggaataccgggacattcaaccgtcgtctgggcgaaaccaccactattcgcggcggtctggctgatgctgccaccgccagcaataaaaatatcaggactgtggcgaaggatggtcagatagacattcagctggcagataatctcgacataaccagcgtgaaaacgggtaatacgttgctcagcaacgacgggctgcatattagcggcgggccttcagtcaccacaggtggtattaatgccggaaacagggtcatcagcaacgtgggcgatgctgtcagcgacacggacgcggtgaacaaacgtcagctggataatctgtcaatctctgtaaacaggggctggaatatccaggccaatggcggggatgccgaggccgttgcgccgggtgatacggtaaacgttgctgagggtgacaatattcaggtgacccgcaccggcaaaacgctgaatattgccgcggccaggaaggttaattttgataacgttgcagtcggagacatctcccttgataaggatacaggcaaaatcagcggactttctgatggttcattatcagcagacagcagggatgcggtaaccggtagccagttgttcaacaccagtgagaacgtaacgacgaatacccgtaatattgcttccaacaaaacacaaatcgacagtgggctgaacttcgccgggaataccgggacattcaatcgtcgtctgggcgaaaccaccactattcgcggcggtctggctgatgctgccaccgccagcaataaaaatatcaggactgtggcgaaggatggtcagatagacattcagctggcagataatctcgacataaccagcgtgaaaacgggtaatacgttgctcagcaacgacgggctgcatattagcggcgggccttcagtcaccacaggtggtattaatgccggaaacagggtcatcagcaacgtgggcgatgctgtcagcgacacggacgcggtgaacaaacgtcagctggataatttgtcgactattgtgggccagggcatgacattttctgccaatgaggggagcgatatcacgcgtaaacccggagatattctggctctgaaaggcgatgccacgacaaaaggcgattacagtggcaagaatattaaaacggttactgatatttcgaccgggatgatatcgattcagatcgcagaaagtcctgtgtttggcagtgttatgatcaacgacaataacagcggaaaaattacgggagtgagtgacggagtcattgcggcagggagcaaagacgttgtgaatggaggacaaatccatcgtattacaacgtccatcggtaatgttattggcggaaatgcccatgtcgacccggatggcagccttgttgtcagtaatattggtaacaccgataaaaatacgattcacgatgctattgattctgtcaggaacatcgctgaaaccgccagtgcgggctggaatctgtcagtaaatggacagcagtcaagtgcggtaaaaccaaaagaaacggtcgacctgaataatacggatggaaatattagtatcactaaaaaggataatcaagtgagctttaacctgtctgattcagtcaaagttaaagaaagtattggtattgaaaatggtccttcgctgaccagaacaggaattgacagtgcaggtatgaaaattacgaatgtggctgatggtgtgattgcggcaggaagtaaagacgcggtaaacggtggtcagattcatgattttgtcagtggtgaagtcaccagacccatcacattttcggcagacagtggcaccccttatgacgcaagactgggaacaacagtaaatgtcaaaggtgatgaaaaaaatattcgcacgacggtgagtggtaatacgctcagcgtcagtatgaatgagaatattaatgttaaatcggttactgcgacagagtccctgtctgtggcaagtggtgccagtgtcgatatggggggaaatgccattcacaatgtaggaaatgcgacccgtccgggagacgcggttaactatgggcagttccagcaggctttcagtagtctaggtaatcagattaatcgtgttgaacgcagggcaaacgcaggtactgctgctgccatcgcaactgccggtttaacgcaggcctatattccgggtaaaagcatgatgtccatgagtgggggcacattccagggagaaagtagtctggcgattggtctgtcaaccatttcagataacggtaactgggtattaaaaggctcattctcttcaacgaccagaaatcagactggcgcatcagtaggggtaggattccaattctga

SEQ ID NO: 399502 - DNA, 831 bp, Salmonella enterica
atgatgaaaatatatccagttaaattattattgttgataactgtggctggcttgtccggttgtcaccagaacccaagccatccggaacgtgacggcagtattaaagaggttgtctggcctgctcctgaaaaagcaaagcagggaaccggacagggagtattcccaacaccagagagcatctccctgttagataaaggaatgacaaaagatcaggtgtattcgcttattggcagacctcattttgatgaaggaatttactctgtcagggagtgggattatcttctgcatttcaggacgcctgtaagtggtacgaatggagtcacaacatgtcagctcaagattatttataattcagacaaactggtttcgggtatctactggcgatctgttgagccgaaaaatagtttatgcccgtctgtttttggcctgcaaaaagaaaataacagatatacattgagtactgatatactttttgggctgaatcaataccagattgataaatcaaatcgtgatgcactgaaaaatattaataaaattatttcagatatcagaggaaagggagggtatgaaagcatttctgtttatggctacacggactggcagggtgaccgcagctataacatgaagctgtcagcattacgtgcagaatccgtggcaaattatttcatagctaatggttttccaaaatataaagttttcctgaagggtatgggggaatctattccagaaacccgttgtccaggtttgaaaaatgaaaagttgacggaatgtttgatgccggacagaaaggttgtcattgttgttaatccgttaaaaagtaatggaaattaa

SEQ ID NO: 399503 - DNA, 489 bp, Salmonella enterica
atgagaaaaagtatttccttactgagcatgggcattattttacttactctaaatgcctgtcatcataaaccggtaaagagtgttgtaacgcctctggttgcacctgcaaaacaggagatatcatcttttgaattgctgccgctaagtgaaaacgttcatgcgggagggactgaaattgaactggctggcagaaaatggtatgtcgatgctgaaactgtattgacacgaaatgatctggcatcgttatcattttatcgaaacgacaagggggaaatgctgttacatattactcctggtccacaagggcaaaataaaattaataacgcgttgcgtaacaaagatgattttattttaatggtattaaatggtcgggccatttcactttcaaaaataaattcaccgcaagttgtgccattttatgtcggagatgataataccacaatccaaatagcagaggagatcacccaaaagcaactggttcataaatag

SEQ ID NO: 399504 - DNA, 912 bp, Salmonella enterica
atgtctatggggaaattacgccaagtgtttttattttcaaatccagatattgagtttattgaatactgtctccttccatatataaatttacccgattctcattcattgttcccggatggctgcattgacgttttttatatacagaatggcaaagttgagttgatgtttaacacactaccatccaaagaattatcatcaggtgagtttatttttctgagcagacagtgtactgattattttattgtttcggggggcagggatgctgctattattcatgcaagaataattctgcatggtttatataaagatctgctcttacaccatggactctataacaggttgcatatcttaaataggaataattcagatgctttacctgccgcaagtgaaatgatcaagttgttactaaatatgaagagggttcagtccggggctgtcttatttttggaaccccctgttactcttttttttgtccacctctaccttaatgaaatcgctggtttgttattaccatttaataattatgatcaacggttttctaagcttatgctggaaataataaaaaatccagattatccatggcatgtcaaagatatggccagagaacattgcatgagcactaatttttttattagtgaattcaggaaaacatccggattcacaccatttaattttttaaaaaaaattaggctgaacaaaggccggcagttactggaaaacacggatatccctgtgtcagtgattgcccgtcagtgtggctataatagccacgcatctttcactttttatataaagcaggagtttggtcttcctcccttaaaaataaggaagaacgcacaattaaagtatgatattattgtatcagaagataaaagtggctttgttgaagaaatcggagatgtatttgattag

SEQ ID NO: 399505 - DNA, 375 bp, Salmonella enterica
atgcataaaatcgacagaccagctctgattcagcgcttccggcgtggccagtggcgagggattacgcaccggcaaccgttgtttgcccttacgacgaaaattcagcttcagcagacagtaaatccggtggatccttttgtgattccacgggtgtcgctgccgcctcagaacctgaaaaagtttcggaaaaccgtatcgtgggtatcgctcggccactacctgcaacgcgacaataacgggttcgtcacgtgtggtatccgggcggtaatggtaaaccgttctgctcaggttcagactccggcaggcctggcggatactgagtccgaacgtcgttatcagatgagtgaccagctcacgcttaaaggctggttttaa

SEQ ID NO: 399506 - DNA, 1245 bp, Salmonella enterica
atgaatactcttgtcagtaacaccagcctgtcggggacactgattgccctggatatcgctaaaaaacatcatgatgcaaaaattagacacccggatggacgaacatcttacctgcgtattgaaaatacactggaagggttcaaccgattgcttgcgctcaccgcttccccccatgatgatattatcgcggcctttgaacctacagctgattatcaccgcaacattgcatggtggttacataagcagggagtaaaatgccatcttgtttcatctgtcagatgtgcgcgagctcgtgagatgctgtttaagacatgggataaaaatgatcgtaaagatgccagtgtcattatgtatttgctcgaacagggattatcttcaccattttatgatcctctggcgaatggcattatcgatatacaggagatatcaaacacataccatcaggttactctggctcgaacccgatgcctgaacagcctagttaaccactatctgaccctttatttccctgaggctgagcaatttctgcatatgtcccgggcagagtggttctgtcagtttttacttcaattccctacaccgtcttgtattacatcattgaaccgggatttgtttgtaaaacagtcatgggatgttgttggcaggaaacagtataaaaagcagtttcttgaacatctctatgatgttgctgcggattccattgcattaccgttgtcagaagattctctggcagtgaccacgttcagattacaacttcatcgttatgtcgggctttcggcacagcgattgcagcttgaaaagcaggcagaaaattatttacaggaacggagtgactacagacacttacgtacgatccccggtattggcgctatcattgcccttatgataattgctgaaagcggtgatctaacacgtttcgctcattaccggcagtacctcaacttttgcggttttaatctttccgccagccagagcgggcaaaagcacagtggttacagattgtcgaaacgtggaaatgcgcgattaagatatgccttctggcttgccgccaccgtagccgtaagaacgagagaaaacagcttccgctacaaatatgaacgttatattcgggaaaatggagataagccagatcagaaaagaaaagccatgacggctgtagcaacaaaagtcgccagagtggcgcatgcaatagtaaagcaggatattgattacaaagggtattatgaaataagctataggacgtga

SEQ ID NO: 399507 - DNA, 408 bp, Salmonella enterica
ttgagtctgacattaccaataatgtatttccagacgggggcggatctcagcaaaatcacacactatgaagtgaactatcaggacggttttgttcaacaagcatggttgcgccctgaaatagagctatttgttgtgtgtatcgccaggaaaaaaggcacccggcgcgagattagaggcggaatggctgttcttaccagtattccggccagcaacggcgcagagctggcaaaagcactcgatgatgttatgcgccagtctgacgagctacggccactggcagggaaaagcgaaaacgtctttatcccggccagaatagggatttccggcgaagcaccaccaacagagcaagagcttttgaacgtcttttaccagcaatgcctgaagcatggctcatggggcagtgcttga

SEQ ID NO: 399508 - DNA, 453 bp, Salmonella enterica
atgagcgataatgaaacgtttgatgcagctcgaagacttctgacgaatattcgttctgtccgtgtctttgcgcgtgaaacgagctttgagcagctgctggaaatgcaggaaaagctgaacgctgttatcgaagagcggcgagaagatgctgaacgtgaagccgcagaacgtcaggaacgtgagaaaaaacgtcaggaattgcttcagctcatcgccggggaagggttttctcctgaagagttgcttggtctgaccgacgatgcgccaaatgcacgtaagagtaaattgccgaaagcaccgccaaagtatcagtttgaagaaaatggcgaagttaaattctggtctggccgtggacgttcgccaaaaccgattgatgaagcgttaaaggctggccgttctctggacgattttctcattaacaaaaattcctccggttctgctggtaacgaatag

SEQ ID NO: 399509 - DNA, 210 bp, Salmonella enterica
atggtgaaaaccagacaagactggcttttccagttaagaaagtgccagcaccgggaaaccttagagaaagttatagaaaaaaatgaacgcagccttaccgctggagaactggtaacattttattcagctgctgatcaccgattggctgagataatcatgaataaattgtttgataaaatccccgcatcagtctggcaacacgtcagataa

SEQ ID NO: 399510 - DNA, 2322 bp, Salmonella enterica
atgagactttttattgctgaaaaaccatcattagcaaaagcgattttcgaaggattaggcggcaaccctaatacagagaagaaaaacggttattttgaacacggcgctgatgctgttacctggtgttatggtcatatgcttgagctttatgacccacaggattatgacgaaaaatatgctaactggcgattcagtgatttaccgattaaagctgtttatccacccacgtataaactgaaacctgaatctgaagcgcagacccgcattattctgtcgctgatagaaaaagctgacagcattgttcatgctggcgaccccgacgacgaagggtgtttactggttgatgagattttaggttatgccggaaataagaagcccgtccagcggctgctggttgccgatctcaaccttgcgccagtacaaaaatcgctggcaaacatgcagcctaacgaaaaatttcgcggtatgactgatagtgctctggcacgttctctgtgcgatcaggactttggttataacatgacgcggggctgtaccctcaaaggccgtgagaagggatatgacggcgttctgaacgttggtcgtgtacagagtgcggttctcggactggtgaacatgcgcacgctggcaaaccagaatcatacggaaagcttttactacgacgttttcgccagtctgtcgatgaacgggaatcatattaaggcgaaatatcagacaacggacggcgatcagatcgacgataaaaaacgcctgatttcagaagcacaggccgcgcatattgccgaacgggtagcgggtaaagatgccatcgtaacgatcgcgacgactaaaccggaaaattccaaaccgccgctgcctctgaacttatccacgcttcagcaactctgtgcaaaacgatacggttatacggctaaggaaacgctggatgtgatgcaggggctgtatgaaacacacaagctgctgacctatccccgctctgacaaccgctatctttcagatgagcattattatcaggccggggatattgcagtcgctatcgcggccacaatgccggaactggcgtctgcaaccgcagatatggacaaagaacagaagcataaagcctttaacgccagtaagatcgaggcacaccatgccattattccgacgacgaaaagtggagccggtattcagctcagtgagaaagagcggaacgtctataacctggtggccgtctatttcattggtctgttttacccggatgccatccgtgacaaaacgaaaattcacttcgatattaaaggcgataccttcacggccacacaaagcgtactggtacagaagggctgggaagcgctgggtaaagacaatgatgaagaggacgacgccgaagatgccggaacgggcggctttgatttatcgactctgaaatttaatgacagtggcctgtgtgagtcggctgacgtggacaagaagaagaccaccccaccccgttattttactgagtcaacattactggccgcgatgaccagtgcggcaaaatttatcgatgatccggcgctgagaaaagcactcgaagccaaagacgaggggagcagcgaccggggcagcatcggcacagaagctacccgcgcgggtatccttgaaaaactggcggccaataccgggcttatctcgatagagaaagaaaagggctactctgagttggtatggaaaacaacaaaacagggtcaggagttctgcgcagctcttcctcctgaagtgattaaacccaacatatcggcaatatgggctgaaaaacaggcgcaaatcaaatctggcgaactgagcgttgaagactttatcagagacaacgacgattatattcgcggtttaatcgacgatctggataaaaacgggattaacatttcctctaatgccacgccctgccctgtctgtagcaaaggttttctgcgcaaacgtaaggggcagaatggctttttctgggggtgctcatgttatcctgagtgtaaaacgtcattcccggataaagatgggaaacctgttacagaaaaacaggcttctgagggggcaagcgcccgtcttggtgtcccttgcccttcctgtaacaaagatattttaatcaggccgaaaggctttttctgtacagggtgtgagtttaaaatctggtctgaattttccggcaagaaactgacacaaagtcaggttgaaacggtgataaaaaaaggtaagaccagtgagattaaagggtttaccagcaaagccgggaaaaaatttgacgctgtagttaccttgcaggataaatctacaggcaaacttggttttgagttcaggaaaaagtaa

SEQ ID NO: 399511 - DNA, 225 bp, Salmonella enterica
atggaacatgataagaaaacagcacaagaagccatgattaaatcgcaaggtgtctgggaggatgatgacaatgaagatactttttcattagcaagggatgtcagtgaccagctatcaataatagttaacgcctttgacaaagataacgcacaagaaattattgttgcggcagcgggcgaaattcagtccttagtacaaaaagattgtattgacaggagccattaa

SEQ ID NO: 399512 - DNA, 657 bp, Salmonella enterica
atgaaaatgagttcaataaagacggtttatgattttatgcgtttctgccgtatgccgctctggtttcagcgttcaatccgagacatgaaagttggtgatactttcattattgggaaatatacgcaacctgtttcttacgacagtgattcattttgtgtgcctccacgctattcggcttgtctggatggtagcgaggcttgctttgttgcggaggcatggatagaaaaagagcgaggtgtgtattcattttacgccacatggacattcccgacaaaaccagaacgtgcccatattatgacttttggggaattcagaatccacaaaggcggcattatagagttcgataataaaaacgttgaacgtgacgataagaaccatgcggtaagaagtttcgcgcttgtatctcgttatctcgctcatatgctcaactgcatgtctgatgaagataaaaaagtctattttaagaataacagtttcccattattcaatggcgtatggctggatagtgattgtaatgaaaggagacagcgtgcggtagaagtagatgggaaaattaaacgagtatggattaattacaaagattatatgccaacgcatcaactttcagcaattgttgaagctgcctttgctactggcgcacttcagctggaggattaa

SEQ ID NO: 399513 - DNA, 774 bp, Salmonella enterica
atgatgacagaatctgataaagaacgtttcaataatcgtgtatgcgtcggtcaattgcttgtcagtgcagacgtttatgttactcctgctatgacagaaagtgctgctgaggtagagttaattatccctgatgtggattatcaaaaggcaatggatttgtatgatcgtatttgtcagtttgttttgcttcatggtgaagatttgcaagggctattccagacagacagatattactatatgtcatgtttcgtgcgtgatattgaagcctttaagaaagaatttgaaaatgaggaggagttaaaccatttattcaatcatgataagggtgaaacggctgagtttcttatcagtttccccgagaaagctaactatgatgataaggaaccagttaaacaagcctttctggaaatcacacaaaaacatgtcgattcattagatgaactgacatggagtaattttgaacacagagcctttactggtggaacggtaggttttggcatcaatccccatacattggagcgcattaattttgatgatgagcgtgacaaaataacaaagctatctcgtaaggatttcgtagcgtctaatctcactgattctttcgaagatgaattttatgttaattctttgttcaacaaagccgaagtaattggtgagattgacggttattctgtctgtttcaattccaggggtttttatttttactggaacaaagaaacagaatacctacttgaaagctggttaacgtttcctgcatatccttatggatggtaa

SEQ ID NO: 399514 - DNA, 489 bp, Salmonella enterica
atgggaggaaaagaaacgatgaagtgttttctttatgctctttctttttttgtagtcgcgctgccaactacgttgtttgcagcagaaatccagggaaaagtgattcatgtacttgatggtgacaccatcgaagtattgcagaataaaacacctgtcaggattcgtcttgcgaatattgatgccccggaaaagaagcaggctttcgggcgctggtcaactaatcaacttaaaggccttgttgcagcacagcccgttacggtgacgtatacgcagacagaccgctacgggcgcattatcgggcgcgttttcacggcgaacggcaccgaggccagccgctttatggtgcaatccggtgcggcgtgggtctatgagcgctacaacacggataaggcattaccggcattgcaacaggaagctcagacgcagaagcgcggtctgtgggctgaaagtcaacctgtatcgccatgggaatggcgacatagcaaataa

SEQ ID NO: 399515 - DNA, 336 bp, Salmonella enterica
atggcgaatattattatggaatcagcagcagggagagtcagggattttctgtttattttcataggatgcgctaaagcggttgcctcagtgtttactaggttactcttgtttatggcttggttccctgtattggtttatggtttttatcgtattgccgttatcttatggggaagtacaactgaatctgaatactattactttgagcgtttttttaattatacaatcgatttgtatagcttgattattcctatgttggcagttgttggtgtttcaattatcgtgattttctcactgtttaagataggaactatcatatgggaggaaaagaaacgatga

SEQ ID NO: 399516 - DNA, 204 bp, Salmonella enterica
atggataaaatgttttcaaaaatgttacgtcataatatccagacggtaacagttactcagaatttaaatgatttaaaaaacatcggtaatgagacggtaaatacgattatcgagaattgtacggcttacatctatctgggtaattgcaatgataaaaattttctggatggatgtaacgttaagaaacagaatgaagaggattaa

SEQ ID NO: 399517 - DNA, 339 bp, Salmonella enterica
atgaatgttcgcaatttgattatagttccgctcgttcttgctgtgttgacaacgccagccttagccaagaagcataaccacactgatggactaaaccagacgggtgatccatgtgagctgttaacctgtatggccgggaaattacagggggatacacagccagcctgtcagacagtaaaccagcggtttttcaatgtccgggtttttaccccctactataaccctgaagccacagcaagacttagacaaagtatcttaaatacttgcgacggcgctgtaatcaataaagataatctggaaatgattattcagcgctatgggcgttcgttccaggaataa

SEQ ID NO: 399518 - DNA, 396 bp, Salmonella enterica
atgaaaagaatagtgttggctggttttgtttttctttctgcctgttcatcacctcctgaaccaccacaggttgactggaaggaaaacccggaaactatgaattcacagttaatggactggcaacccacttttacggtaattaaatctgaccgtgttaattcatcctgggtaaaggctattaaaaactttactcctgagaaccgtctttatgatgacgcagtgttctatgctattgctcattcagactcaattattattgaaagtagccggggtgaagacttcttcactgcaaaaagctggcttagatctaacggtgcatatggattaattcagtacagatataagcgtgatgaattcggtattaaatccatcaatatctatcttcagaaaggatga

SEQ ID NO: 399519 - DNA, 1044 bp, Salmonella enterica
atgcagggtgatattaatactgaaaatcaccatattgtttacgatatcgtgaatgattattttcatcaatggctaaatggtgtggagggtttaacagagattgccgtaaatcgtcccggtgaattgtttgttaaagtcaggggtaaatggcagcaacatgaaacgaatatgagttttggtgactgtatgtcatttgcaggggcaatttctgattatcatgatggtggttctgttactccagaatatccattgcgttctgccacgctccccctgggggagcgcgtacagatcgtcatccccccggcaactgagcgtgaaacggtatcaatcacaatccgtaagccgtccagtgtttttattgaccatgaaacatttgttaaacagggtttctactcaaagctaaatcagggcgctgatttcaggaataaagaggacgaattatctttaatgtttaaagagaatcgttttgaacggtttattcctgaatgccttattaaaggtaaaacgatggtgttttgtgccggaacaggagccgggaaaaccacgtttgcaaatgcctgtttgcaatacatccctcatcacctgcgatgtgtttcaatagaagatactgatgaggcaaaattccgtttccataaaaaccatgtgaagctgtattacccgtcagagggtgaaagtatcgttgtaaactcggcctctctactgcgttctggttttcgtatgaatccagacaggatactgatgacagaagttcgtggagcggaagcctgggattttcttaaaggttcaagttccggccacgcaggaaacataaccacggtacatgaaagcactcctgaagatgctgtgcttggccttgttcagcggtgttatatgaacccggaatgccagaatctgccctataacattatactgcgacgggttttgagcaacgtcgatgtaataatgagtattaagtacattgatgacgaagatctacgctttgcatcgggtatttactatcgcgatattcactttcaggaatactttgaaaagctgaaggagtga

SEQ ID NO: 399520 - DNA, 1212 bp, Salmonella enterica
gtgagcgaacaggaaaataaaactctcaccgccgttgaaattgagcgggagctgcgcgaacggcgacagaaagagctggagcaggccgacaaaacagataaagaggaggattcaggacggccagctaacagcctgggcatcgagaagcttaaaaaatcgcgtaaggggctaatcatcattgtggctgcctttgttctgctggctgctggggtgtccgtctattatgttccttccattatccgttcaatgtccagtagtgacgaaaaaccagccagtagtgatgtagctacagggtcggtgaagcgtcagaccgggttaagcgatgacgttgaccctttcaattctgagcaaaaggcgcagggcggccaggaagaaaaaaaagaggataacaacagcgggaaagctgaaactgcgccagaaagcgtgcagcataacttcagccgtgcgcttgatgtttcctatggcggcagtagttctgctgcatcggcaagctcaggcggcacctcaacgcaagctgccagtgaaaccaaaggtggaggaaataccagcacgacacaggaagtcgagcctgttaatgccggagcgcccgtatcgctgtcaaaaattaccagggttccctatgatcccaatctgtttattcctgaaaatacgggcataccttgttcactggacaggaaatttatctctgatctcgcaggaaaactggtctgcacggttaattctgacatttacagtgccaacggtaatgtaaaactcatcgaaaaaggaacggccgcccatgtggtttataaagccggttcccttcagcacggtcagggagctgtattccttatggcgaccaagctgagaacacgcactgcgccgtttatcgatattccgctgattgatacacaggcggctgggccattaggtgaggccggagcgtcaggctggattgatacgcatttttgggagcgtttttctggggccatgatggttggcatgatccccgatgtggctcagtgggcgagtggagccgctaagaacaataaggataatcagacggactataccgcaaacagccgacaggcttttgctgatattgcccgtgaagccttttctaacagtgtgaatattccaccaacgctttataaaaatcagggggagattattactctgattgtcggtcaggatctggatttctcaggtatctataaactgaaaatgcgataa

SEQ ID NO: 399521 - DNA, 930 bp, Salmonella enterica
atgaaaataagaaaaggagcgttagtaattgcgcttctgatggctgcgcacatttgtaatgcggcagtattgccatcgggaagccgattcgacccacgaaaccagattgtcagttataaccctcaaaacacgactgttattaacagcgctgtcggctacaccaccacactggtatttgatgacgatgaaacggttatcagtgccagaaccggcttccctcagggatggtcggtgaataaagaagataatcttgtttatgtcgaagtgaagccagttaaacagacggtgcagaacaacaacacggacgagaacggaaagcagtcatctgaagtcgttaacgtggctcttgaccctgaaaccgatctggagcgctggcgaacaaacctgtttgttcgtaccacaaaacgcaattacagcatggagctgaatgcccggacgtttcgccagccggataagatcgcgtttgtggtgaattaccagtacccgcaggaaaggcgtaaagagcaggccgagatcgagaaaaaaaggattgaggcttacaacaagcggcaggaagaaaaaaccatcaataccgcgcttgaaaatgccaaatctccgcgcaactggcagtactggaagcgagttgctgaaggtagccaggatatcagcccggattatgcatatgacgatggccgttatacctggtttggattcagtccactgaagaaaatcccgagtatttttgtcatgagcggcgatcaggaaaccctgactaatccggtagtgaagaaaagcagcagttttaccgttgtgggtgtgcctgtagaccagcgttttgtgttgcgtatcggaaatcaggttgtcggggttgaaaatcggggctttggcaaagtccggcttccggcaggagacaccgtatctccgaaagttgaaaaagaggtgatccagtga

SEQ ID NO: 399522 - DNA, 729 bp, Salmonella enterica
atggggtttaaaattccagaattaaaactacccgtttttaataagaaaaaagaagtaacggactcttcaacaacatttgaagagaaaaatgtagtgttgcaggagaaaatgaaccgcatatataaatttggtggtattgccgggatgagcgttggtgtgttgtcgctgcttgccctgaatagtgcgcttccgttaaagagtacggttgtcgaggcttatcttattaatggtgtcactggcgttgctgaaagactgacttccgttaaaaaagaaaacctttctgaaaatgaagcgctggcaaggtattttattactcagtatgttaaacgccgtgaagggtataattattttagtcttcagcatgattatgattatgtcatgctctatagcgctgaaaatgtggcgactgattataatgctctaatcaatagtagcaattcacctaaagtcatttacagaaaagctgaaagaacggctaccgtgcaggataagccgtctgtcattatcagtccgtcatcccgtcctgatgataaggatatgggggcatatgttcgctttaaactcaccgtcagggatgtggcgacaggccagacgaatgacgaatactggaatatccggctaacttaccggattgagccacaggtcgaaatggcatcgggtgaccgtaataataacccgctcaaattcgttgtaacaagctacgttcgcgataaagaagttaaagggtga

SEQ ID NO: 399523 - DNA, 129 bp, Salmonella enterica
atgaaactaattatcacgtttttcgtgacgctttgcctgtttggttgtcaggcgtcacacaaacaacctccggtttccgggaaaagcgaacctgttaattcagcagaggtaatgcgcaatggggtttaa

SEQ ID NO: 399524 - DNA, 1056 bp, Salmonella enterica
atggcaacttctaggtttttccaagccgcccatgacgttattgttaaagttctcgaccagtctttgactggtcagttaaataacttttcttcaatagcgtatcaattgggtaagtatggcatttctatctatatattgtggtatgcctatacagtaattgtagggaaacagaaatctcatgttcaggattttatttggaatttatttcggttttggctgattcttgtttttgtcagaaatatggggggttggttagataacgctaatcaggctatagagggactaaaggaaacttttgcaggaggtgacccttggaaatgggttgatgaactgtgggaaaaagttcagcaagtggcagcgtatcttatgtcaaaagatacttccacatatgttaaaacagacggttctattgcagcgatactaacatatgctggcggtatattagcactgctattaacatctatagtttaccttgctgctgaagttacgcttaaaatgttaaccattaccgcaccattgtttattatttgcctttcttttggttttttaaggcaaatgtttaatagctggctacagttaatattcagctcatgtttaatatttctgttttgcggtttggcgattaaagcgggaatgactttccttaatggcatattgaccatatctatagcgaatgcagatgaactaaatctgatatctacaggtgctcaggccggggttgcaggtgcattcatggcctggattatttggcaggccaaaacctatgcttcacaactcgcaggtgttggcgttgagggggcattgcagggggctgctgctatggggataggtgctggcgtatttggtgcttcccgcatggcgcgtggtgctcttggcatgggaagaaacgccggtattggcgcatggaagggcattagtcgtcagaaaggggggcttggtcagtctccgggaatgtccggtaagctgggtaatctgaccgggcaggggttaaatattggtgcaaaaaaattgcgtagtgccgcaatcgaaatggctaagaagaaatatggaggatag

SEQ ID NO: 399525 - DNA, 258 bp, Salmonella enterica
ttgaaaaaatatggagtagttgctgcgttagggcttacattctttcttgccgggtgtgaagaggtgaagtctgtagactggtggcagtctcacgcagacgaagcaactaaaaaagtagctgaatgcaaaaagtctggtagtgatagtgacaattgcaaaaatgctaaggaaggtttgtttagatataagcaattgcatcctaagcacattgacgtaaaagacgcattcaaagatgttttgggtaaagagggaagttaa

SEQ ID NO: 399526 - DNA, 750 bp, Salmonella enterica
atgatgaaaaaacaacttctggccgcaacgcttatctgttgttcggcaagcgcttttgcattgggtgatggggtgattgtgcatgatgcaaagtcagcgttagatacggctgcgcagtgggtaaaagaggctaaacagtgggagaacgagcttacggcctataaggaagaactgttaacgaaaacgggtatccgtgatgttcaggggctggttcaggacgcacagtctgtcagtaaggaactaacgcagatttacgaccagggaaatgcgtttatcgatgactacattaaaaaccctgatgcagtgctctctgcgcaggctaaatcactgctttccgactacaaggtaacggatacctgtaaagggctggggtacacaggtaaccaggttcggggctgtgaggcgacgttcctgtcacaactggcgggggttgagtacggtaatcagctcgaagaaaagctgcgtagcgacaaccagtcgatgaaagaccttatcgatcaggttaaaaacgcgaaggacacaaaagctacgcaggacgcgactaatgccgtctctctggagaacctgaagttcgagaagctcaaatttcagtatgaaatgtatcgcgataagcagcgcgatcttgcagaatacaagatgaagatgtcggaggccgcattccaaaagaaacagttggatgcggtcaatgcggatacaccaattgttgattacaagtcagcgtttgatcagcagagctatgaaatgaactga

SEQ ID NO: 399527 - DNA, 2760 bp, Salmonella enterica
atgagtactctttttaaagggctgacacgccccgctttaatcagggggttgggcgttccgctctaccccttccttggaatgtgccttatttctgtattacttggtgtatggattcatgacgctatgtatgcactcatattgcctgggtggtatgccatcaagcgagtaacacagattgatgagcgtttctttgacctgctttacctgcgaactgtaatcaaaggtcatcctttgtcaaacaaacgcttcagtgccgtccattatgcggggagccagtatgatgaagttgatatttccagagtggacaattttatgaagctgaaagaccagtcttctattgaagagttgattccttactcttcacacattactgataatctaatcgtcacaaaaaaccgtgatttgctggctacctggcatattgacggcgcttactttgaatgtgttgatgatgaggatctgactttactgactgaccaactaaacacgcttattcgtagctttgagggtaagcctgtgaccttctatacacatcgtgttcgcgtaaagaaagaggttcagtcttcatttaacagtaaaattccttttgttaaccgggtaatgaatgattattaccactctctttctgagccggaatattttgagaacaaactttacctgacagtctgctataagccttttaatgcagaagataaagtttcacatttcctttcaaggaataaacgcaataaaaatattttcgatgaacctatcaacgacatgaacgaaatttgtggcagacttgatacttatctgtcccgcttccactcacgccgtcttggtttgtttgaagaaaatggcaaggtcttttctgaccaactttctctttttcagtatctgctatccgggaagtttcaaaaggtaagagtaactaatagtcctttttattcttaccttggcggtaaagacttgtttttcggtaacgatgctgggcaaattaccgcttctgatcacgccagatattttcgatgcattgaaataaaggattactttcaggagacggacgccggaatttttgatgcgctgatgtatctccctgtcgagtatgtctttacatcgtctttcaccacgatggataagcaagcctccatcaaggcgctggacgatcagattgataagcttgagatgacggatgatgcggctaaatcgctgctggctgatttgcatgttggtctggatatggtttccagtggttacaactcttttggtaagagtcaccagacgctgattgtttttgctgacacgccggaacgtctggttaaagacaccaatatagtgaccaccacccttgaagaccttgggcttattatcacatattcgaccctgagtcttggggctgcgtattttgctcagttaccgggtaactataacttgcgccctcgcttatgtacccttagcagccttaattttgccgaaatggaaagcttccataatttctttaccgggaaagagaagggtaatacatggggcgacagactgattaccttgcgcggttccggcaatgatatttatcacctcaattatcacatgactaccgaacaccagaatttctttggtaaaaacccaacgctggggcatacggaaattcttgggacttcaaacgtaggtaaaacggttcttttgatgacgaaagcatacgctgtacaacagtacggtgcgccggagtcctttccgtctaatcgaaaggtcaggaaattgaccactgtttttttcgataaagacagggctggtgaagtcggcatacgcgctatgggaggtgaatattaccgggttaagggtggcgcaccgaccggatggaatccggcggctctaaagccaactaagcgtaacatcgcttttatgaaggatttgataagactgatttgtacgcttaataacaataccctggatgactaccagaacggcctgatttctgatgcagttgagcgtttaatggcaagggaagatcgttcatttcctgtcagcaaacttattccgctgattcttgaaccagatgatgcagaaactaagcgccacggtattaaggctcgccttaaagcgtggaaacaggggggtgaatacggctgggtcattgataatcgttcagatacttttgacgtagccaatctggatgtttttggtgttgatggcacggaatttctggatgataaagtggttgccccggttgcttcgttttatctgatttatcgcgtaacgatgctggccgatggtcgacgactcattatttatatggatgagttctggcagtggcttaacaacgatgctttcagggatttcgtttataacaaactcaagaccggacgtaagctggatatggttcttgtcgttgctacgcagtcgcctgatgagctgattaagacgccgatagcggctgctgttcgtgaacagtgtgccacacatatctatcttgcaaatcctaaagccaagcgtggggagtatgttgacggcctacaggtaaaagagctttattttgacaaaattaaagctattgacccgctttcgcgtcagttcatggtggttaaaaacccacagcggcagggtgaacgcgatgactttgcagcctttgcaaagttagagctgggtaaagccgcttattatctcccgattttaagtgcctcggcagaacagcttgagctgtttgatgaaatctggaaagaagggatgaaaccggaagactggattgatacctatcttgaacgtgccaaccgtggaattaattaa

SEQ ID NO: 399528 - DNA, 291 bp, Salmonella enterica
atgttgaaactgaataaacgttacttaacactcactgtctttatggctgctttaatgctttgtgttgcggaaccagcttttgctgatgatgtgtctacaaagactaccggttttttacagaagattattgacttccttactgacttgcgaaaaccagcgatcaccattatttgcttaggtattgcatatattgcgctgtttgcacgtcaacatatgacatggatttatcctctgattatcgggatgattatcttcatcattgctccttacgtaccggactggttgtcataa

SEQ ID NO: 399529 - DNA, 645 bp, Salmonella enterica
atgttatcgacctcagcttttatcgcgcttgctatgcagtgcgccgccagcgttcatcctgatactgcacatgaagttgcaagggttgaatctggctttaatccttatgctatagccgagattataccgaaaggtgagcgtaagcccggtgatagtggcgtaatttcttatttcccaagttctaaggaggacgcattaagcataataaaaaaaattgaagctagaaatcaccgttattcaacgggtcttatgcaaataacaagcactaatttttctaaatatggcgtcaatgcagaaaaacttttttcaccttgtacaaacctaaccgtattcgaaaaaattatgcttgattgctatcaaaggggagggagtttaaaaaacgctcttagttgttattactctggtaattttgtaacggggcaaaaatccgaatcaagttttaataatacgagctatacgcagcgtatcggttatagccgttcagacaataaaaaggtatgggctgttccatcggttaaggaagaaataggaaaggagactgcaacacaggacattacacgaagagaaactactgtttatccacaatatgccatgcgtggcactgtatcagatgaaaaggaaacaaacgatgttgaaactgaataa

SEQ ID NO: 399530 - DNA, 228 bp, Salmonella enterica
atgactgttaccagaaaaaagactgcaagcaagcgcaagcctcaacgtaataccctctatctcccttccgacgttcgtgatgaagttgagcgaatcgctgttgagattagctaccgccggggaaggcgtatttctgattctggttttgtgcagtatctcattaaaacctgttcgcaaaaggctatagatgaactcataaacggagccgatatcgactccgaagagtaa

SEQ ID NO: 399531 - DNA, 492 bp, Salmonella enterica
atgaaatggtatgttttgcaattcactacgacgaggtttgctgctgttttctctcatcttgagcagcataacttttcttactactgccctatgatttcagaaaagtatcgccgcccggataaacaaatctcgttcagagaaaggctgttacctcttttccctgggtatcttttcattcaggctgattttgaaaaaattcactcttctactatcaccgcattaccttatgttcagcggtttattgcttttggtggagagccgttacctgtacctgatcaggaaattttaaatgtacaaaaaggagaaaggaatcaacttagccatagtgaagccccccgtttggtggaaataatgctgatggatgatccaaggaagagaagtatagccatgctcaactacatcacagagaaaagcttaacccacaaaatgaaacggaagaaaaatgactgttaccagaaaaaagactgcaagcaagcgcaagcctcaacgtaa

SEQ ID NO: 399532 - DNA, 549 bp, Salmonella enterica
atgaagcaaattaatttcagactggaagaaaaacaacacgataatctacttgaatgtctgaaagtcatttatccagatgagcctggtttaactgttgctaaaggcatgaagttgcttgccagtgctttacttaaaagcaaagcaacagaagatgataatgatgacgttatgcccgatactaatgattttatcaaaaccacaatgtatttaacaatgaaacagcggaataaaatagaaaaagccgcaaagcgtcatggatggactttgtcgagagagtgccgctaccgtattcagaccaccttagataatgaactggatttctttgatcaagaacttcttatgatgaatcgttgtcgcaatgctatcgataaagtaggtcggaattttcactacatcatccttaatgatcaagcaagagttcttgataaagatgggttctatcaggatgcagaaaagcttaaaacagaaattgttaatctgagaagtgagtttgaaaactacataatgttatgcaaaggccgcactgtatctaataaggttgaggtgtaa

SEQ ID NO: 399533 - DNA, 258 bp, Salmonella enterica
atgacaaagcaggagtttttaacttttatcagtgatcaacaaaaagaaggagcggttcgtttttcccttgcattcaacagtaaaggtgaaatagtcattcactggacgaatgatgaagggctgagggtttggagggttttaaccggaaacagagggaaaagacccagccacgcaaacagggaaagaatgagcaacttacgccgctggttgtgtgatgcccgtcagggcatgggaggcgacacaccagaccctgaatag

SEQ ID NO: 399534 - DNA, 150 bp, Salmonella enterica
atgtcggaacgtatgctatcagcaatacaggctgttgaaaagggcgctagccctgtctttcccatcatgcctttctctgcattccctgagttcatggatcagctcaaaaaagcgctggaaagacgagcgcatagattcactggtaaatga

SEQ ID NO: 399535 - DNA, 342 bp, Salmonella enterica
atgaaaaattatgtcatcgaattcaaatcagtaaacgttaaaaaagaaactatcaactgcacttcttttatccagtcagaaactctttttcttgccgttcatgcattcgaagaaaaaaatcgggggcgtggttacattactttgtctgttcgcgaagtagataacaacgaactaagcgcgattaactcacttaaaaagaacgtaacattctggttcaacgaatgtggcctgtcaaaagaaggtgttttaaaagagattgaatcatggttcaattttgctttcaccacgaaggaacagaatgaagctaaaagagaggtaattaatcttttgaataaaaactga

SEQ ID NO: 399536 - DNA, 240 bp, Salmonella enterica
atgattgataaaccaacgccggaagaggtgaaaaacgctcgcattaaagctggatttacacagcaggaagccgcagatcgtttcggcttcactttgtcagcatggcaggctaaagaaactacaggaaaaacttcacgcggtttagcagcgggtacttatgaaatgcttttactcctggctgatgaacatcctgtttatcagcttgtgaagcgtggagaaattctaaaaggaagggattaa

SEQ ID NO: 399537 - DNA, 267 bp, Salmonella enterica
atggatgaaatactgagtgacagaaaaaacaaaggtaatgttacatacagaattgttgtttctgaagattcaggacgtatcttcattgaactggaaaaactgatgaaggttagagcaaaagagtctgaaaagaaaacgaccaaaaaggttgtttatcagcagtcttttttcaaagatgaatttgacagggtaaagaatgaaattgaagacccaatattattgcaattttgtgtcgatacattgttaaaggtgaaaaaatatgattga

SEQ ID NO: 399538 - DNA, 543 bp, Salmonella enterica
atgaaatcattttttctgctctatcggcctgtttttgaaatagtctgccgtatcctgggtaacggttggcgtgtaaacctgcttgatgattgtcaatatcgtataaaactaacgtcaccacgatttaaaaattattctatacacattcgaatggacaaaggaaggttagctatcataggtagcgtggatagacgtaactggcgtagtccatgtcatacatgcactgtatcaccacagcgtaaccccgtagagatagccgcagatatcgaaaggaaaatacttataaatgcattacaggatgttgaaacttcgcgtgagtatgagaagaaactacagaaagagcgggaacaaaagcaaatacttaaaagcatgttgtcacaacttgttaaacttgaaaactggcacggaacgttaacaggttttaaagctgtaaatggcttgaatggacatgtgacagagcgtggtgatggttatgaagtcctgattcggggattggacatagatcagcttgtaaagttatcaggcttaattaaacaactatga

SEQ ID NO: 399539 - DNA, 516 bp, Salmonella enterica
atgaacattcaggaagcattaaacgtctttggtttatcgggtgaattgactgaaaaggatatcaaagctgcatataaaaaagcggctttaaaatatcatccagaccgtaatccgttaggcgctgaactgatgaaagctgtaaatgctgcttttgattttctgatggtaaacatcgataaaatcaattcgtttcagagcaccgatgaaaaagcacactataactacggcgacgatatggaaagcgtgttaaacgttctcaccgggttatcaggtctagtttatgaagttataggcaactggatctggatcagtggggaaactcgcgaccataaagacacgttgaaagaaataggttgcaaatgggcagcgaagaaaaaacagtggttttaccgtcctgaagaacataagagccgctggaaccgcaaagaacacagtattgatgaaatccgcgagatgtacggcacagccgggaagcgtaaagcagctggcaggaaaaaagtagaaaacagagcatag

SEQ ID NO: 399540 - DNA, 885 bp, Salmonella enterica
atgaaaaatgtaactgaaaaaacgaagattcgtcacaggaacgaaataaataaaactctggctcaacttccattggcagccaaaagggttctgtgtctggccttggtttatgttgatccaaaaaaagaaatgaaaatggggcagacctttaaaattcgggctgatatgtacgcaaagatagccgggatacatccttctgttgcttataagcaagtcaaggaaggtgctgaattgttaaatgtcagtaaactttcccttacggggaatgatatgaaggaattagcaaaggaacttggtcttccaaattcaaaaaacatcgaccgccttgatttatcaattactgattattgtgcatataaccaaaatgagggatttgtaattctaagatttggatacactatcacgccttatatatcaagattaattggggcggaaaataaattcacaacacaactaattgcatcatcattaaaattgagaggggagtattcatggtcattatatcagttaataaggaaaaattactcgacatttaaagggaaaaattcatttagcctatctctggaagagttgaaggatgaacttattgcttacaatgttgatgataatggagatgttatatataagtatccagagtaccctatattcaagcgagaggtaataaataaggcaatcaaagaaataaaagaaaaaactgaggtgactttcctgtcttgcgttgtcgatgaaaaagaaggaaggaaagttagtaagttacgatttgaatacgctatagatgaagataaatttgccgaatcaggctctgattttcctatagagttatttgaagatgatgattctgcttttcttgaggagtttgacagaaaagttcccccaaagaaatga

SEQ ID NO: 399541 - DNA, 438 bp, Salmonella enterica
atggctaaaatctatgattttccgctgggcgcagagcgagacaaactaaggcatgaaattaacagggaacgtaaaaagcaacgtagagtaaaaacgggcaatccgtttatccgacacgttaaatggttctggttttatcttcgccttgttacagctggcgcactgcatgtagtttctgttattaccctggctgtcttgggagctttcagtaaggccattttctggattggcggcttgctttgtgtcgtcacatggtttcaccttgagcgccagttctggacgccacataatttcacgatccctgttattgttagcctgtggggattgagtttgtttgccactcccctgatggagctgataaacaaaaaattgccgtggtatcgcctcctggttcccgacgcaaaagaagcaagcacggagacaaccgatgatgagtag

SEQ ID NO: 399542 - DNA, 357 bp, Salmonella enterica
atgaagtttgatgtaaaagagtttattgatgataaatacgcaaaagctattaatattttaaaggaaaatcttaaagaaaactatcatgttttttatggggtcagattgagtgaaattcttttccctgccagtgagtatggctctgatgctttctttaaagaatttgaatcaattaacagtgtaatacttccattggtcatctttgatttaacacagcgtaagccaatgatgattatcagcttcgataagatatctgatgtcagtttgttggcaggaacgggtattgttgttcttgaatgtatctccctggctgatcttctgacaaatgataatattggtattttatataaaatctaa

SEQ ID NO: 399543 - DNA, 978 bp, Salmonella enterica
atgagatatttaaccgaattaatctgtcaactctacaggttgacagatcaccataaactgacagcagcaacgttcaaaaatcttgctgatattaagttagtaaaacctacagcggatgcagacaccatattgcagcttgaaaatatatttagcgaatactcgctgagatatattgaaagggatctggctgaaattctgagcaacataataactatagataaaaaacactctctggatttcgattttaacaaaatacagtctctgactgcctcgaaaagtttcggttgtggatggaacaagataataaatggtagttggtttgaaaatctatattcatggggggaggggatgtatcccgcccaaaatatgaaagctgaaaacatttcagactgggaggataatatatggcacattgagcatgaaggtttcaaccctcgcgaccctatcaatgttacatactactcctggcttgaccgatatgtggcttcaaatagtggtggttcacatcacgcagcaatggttgtataccaatctgtcagagacaaactagagtataaaagagaagcagttattgaacaactgagcataaattcaagcactgtagaaatacttgaccagaattactattcattcatattccagaaaaaacgcccgcaaaataagaatgaaatttatacatccgaatacgagtttacagatgctttaaaagagtttgtagaaaacagatataccatacttaaccctgttaattacgtttctgatataaaattagtttttattcccaaacatgcattaaaaacaaataacaaaacattccgtaactggttctattctgtcactagctgcggaaaaacaatatcattacccgaatatctaaaaaatccagcgcattaccatacacaccattactcacatgagctaaactcgataacacttggagacccgagcagaaaatataaactgagagaggattcttag

SEQ ID NO: 399544 - DNA, 282 bp, Salmonella enterica
atggctttaaaattgaaaacgccaaccgttccggcgacagaagaacaggcaacaaacgcagaaacagcacgctttatctctggagccacaaggaagccaacaccaggtaaagcgaagctggttaatttccggctttctgaagcctttgacgatatcctggaggctgaggcgatcagaacaggacagagcaggacaaccgttctaaaagcagctctggccgcatttgacaatctggacgaaaaccagaaaaaccactggttactggaatctgcaaaattctaa

SEQ ID NO: 399545 - DNA, 663 bp, Salmonella enterica
atgggaaaaattttactggtggtttcagataagggcggggtagggaaaagcacctactcggctaacacagcatctatgctggcaaacaaagaaaagtcggtaatcatcctgaaaaccgataagaacaatgaccttctcagctggaatgaaaaacgcagggagaatggcctccctacagtaccagtctatgaggcatacggtaacgtaagcaaagagattaaccgcctgagcaaactgtgcgacgttctgatcgtcgattgccccggacatgacagccttgagttccgtagcgcactgactgtgtcagatatcatgataactctggttaaagcgtcatctgactttgaaagtgaaacactgacgagcgtaacagagaaagtccgcatggctcagaaatcaaacgcagccctgcaaccctgggtgttacttaccagaataaacccaagcaagccacgccacagaaaagccgctattgatctggataaattattacgctcagacgaggtctggatacagccactaaaaaaccgcatgtctgaactggatgtatttgaaagcgcctgcaatgaaggggcaggggtacacgatgtaagccgcgcatccagtctgacaacagcaaaagcacagatagaattagttgctcaggagatagggataatctaa

SEQ ID NO: 399546 - DNA, 261 bp, Salmonella enterica
atggggcattacaccatcagaacaaatgacgaagaagatcaggttatcagaaaggcgcaggaggctaccggaatggcatcagccagtaaagcctttatgacggccatccttgagcttcagcgtaacagagatgagatagcgcagctcaggcgctcactggcgcaagaaaaagcgcggtgtcaggagctggcatcatcggtgaatcaattccgttccagcctgaatacgatgttcgagctggccgacaacggcaaaagttaa

SEQ ID NO: 399547 - DNA, 819 bp, Salmonella enterica
atgaccagagccacagaacgcgcttacaacgagctacagcaggcgtttgatttctacaatcagaggctgtttaacggcgaacttcccgactgcctgatcaccttccagcgcggtaaaaacacgatgggctacttcagtttcagacgttttgttgctgctgatggcagtggcaaaatgattgatgagattgccctgaatcctgagtattttccggcatatccgcttattgaagttatgcagacactggttcatgaacagtgtcatatgtggcaatttcactttggtaacccttcccgcaagacgtaccacaatgcgcagtgggcggccaaaatggaaagcatcggattaatgccctcttccaccgggagacctggtggcgcgaaagtcggtcagaagattaacgactatccgatccccggcggtcgcttccagcttgtcacactggaactgttccagggtcaatttgcgttgagctggtttgaccgcttccctgttcaggttgaacaacagaaagacatgaccgctgtcatcgagcaatggcgggaaacgctggctcaggcgcatcagaatgcaggctccggcattgatattgaagcggtgctgtcaatggctctgttaccgtcagtgacgccacagaacgggagcgcagattcagaagttatagacggaagcaatatgtcctttgttgcggcgtttgaggataagccaaaacggaacaaggcaaaatatcagtgtccggggtgcggtgctgctgtatggggtaaggccgggctgaatgtccattgcggagactgtgagcaagctttcagagaaagctaa

SEQ ID NO: 399548 - DNA, 234 bp, Salmonella enterica
atggatcatgtcgggatagcgaaggtatggcgtcagcgaaaccaggaacatgctgattccggtgttgtgcttatatgggatggcgaggcgtatggctggaaaaacgttctccgagatccacagcatgaacgcccaggagcaattgccgtcgatgccgaaggtaatatgtttattgccgagggcgggaatgactatgacggcgctaaatgctgggtagtctttcaggagtcctga

SEQ ID NO: 399549 - DNA, 831 bp, Salmonella enterica
atgaaaagagtgtattgtgagttaatgattatcttattcctgtcgcttgcaggttgttcctcccccccacccaatgttggtaataacgaatttgataaaatttttccactaccaagtggtaatggtcccattccccctgagcctactgagcctgggctagcgatacccggtcccggacctgtagctgctcacattagtcaatcttttggagcaaatgccccaatccctgtaccaagagataatccaaaagtaacaatcatgagtatgagtggagccataataacggtatggtcccgacacagaaattcatggttatggggttatacaccctgggattcaaacagtttcggtgagttacgtaactggcaaataatacccagtaaaacccccgatacagtgcgcttcgttaaccaagctacaggctcctgtatgacttatggcataggaataagtggtgctggtggatttatacatgctccctgtaatttcaaatcaaatgcattcgactttcgtcttatcccaacctttaacggtaatgttttcattcagtcagtcgcgattaaccgttgcatccgcgccaggtttttagacagaacgtcgagctctccttatgcttatgaaatattacaagctaattgtcctaaagcaggcgagaaaaatatcgaattacagtggtcaatcagtgaacctttaacttccgctcttgcagcaataagtaaacccgaatttaaaccttttcctccccacccagcactggatcctgacaaaactgaagtcaataccgacaacactcactcagttccagcgaactcgtttataagctatcaataa

SEQ ID NO: 399550 - DNA, 828 bp, Salmonella enterica
atgcaaaaaataatattatatctcatgtgttttctaccattttcagcatatgcagccctgacagactacaaagttgctacctggaatctacagggttcttctgcacaaagtgaaagtaaatggaatgtcaacgtcagacagatgataagtggtgcaggtgcggtagatgttttaatgattcaggaggcaggaagtgctcctgcaacctctatagatacaggcagagtaataaattcccctggaattccaattcgggaattaacatggaacctgggaagtaatagtcgacctcagcaggtattcatttattttgcgcaagtcgatgtttttgcgggtagagtaaacctcgctattgtaagtcaacgccgagctgacgaagttatagttcttcctccaccttccacagcatcacgtccgatcattgggatccgaataggcgctgatgcctttttcactgtacatgctttagctaatcgtggcgttgattctcctgcaattataaatagtgtctttaatttcttccgtaatagtcacagacctgaaattcaggctacaaactggatgataggaggcgatttcaatcgtgatccggacacattaagacgagcaattgaaactccggcaagaaataatactgtaatattatctccttcagacccgactcagcgcagtggcggagttctggattatgctgtcgttggtaatgctatagcttttaccccccctaccctcagagctggattgttgttcggtgagagagccactcagatatcttctgatcactaccccgtgggctttttcttaccaccgccaggagaaccaagatga

SEQ ID NO: 399551 - DNA, 558 bp, Salmonella enterica
atgaaaataaatttctcgattattataatatgtgtgataaatctagtatccggctgtagcgcaacaggtactaacgagacgtcaaatgcttttgatactgaaaatggctcactctttagtatacgtaacgtacaaagtggtttcatgataccaaatgtactcgatcaacaaggtcaggaactgagaggctgggaagttgtgccacaagtcactcctgtggagatattagctcagtcgccgagtggctgggtccagtttaaagatccgggtagtactaattgccttgttgcacaatcgggaaggtcacttagcaagtctacatgtaacattaaaaataaagaaacactatttatattaatcccatccactacgggagcagtgcaaattcagtcagtcgcttcgaatacatgtattattgacagggaggatggtgaaaactttcaattcagcaattgtatagctgatgtacgacgtcctgaacaggttgtccctgagaaaaacctttggatgcttaatcctccagttatcgcttcatctattgcaccgaaaaacatctaa

SEQ ID NO: 399552 - DNA, 2055 bp, Salmonella enterica
atgattattacaggacagggattatctttcggatgcggtatgacgaatactgcctctcccttatcagtagcaaaaacggattactggtacgtcctcccggtcacgggccagtctaacggcatggcgtatggtgagggactgccactccccgccacgctggatgcgccgcatccgcgcattaagcaactggccaggcgctcaacagtgacgccgggcggtgaagcctgtcactataacgacattatcccgcttgaccactgcccgcacgatgtgcaggacatgagccggatgaatcacccccatgccgacctgtcaaagggggaatatggtacagtagcgcaggccgtgcatatcgcaaaaaagctgctgccgtatatccccggtaatgccggtattctcattgtcccgtgctgccgtggcggctcggcgtttacacagggcgctgacggcgcgtacaacgccgccagcggggccacggaagcctcttcccgatggggcgtgggtaaaccgctgtaccatgacctgactgacagaaccaaagccgcactggattcgaacccgaaaaacgtcctgctggccgtcgtctggatgcagggtgagtttgatatggcatccgccggctatgcacaacagcctgcgctgtttgctgctatggtgaagcagttccgtagtgacctggcagaccatgcggcacagtgcccggattttaatgctgcccgcgtgccgtggatttgcggggacacgacgtactactggaaaaacacgtaccccacgcagtacgacgtggtgtacggctcgtataaaaacagcacggagccgggcgtacattttgtgccgttcatggtggatgaaaacggcatgaacacaccgaccaacgaaccggcggaagacccggatattccggcggcacattattacggttcagcctcgcggacgaacggcaatatggtctcctccctgcgcgggagtcatttcagctcatgggcacgccgcaatattattccggaacggctggcatcagccatactgctgtatgccgggcgtaaaaccctgctggccgcaccgtcaggtaattcacagcctcaacagcagacgccgggaggtagcacggctggcggaactctgaactattctccacagaccgatgagatgggctataacggtcggcgcggtgacggtactctgaccgcccaggggtggacgactgccacaggcgcagcgttcagcccggttgccagcccggataataaaggcgggtatgtgctggatatcgtcaagagcgccggtaagtcgtggactgtcagccagccagttgccgggggtattgacctggtgaaattcgggggccggttaaccgcaaaattcaggctgaccacagcacttgccagtaatcagtatgcttttgcgttttatctgatacttcctgaggccagtgttccggcggatatcacatttgccggaaaaacagatggcgggaacccggcagtcatgtcgttttttatccagacagacgcgaccagtataaacctgatgcagcataaaaaagtgaacacgaaactggggacgtttggcgcttatgaccagaagtggcacacgctggaaattgtttttccgggtaacaacagcgtgaatgtgacgccagttctggatggggtaacagggccggcatttgatttgtcttacagtcctgcaaacccggcaaccgacacccttttactgaccagcatcaccagcggcacaacgtatggcgtacaactggaggcgttcagcgttcaggtcttccgggatgatggtactgttatcctggcggatactgacgcgtccagttacgtatatttcccggttaaccacaacggcggcaaagttatcattccggatgcggccatcacagcgggtaataccgtacagatagtggcagaccatgccgggacgatagcaatccagcccgcgagcagtaatgtactggttaacggcctgccatcagccaccaccaccgacgccagtcttacgctggtacagcagggaagcgacggtaaaacctgggtggttgcgtaa

SEQ ID NO: 399553 - DNA, 234 bp, Salmonella enterica
atggcaaccacagaaaagataattggccggcagtggcagcagataacggacagtatgcagacggcacttatacagatagttggttcagcggacgtgtgcgacagcccgggaaaaccaggggaggaccatccggcgcacagtttcagtaacacgacactgtctgttacgccaccaaccatgttgtgggtgcgttcgtcgtggtttgaaggtagcgttcgtattgttgtgtcatga

SEQ ID NO: 399554 - DNA, 624 bp, Salmonella enterica
atgacgattatcattgatgcccgtaacgggcgctacaacgaaaacgccaccataacggcagaagtgcagtttaatggcgtcacgaatgacgatggcacggcattgtaccttccgttcacggcagccccccatgacccggcagactacggtaagcagctttacgctgacctggtgtccggtaaatacggccccgtcacgccgtttaccgtcacggatggaatgattcaggatgccagaacggcaaaacacgctgaaatcaatagctggcgggatacacaggaaaacgggaactacctgtttaactataacggtcacaaatgggattacggcaagaccacgcaggacagaatgagtatttcactggcgatggcaaaacgtaattcgcttccggcaggttttgcctggacggatggcgataataacatcgtgccgatggataacgtcgggctgatagctctggccgccgcgattgagcaggcgatgtttgagaagggaatgcagataaaccagcgccagttacagatgaaggcggaactgggagccctgacaacgctgaatgctgtacgtaactaccgggtggactggcaggatgcgacagatacgttaaccgaagccgggaaataa

SEQ ID NO: 399555 - DNA, 798 bp, Salmonella enterica
atgccgataatctcaggcacccttagtgatggtgcagggcggcccgtatctgactgtacgatacggctacgggcgctgaacacgaccagcgccgttatcaccactgtcacggccagtgtggggaccacagtcgggcagtatcatattgaggtgctcccggcacgttatgacgtgacgctggacgtgacagggtatccaccacaaaaggtgggaagcatcgatgtttatgctgattctccggatggtacgctgaatgattttctgatggcaacaaaatcggactacctgatgccggatgttatgaagcagttcagtctgatgttgcaaaaaacggaagattccgcagaacaggctcagaaggcgctgaaacaggcacaggaaatcgccagaatgccaggacccaaaggcgaccccgggcccgccggacccaaaggcgaccccggacaggcaggtacaacaggtccgcaaggaccagaaggagatacaggtccacagggccccaaaggtgacatgggcgacatgggcccacaggggccaaaaggcgataaaggcgatgcgggtcctcagggggcaattccagcccccggtgacgtgaggtcactggtttttgccaggacatacagtgcgatgagctatggcgacgaaacagcaggcgggaatctgaaacccgcagggtacatggggttaataaatggatttgcgagtcaggatgattattcattcgcaggcatctggaaatgcctgggttatgtaaccgatgttgattttgattatacacttttccagcgtgtcaggtga

SEQ ID NO: 399556 - DNA, 1356 bp, Salmonella enterica
gtggcggcggaagacggcagtgaccggctggtcagcagcgcaggaacgccggatacgcagtaccggttccgggggctgacgccggggcgctacaccctgtccgtcagggcggtgaacagccagggacaacagggagacccggccagcacacagttcagcatctccgcgccggcggcaccatcatttatcgaactcacccctggctatttccagattacagccacaccgcgtcaggcagtatacgacccgacggtgcagtatgagttctggttttcagacgcgcagattacggatatccatcaggtggaaaacgccgcacgatatctgggaacggcgctgtactggatagcggccagcgtgaatatcaggcccggcagggattactatttttatatccgggcggtaaatcaggtcggtaaatccgcattcgtggaggcgaccgggcaggccagcaacgatgccgcaggctatctggattttttcaaagggcagataactgaaagtcacctgggtaaggagctgctggaaaaagtagaactgacggaggataacgccagcaaactgcagcagttttcgaaggagtggcaggacgctaacgataaatggaacgccatgtggggcgtcaaaatagagcagaccaaagacggcaaatattatgtggccggacttggactgagcatggaagacacgcctgacgggaagataagccagttcctggtggcggcggatcgcattgcttatattaacccggcaaacggaaacgagacgcccggatttgtcatgcagggtgaccagataatcatgaacgaggtgttcctgaaatacctgagtgcgccgaccatcaccagtggcgggaatcctccggcattttccctgacaccggacggaaagctgactgcgaaaaatgcggatatcagcgggactattaacgctaattccgggacattcagtaatgtacatattctcggtgactgccgggtggatgccgttctgtctgcaaatcagatacggggtgatattgccagaattgtcgcctgtaaccggcgttcttcagtgtacatccccgcagaggagtttgaccgcaccctggcgataccgtctgtctgggtaacggcatcgggatttgcgggcaacactttccatgtgaatatcacggttaccgtcaatgtcggtggcaccgtgtacacgggggcagcgtatgccaccaacgtgaagccgggcatctgtgatgttttttgcataatcccggcaaacatacctgttgctgtcagttatcaggcgagctggaatgactcgcaggatggctccgcggtggatagttcatcgcaggcgctggtgtttatcaataaggcgtaa

SEQ ID NO: 399557 - DNA, 300 bp, Salmonella enterica
atggcgacctcaacaacatccacgccgcatgatgcggtattcaaacagtttttatgccaccccgatactgcacgggattttttggaaattcatctcccgtcgacattacgtcaaatctgtaatctgaatacgttacggctggagtccggtagctttattgaagaggatttacgcccccattattccgatattctttggtcgctggaaacaagtgaaggtgaaggttacatttacgtggttattgaacatttatgcggtgcaccgcataaatgctcttatgcaaagaaaatgattatgtga

SEQ ID NO: 399558 - DNA, 279 bp, Salmonella enterica
atgaatacagaagaattgttagaacatattgatattggtgattattacgaggcgtatattttattgtgcgataaattcccaacggctgaacgccgttttaagaggctaacaaaggcgttagcagcgttattagacgaggttagacaggaattcccagacgcctgctattacacggcttctggcggatttaacctgttgctgggtgaatctgacgcgggtaacagggtggttgcgttatcagcgagtagttatttatctgtcggtgatggagatttctaa

SEQ ID NO: 399559 - DNA, 261 bp, Salmonella enterica
atggctggatggtggatgcctgttcctcagttgagagtaatgagagcgttagaaaatggatttgttatgcgctattgctccaaaacagatacgtactggtgggaagtcggaggaaaatgtactcctcaagggcgagcgttacgtaataaggggttaataactacagagagacgttttgatgggcgactaccggatgatgttcgcattacccctactggaaaaaatgagcttgggtataacagacaccgggagattaattaa

SEQ ID NO: 399560 - DNA, 219 bp, Salmonella enterica
atgaatatcacaacaacacagtatcgtcagggtgtgaaaggctgttttctttcaacgcacaggccacaaccagatgaattattaacgctcgttatgcctacgtgcagggggaagcgatttattcccgttggaaaggtgcagcggattgaggctgttggttcgagccggtgccttgtctgggtttcgaaactggcatttgttgaggggatgaactactga

SEQ ID NO: 399561 - DNA, 696 bp, Salmonella enterica
atgacgatattttttattaatgacggcatccacacgctgcagggtatcttcatcatcatgccgtcccatgataatttgcttatcaataaggaaagcctcttcgcccggcgcccagccccagacatacatttcataacggttacgctgggagtcgataccagcggtcagatacaccacccgctccggaaccggcgccgcataatgaatcactttttccagcaaaagctcatggctgagtttttcggccaccgcctcttcataaggctcgcccagggtggtgtttataaaggttttcacaccatttggatctttcagcgcatccagccagtcataaacaatctgtatccaggtggtaaagggactgtaagccgtccagatatgaaaggtaatggatcgtggcggaggaacctcctcaccggacgcgctgaaataagccagtccatcgcgtgtccacatgcctgtgttatcgcaaatccagcggcctgctttctgatcaagttccgattgacggatcacgcatccattatgttcacaaaggtaatacaccgtctccggcttgctttcctcccatttcagaccgaacggcgtactgccatcaccgaatttaaggtactgttcttcgccacagtgcggacacggtacatgaaaacgcataaaatgcgccgattcatttgccgccttttcaatctggcatga

SEQ ID NO: 399562 - DNA, 426 bp, Salmonella enterica; identical to SEQ ID NO: 390192

SEQ ID NO: 399563 - DNA, 159 bp, Salmonella enterica
atgatttatgaatctttcaagaacacaagcatcaacattatttattccaatgtgctgagtatcgagccaatatccaaaatgcgcagccgcccggatcctgtgctgcattgtggacggactgagtttacctgcatgggacattgcataggattgaattaa

SEQ ID NO: 399564 - DNA, 711 bp, Salmonella enterica
atggacattccctggccgctgccggtggcctgtgcgctgagattaatatcatatgaagccgtcagattcccgtttgacaggcgaaatccggttccgcctctactgttactgccggtaatgctggcgtacgcggcattcagcgtcaggttattcagtgttaacccggtcgccgcgccggcagcggcactaccacccagtgtcacagtcccgtttaccgccgacagggtggctccgtcaatcgctgctccgtccggaacctgtacggcacctgcgggtcccgcggcgcctgcatgtccgttcagggttatattcccgcctgtggctgttatcactgcgtttccgccaacagacagccccttgccagtatgtccgttcgcaaaatatccggtcagagccacatcattacccgcactgatactgccaccggaaaccgaaagaccactactgccatcattccacaggttgctgtacacacgggagaagtttaagctgacatcctctccggccgtcagggtactgttggtaaaggcagcccccttcgcccgggttccggtcgcattattgctcagggtaatactcttcgtggcattcagtaccgagctggactggctccaggcgacaccacccgtgacactgttatccagagccgccgtgatattctggccactgacattgctgttgctcagggataccctgtcccctgacacctga

SEQ ID NO: 399565 - DNA, 315 bp, Salmonella enterica
atgagagatattgagaaagaaattatcgattttatcgatcaggaatataacactaaaaagtactttctctttgggccaaagcgaaccatcatacttgataccagtattagggatgatcttaaactcgtttttgaagatagtgaagaacttctacaagagtacttcaagcgttggaatgtagattcagaaggatttgacatacttaactatctgaatccagagtactttggaagtaaagagcctgatccgcgtaagccactaacagttggtatgctcgttgaaagtgctaaagctggacgttggttatatagttga

SEQ ID NO: 399566 - DNA, 495 bp, Salmonella enterica; identical to SEQ ID NO: 390180

SEQ ID NO: 399567 - DNA, 585 bp, Salmonella enterica
atggctgcatttatttttgatacagggcttaattttagcaaggagaatataactaaaggagtgatttcaacaaggtggcataatgacctatattcatcatttgagagaatgaaagcaattaataaaatttactacccatccaacaaagagataaacacagaaggtctatccaaagccatcacatcatctcttttcaatgatgacgcgaactcgttcgcaaagagagattttcgcttgatgtgggacttatcttctgaaaaatatctttcctataaagaaataataataagaaaaggcgataagcttgacgctgtatgcttgagatttataaatgatgactacaagtttttagttaatttcaacagagatgaagaggttttcaaatactttccatctataatgcaaccttcactcaaaacatatagagcgttatcaagactagtaaactcaatcaaagatccttctagatttaagttcacgacagagtcattagaaatggagttactagaatacttagagttaagaaatgaattattcaatgacatagaagaagtaatgggtagctatgctcagagggcaccatag

SEQ ID NO: 399568 - DNA, 651 bp, Salmonella enterica
gtggccgtattcgcctttcagaatgcccgccgtttctttggcaatggttttgtagcgttcgccggtcaggacgttgagcaccgcctgggtgccgacaatctgcgaggtgggggtcaccagcgggataaagccaaggtcctcgcgcacgcgggggatttccgccagcaccaggtcgagtttgtccgccgcgttctgctgcttcagctggctttcgaggttggtgagcattccgcccggcacctgggccaccagaatgcggctgtcgtagcctttcagctggccttcaaaggcgtgatactttttgcgcacctcgcggaagtaggcggcgatgctttccagcttcaggatatccagcccggtgtcatattttgtgccggcaagcgtggcgaccagcgcctcggtgcccgggtggccgtaggtggcgctcatggaggaaattgccgtgtccacgccgtcaacgcccgcctcgatagccttcagcagcgccatctccgccatcccggtggtggcgtgacagtgcaggtgcaggcgcacctcaaaacgttttttgatttcgctgaccagctcatacgccgccatcggcgtgagaatgccggacatatccttgatggcaatcgagtcaacgccggtttccagcagttgctccgttaa

SEQ ID NO: 399569 - DNA, 255 bp, Salmonella enterica; identical to SEQ ID NO: 28072

SEQ ID NO: 399570 - DNA, 255 bp, Salmonella enterica; identical to SEQ ID NO: 28072

SEQ ID NO: 399571 - DNA, 255 bp, Salmonella enterica; identical to SEQ ID NO: 28072

SEQ ID NO: 399572 - DNA, 495 bp, Salmonella enterica; identical to SEQ ID NO: 390180

SEQ ID NO: 399573 - DNA, 468 bp, Salmonella enterica
atgaacagtgtaagcaagttcggctcctgtgtatgctcactatgcatgattgtcttgagatctaacgatcctgaaggtagtcttgtccgtaaacgaaaaaaccgcccagcaaggcggcttttcgaaggttctcagagcagcaactctttgaaccaaggtaactggcttggaggagcacagccaccaaatctgtcctttcagtttagccttaaccggcgcataacttcaagactaactcctctaaacggttaccaatggctgctgccagtggcgtttttacgtgtctttccgggttggactcaagacgatagttaccggataaggcgcagcggtcgggctgaacggggggttcgtgcacacagcccagcttggagcgaacgacctacaccgggccgagataccaacagcgtgagctatgagaaagcgccacgcttcccgaagggagaaaggcggacaggtatccggtaa

SEQ ID NO: 399574 - DNA, 255 bp, Salmonella enterica; identical to SEQ ID NO: 28072

SEQ ID NO: 399575 - DNA, 255 bp, Salmonella enterica; identical to SEQ ID NO: 28072

SEQ ID NO: 399576 - DNA, 255 bp, Salmonella enterica; identical to SEQ ID NO: 28072

SEQ ID NO: 399577 - DNA, 123 bp, Salmonella enterica
atgagttctgtcaaaaagatcgggctatttgcctgtactggcgtcgttgccggtaatatgatggggagcgggattgcattattacccgccaaccttgccagtattggtggcattgccatctga

SEQ ID NO: 399578 - DNA, 147 bp, Salmonella enterica
atgctgggaacctggttatctgacgcaaccatcacgctacaggagagcgtagaaacgtggccgcaggcgctggaaatttgcggcaaacccctgctggacgcaggtgttatcgcaccggaaggcactgttgcaaatagtcggtggtga

SEQ ID NO: 399579 - DNA, 1707 bp, Salmonella enterica
atggaacatctaaagcaactactaaaaaagactgattttgtcgagaaatatggcgttggaaacgcgcacctattatggtccctaggtctatacttggacgaatcagactttgataaattagcctcagatggtttaactgatggtggtaatgataaaaaaatagattttattactgtaataaattcaacactatttattgcgcaaggttattactgcaaccaagaagctttgaaaatcgttgcgcccgcgaataaagcatccgatctcaacactgctttagcatggataacttcaggttctggtcaatctcctaatgaaaaattaagagcgaaaattgccgaggtcagaaaacttattgatgataatgaaatagaagctgtagagcttttatatattcacaattgcgctgagtcagaacaggtaagagttgaattagaaacatgtcgtgactatctggcaggtcgctttactgataaagaaatcgaagtaacgtacaaagaattgggtgtatatagtcttgaaaaattatatatagcactttctcagcaaatcgttgtgaaagacgatatagtttttgatggtattcttgtcgattcagtacaaggagacggatggacttcccatgtagggttcgctaatggcagttggctgaactctcttttcaaaacacatggtgctgaactattctcagctaactaccgcggttttatggggctaagcaaaagaagaaaaataaactcatcaattagaagtacagccgaaaccactcctaaagatttttttgtttttaataatggcgtatcaattcttacaacgaaattcaaaaagaataaaaatgaaggaattttagaaggcatatcgatcatcaacggagcgcaaaccactggctctataggctctgtgcaagatatacaaaaacttgatgggttgaaagtattatgtaaagttattgagtgcaatgatgctgataaagtaaaaaaaatagttcagttcaataacactcaaaatcatataacgacttgggatcattattcaaatagtccagaacaaaaacaagtaggagaggagttttcaaccttaggttatagttattctttaaaacgaggctttgagaacaccagttctttatttggcattgagtcagttgcacaacccttagtagctctacatggcgattacgccagcgcaaatagaggcaaaaactatgtttttgatactaagactgcttatgacaatgcatttcatgaatcaaaagctcaacatattttatgtgcatacactatttcgaaagcaatagaaaaagttaaggcacagattaaaaataaagaaaacaaaataaaatctgatgaggataacttactattcttacaaaaccttaaatctcgtttctttttgattgctatagtaggcgaaattcttgaggaattaacagacaagccattgaataagaaatttgttaaatacaaatataatacatcccttgcagcaaacaattcgttagacgacttaattaacttatggacgccagtaatcgctgctatactgccatttgtcattagatttgctggtcaagatctaaccacatacttatctgaaacagaaaatcctttgcatactgtcgctacagaagttaaaaacactttaagctccttaaaagcatttcagcctatagaaccgttaagagtcttagctgaaaacttagaataa

SEQ ID NO: 399580 - DNA, 444 bp, Salmonella enterica
gtggatgaactgcacagggtggatgactggctgacggcattgctggcaaatctggagcctaccgaacgccagcgtatgatgcgcgaactggcgcaggaattacgccggaaccagcaaaacaatattcggctgcagcgtaatcctgatggcagcgggtacgagccgcgaaaagttacggcccgaaccaaaaaggggcgtatcaagcggcagatgttttcgaagctgcgcacggcgaaatacctgaaaactgcagccaacgtggattctgccagcgtgcagtttgcaggtaaggtgcagcgcattgctcgtgttcaccattacggactgcgtgatcgtgtaagccacaaggggccttggattcgatatgaggagaggcgattacttggtaataacgataaggttgaaaaacaaatttatgatgtcttagtagagtggttaaaataa

SEQ ID NO: 399581 - DNA, 246 bp, Salmonella enterica
atgcaccagtcgcaaagtcagcgcctcggccataaaacaaaaaccctactcgttgcagtagggttttcctgcatttctgtgagctcatttgcggcaacacagacctgtgcagcatacgaactggcaaaagctggtgcagatgctgcctataagcaggaagtggaaaggattaacaacgccgcaaaaagcgaatccagtacgtctgattctctcggacagtgcctggggtggcactgttgcaaatag

SEQ ID NO: 399582 - DNA, 3393 bp, Salmonella enterica
atggcgaaacctgaaattgcaactgaaagaacccgtctgagtattccctttgacgatcgccaacgtgcaatacgtgcggccggcaaactggctgatggcagtaatgctctggactacgtgaaggaagaaaaggtgtggtatgcacagccgggggccaacctgagccggctgaaagagtggatttttgaccccaataaagtgatcgaagaaccgcccctggatattcaagccattgaagatgaatttacggcgtggcttgaagagcgcggtgccattatcaaagaccccatagagttcgatggccagaagcattatgtcgataccgtggacggtaaagctggttcaagaaagggggtgtatgccgcctttctggatggccgacctgcagggtggtacagggactataagaacggtggtgaaattcagaaatgggtatctaccggcgcagcccctaaccctgaacaaatggccatgctccgtgctgatgctgcggcaaggcgtgaacaaagagctgcagcgcaagcggataagtttgatcagaccgctaaccggttgatggaagaatataaccggcttccggatgccacgggagatctggcatacctgaaaaacaaacaggtcattgccgctaacggccttaaagctgatgagcggggcaacgttgtgatccctctgtttaatgctgatggcgagttcaggacccttgagcgcatctggtccgacggtagtaaacaccttgaaaaagacggccaggcatgggggagttttttcgttgtgggtggtcaactgaaggatggtgacaacctgctttatgccgagggatatgcgacagcagccagtatcagcgaagccatcaatcagcctgtgatcatgacggttaatgccggcaacatggtggaagttgctggccgcctgaaagacacctttccaaacagcactcattacttccttgctgacaatgacatttataaagacgagaacgttgggctagaaaaagcgacagaagctgcagagctgactgccggccatgttctggtccctgcctttagcaacccgaaagaagggcttactgactacaacgatttgcatgtctctgaagggctggagcaagtcagattgcaggtagaaggagccattaatcaaatgaacagggtagacactatgccgactgataacccgaacattactgacgttaatcacagctcgactgacagcgctgccgttgcagatcctgaaaaagccgcgccggtggccagcgcccctgcagctgccgaaccggaggaaaccgcgccggtggccagcgcccctgcagctgctgaagcggtggaagccgcgccggtggccagcgcccctgcagctgatgaaccggtggaagtcgcgccggtggccagcgcccctgcagctgccgaaccggaggaaaccgcgccggtggccagcgcccctgcagctgctgaagcggtggaagccgcgccggtggccagcgcccctgcagctgatgaaccggtggaagtcgcgccggtggccagcgcccctgcagctgctgaaccggaggaaaccgcgccggtggccagcgcccctgcagctgccgaaccggaggaagctgtgccggtgtccagcacccctgcagctgctgaaccggaatacaccgcaccaacagatcgagacggcgatgatgaagagagtaatagcgccagtgatcttgaggcgtatgccgctatgatggcctttggcggtgaaacaactgactccgctcagcaaaagcctgaaaggatagcgcccagcgaatctgtagctaataccgccccggctgaaaatgaaaccgaggagaagaaaaaaacaaacgaagaactggaaaacggcatacgctgggcaaccaacgataatgcagaaacgcccccaaaagaacgtatagacctggaagggttaattgcccggtttgggtacagagcagagaaagattatacggcgtatacgcttgatggacaggatgcgttttacgattacggctcacatctgcgtatggctacccctgaagccagccagagtgacgagatgatcctggcggccgttctaaccgcggataagcaacatcatcgtggtattgaaatcaccggcagtgacgaatttaaagagcgagtgtttaaccttatcagtgaatacaacattgaggtgaaactgactaacccagaacaaagggttaaattgctcgaactcaaaaaagcaaatgaaacagcaaaagaaacggcaaaagaaaatgttgctgattcaaatgcgaataagcaggaaggggcaaacgaaaagacaaattcatcagttcagcagaatggaatgcgctgggaagaatcggcctctgtgcagccgaagaagcagaatgcatctgatactcaaaaggaagataaagctgcaggggaaccctgggagaaaggcgttatcgtcgcgcatggacgtgctaagtatgagtggaaagaagatgaatccatgaactactttgtcaccctcaaaaatgaacatggagagaagacactctgggggaaagaccttgagagagcggttaaagatgctggtgtagacacagaacgtcttgttacagtcagaaagctgggatttgtggatgttgaggtgaatgcacctgtccgtgatgaaagcaacaagatcgttcgttatgaaactatccagaccaaacgtaatgagtgggaagtaaagcctgtatacccacagccaacagcagggaatgaacaggcctataagccttctgaactggttccgtatgatgctgcaaccttccagaagctccgcacaacaattcagcagattaccggtgttgatctcagccgtgaggccgtgcctgaaaaagaactgtactggttcctgcctaatggtaagccagctccagaaagcatgacaaagcccacaggctataaactccctcaagagtcaaaaaccgcgggtacacctttgctgatcgcaccgcataaaaaaggcgaacgcccagattatttccttgttgagtcgcgtaaaggattcatgcaggggatcgcaaaggataaggagtccggtgagtaccatagcgtgattggaaaagtgaacaagcgtattgataaagacggaaactggaaaacgtatatgactctttcagcaatcaataaaaatgccgaaagtggaattgttttgcatggttatggacatgtagatcaggggggtaaaaatttgctttacaaaaacacaattgcaaatgaaaaacagactcagcatttacaagtggcctcagatgaggtaaaaaacaaaacagtaatgaagcagctttttcatccttcaaatgctgcaaaaagaaaagatgatgaaaggagagaacagactcatgcaccagtcgcaaagtcagcgcctcggccataa

SEQ ID NO: 399583 - DNA, 261 bp, Salmonella enterica; identical to SEQ ID NO: 83582

SEQ ID NO: 399584 - DNA, 1164 bp, Salmonella enterica
atggaagcattcaattttggtccaacgctgacgccccagacgctggaacgttttctcgtacactgctcaaacaatgaagtgtccgatattctgttgcagggcggagataaaatctgggtagaacgtcatgggcgccagttgcccatgacatcttacccgctcgacaacctggagctggaacgtaccgttgataaggtgttcggtcaggagatcaaagggacgctgaaaagtgctgcggtcgttaataccgctatccagctaagaggtgatgaagcgggcacgattggactcggccgcggcgaaacccgccggttccgcgcgaactttactcaggccgatatttataaaacagaagcggcaatgtctctgacactccgtgttctgaatgaggttattcctcagcttaaacaaatgggtattgagccggacctgtttaattctctgttgccggctgccggcctcggactgatatgcggcgagacgggatcgggcaagtcaaccctgatggccagcatcttccagtattgcggtgaaacgtaccaggaccggaaaatcatcacggttgaagatcccatcgagtatcgcctgggaagtcgagactggattgctccggcgccggcacagtcacagattgggcgcgatattgattccttccacaattttatcactctctccgggctccgtcgttctccgaagattatgggggttggtgagctccttaaccgcctgtcatttgaagctgctgtactggcaggtaaatccggccacttttgtcttggcacactgcacgtcaaaacggtcggagaagccatttcccgatcattgcagaactatccgccggaaatgcgtgaagctgccgcctttgacctgctgagtatcctttcttacatcatcgtgcaacgcttgcttaaaacaaaagacggccggcgcaaggctgtccgtgaatatctcgtcattgataacagcctgcgccgcaaactctatgacgttgattacagcaagtggggccgctacatcgacgacctgttgatcgctgaaaaccgcagtctgattcagaacgcctgggcaatgcaccaggaaggtttgatcgacgaagcggaagtcatcgaggtcgcaggatatatggactatctggcgttaaaagagggcaagtatggacattaa

SEQ ID NO: 399585 - DNA, 780 bp, Salmonella enterica
atgaaacttaaactgatcgtgcttctgacgttaccgctgcttgctgcgaacgttgcacgcgcggacgactccgatgttaaaggcctggattactacatggacccgccaagccaaagtgacgatgaggccgatgttactggcagtatgctaaacgacgcagcgcacaccattggatttcgcggcggaaaggcagaacgcgctaaagaaattcgcgccgcgctggaaaatcagcgcagcaaccttgattacatgtattcgttccagccgctgatctcttctgaaggctacctgccaccggtcattgctgaagctaaagacgttgcacacattaccaatgagcaaatccgaacggccaaccgtgcctatgacattgtggtgccggcgcgctttgtcagtaacccaccgacctggaaaagctatcttctgaccgggctgatggcgcagcggatcgaattgcctgaaccggctgcaatgccgaaggacgggaaacaacgtgatatctggaaaaaagctgtcgcgctgggctggtctgacggtcgccaaaaagctgatgagatattcactgctaatttcaatcgcctcacacgggattacaccggcatgttgcgctacagcacgctactgcagcagggcatgattaaggctccagtcatcacacagcagcagcaaacagttacaggggataaaaaccgcctcatgctgggcgataaaacgaaacgtatgaagcagcaagctgagtttgacatcaacaaacgcagctggaaaccgaccatacgttaa

SEQ ID NO: 399586 - DNA, 501 bp, Salmonella enterica; identical to SEQ ID NO: 95994

SEQ ID NO: 399587 - DNA, 1980 bp, Salmonella enterica
atggtgatacctaaaatcattgagggccgaagggataaaaaatccagctttggtcagctgattaagtacatggcagacaagccgtctcaggagttgactgatactgttcagcctactcctgagacggttttagctgttaaatcggatatgttcgaagggttaaacaattaccttatccgtaaacagaaagtgatcagcacaccggtggatgttgagccaggtgtacagcgtgttgtggttggtgatgttacctgccagtacaataccttctcgctcgatggtgcagcacaggaaatgaattctgtttcccagcaaaacacacgctgcaaagacccggtcatgcattatgttctctcatggccagactatgagaagccgaatgacgatcaggtgttcgattcggtgaagttcactcttgcctctatgggcatgtccgatcaccagtatgttgcagccatccaccgggatacagataacctgcatgtgcatgttgctgtcaaccgcatcaatccccagacatataaagcagcctcatcgagctttaccaaagacactcttcatcaggcgtgccgcttactggaattgaagaatggttggtcccattcaaacggcgcatatgtggttaatgaccgtcaacagattgtccggaaccctcacagtaagaaagagcggggcaactggcgctcactcgatcgcatcaacaagatggagaataaagagggggttgaaacgctctatcgctatatcgttggtgatgaacaagtaggcggtagtcgtcaaaacttgatccatgtttcagctggacttcgtgaagccaaaagctgggatgatgtgcataagacatttgcagacatcggtcttcgtgtcgaaaaagcacaggggaaaaagggctacgtcattacccacgaacatcaaaaccagaagacggctgttaaggcgagtctggtatttaacaaggcacaatataccctgaagtcgatggaagagcgctttggtgaataccagccttcacatattgaaccggccaaagtatcggtatttaaaaccgcatatacccctggtgcttatcgtcgagatgccaataaacgtctgcagcgtaaaattgagcgcgcagaagaaagaatgctgctcaagggtcgctatcgcgcctaccggaacaatttaccgatatattctccggataaggatcgcatcgccgatgaataccggaaaattgcccaacatacccggttggtgaaaaataacgtccggcattctgtttcagatcctcataccagaaagctgatgtacaacctggctgagttcaaacgcctgcaggcggttgccaatctgcgtcttagcttgcgtgaagaacgcaacggcttcagggcggctaacccacggctttcttaccgggagtgggtcgaacaggaagcactgaagggtgataaggcagcgctcagccaaatgaggggctttgcctattcctccaggaagaaggagaagtataaacagcaactggttgagcagatcgggttcaaccgtacctttaacgccatcaccagtcatgatcgtgatgatgtggccgtaatggcctcagcacgtcatggtgtcaagccacggcttttgaaagacggtactgttatctttgagcgcgatggtaaaccggtagcggctgatcgtggtcatattgtgctgacagaaagtaatggaatcgacaaagagaaaacggctgaccttgcaattgcattaacgattgctggtaaagccaaatctgttcgtgttgatggtgacggcgagtttaaggaactgtgctgtaatcgtatcgtcgatgcagctgtgaaccacaatcaccctgtcgcgcagggcattaccttcacagatgccgctcagcaggcgtatgctcaaaacgagaaacatcgtttgattcgtgagcaaaataatagtaaaaatgaaatgcaattcagaagtgaaagcgacgacaaattcaatccgaagtaa

SEQ ID NO: 399588 - DNA, 318 bp, Salmonella enterica; identical to SEQ ID NO: 290262

SEQ ID NO: 399589 - DNA, 366 bp, Salmonella enterica
atgcctgcaaaaaagaaagcattttatagcagtgaggacatcggaaaattcaaaagcattctcgacgacttgcctgatgtgacgtcagaaaggcttgagaaaaagcacgtactcgacgagcttaagtctgacattaagaagctaaaagattcgaaaggatatgaagataaagagatactgaaattcctcaacgatgcgggtttttcagacgttacattacgtgatatcaaggacattactgccggacgagttggaaaaaaaagaaccagcaacagccgaaaaaaaatcactggagttgacgaagagcagcgcacacaaaatagctctaccgctcagaatcctgacgcttcaggtccgcagtattaa

SEQ ID NO: 399590 - DNA, 141 bp, Salmonella enterica; identical to SEQ ID NO: 83575

SEQ ID NO: 399591 - DNA, 537 bp, Salmonella enterica
atggcgaccttatacccttatgaggtttatacccttattgtgtcagaattaatcgtaagccattttaatgatgtcgctatggtatatccgggaagcgatgaaattaaaaagaactacgacagtgaattaagtgctgtacaggttgttaatggcatcagagaaaaactgattaaagatggtgttatacagtgcgaacagtgcccactgctatccgagtgggatgagaacaaggttatcaaccagctaattaaagattaccgcctgattctcaatcgtgactatgaactaaaccgtgttcgtcagcagctggccccggagctgatcgcacagatagaaaactggaaagagcagaagtattccgattctgcgaaggaatacgaggtgctctatgaaaccatcaacatcaacggaaaggaggttacaggcaaactaaacgtagttgcagtaagtcgctttgatgctgttttcatcgtagggcagcgtcacgctaacgataactttttggttctggatgtgaaggaggtgatgaatcattga

SEQ ID NO: 399592 - DNA, 312 bp, Salmonella enterica
atgaatatcagtgaacaatatcgggtggctgtcgtcagtaccggccatgtaaaaaaagaagacgcggagctactggataaggtctgtaacgatgacttgtccggtcaaggtttgttctggatcgagaaaaatcgctatgggtggatattgcgtatttctgctactgaacaatggcgtgtggaattagccagggcggggatcagtgcaagtgctttggataatatagccgcgttaaatggtgccgggttcgactggatttggtttgaccgggatgcagaacaggtgccagaactgaccgtttgggagtggtaa

SEQ ID NO: 399593 - DNA, 435 bp, Salmonella enterica
atgtggaaacgtggcgaaaacaaagtgattctgatggggcgtgctggcaaagatgcagaagtgcgttacaccccaaacggaacggccattgcgagcctgacgctggctacagaaatcagctacagcgacaacgaagggaaggagcaaaaagaaacggaatggcatgatattgtcatttttggaaagaaggccgaagcagctgggaagtacttcaaaaagggtatgatgctgtattttgtcgggcgcattcgtaataacaaatggcaagggacagacggcaaaatgcgcagtaacaaggaaattgtgatcgataataacggcgaaatgcagatgctgccgggagctgggccacgtaacaccagtgctgaaggtctgggaggcactgaaaatcatgatgaaccgccgttcccggatatgaatgattacccgcagtga

SEQ ID NO: 399594 - DNA, 222 bp, Salmonella enterica; identical to SEQ ID NO: 21631

SEQ ID NO: 399595 - DNA, 285 bp, Salmonella enterica
atgttaacactaactgatattcgcgccagcaatacggtgctggttacggaatttggcggcgtgcgtgctgtgcatttctgtctgcatgaaaaattaagcggtagcgacaacgatctgtggtttccgcttgccaatggggccgacctgttcgaggcgctggaaagcattatgtgcatcaattttgccgctgctaacgttgtctcgctggagttcctgcggcagaacgggaagtgcaaagactaccggatcacctacaacaaggccaaattcaagccattatgttag

SEQ ID NO: 399596 - DNA, 441 bp, Salmonella enterica
atgtctactgaactgaatcaacccgccatcactgcacgcattatccccaataaccgccgcatggcctttctgccacgcctgttcggcgcctggtatctcacaggtgaggccggtgtctacaaccacgcacgttctctctgcgccgattatcaaggcggttcctgggagttcgtcgaactgtcttgcggtagcggcttcatgtacccactgagcgcagagcgcttcacggtatcggttagcggtaactggttcgaaggggaactgtccgcagaagctaccggtatcgtgctgaccctgttcaccctgaaccacatgatctggcacgcacatgatgccggctatgagcatatttgcgacatgctgatcacccagcaggaaaagctcaaattatatgccgaccagcacgccgaagccggtttgatttaccgcgcgattgactga

SEQ ID NO: 399597 - DNA, 306 bp, Salmonella enterica; identical to SEQ ID NO: 119398

SEQ ID NO: 399598 - DNA, 411 bp, Salmonella enterica
atgcacggtaacgtaaatgaaatttgcgcaaggcttctcgatagttttgaaccacagcagcggatcagccttctgatctggactgctgaagatgtccatgactgcaccagtgatatgaacctcactgacgatgaggccgaagccgttctggcagaaatcgcggaatgcagttcacacagccgttatggcgtcggaaaagataccgtctggagcttggcaaagcaggtgcgcgaagatgccgcccgcgatcgaaagatagaggtcaatgccgaggcgctgcaaaaagtcgtggcgctggcggcgcagtttatccggctggaagaaatccagtctggtgaaggagctgcacgccgactttatccgcaggagtctgaggcgctggagtgcatcacgaaggtgattaacggctaa

SEQ ID NO: 399599 - DNA, 237 bp, Salmonella enterica
gtgacaacgctgcatattcgagaaattcccactgatggcgcgccgcctatctgtgcaggccgctcaatctcagatgatgacctttgcgcctcatgccagcatctcgactatcgccctgggcacctcagcgcctgcctgctgtcaggttgcgggcgtgacgactggccttcagaactggatgcaaacggctacagcgttgcctgtagcagctatgagcgtgaaaaatcgcttgattga

SEQ ID NO: 399600 - DNA, 231 bp, Salmonella enterica; identical to SEQ ID NO: 83565

SEQ ID NO: 399601 - DNA, 339 bp, Salmonella enterica
atggctattcaatcccttcagttccgtaacggctccgtttctcttggtgatgtttttgtttccagctggggttatgagcagacaaatacctgtttctatcaggtgatcgccctgcgcggtaagaaaaccgccgtactgcgccgcatcgctgcgcagcaggtgaaagcagacagtgcgatgtctggcgagttaaagccggttttgaacgagtttaaaggcgaacccgtgacccgtcgcattcgtgaaaaccacgagcatccgtctgtcagcattgacgagtacgaacaggcttataagaccgatcctaacgaaagccatttttacagcacctggggctga

SEQ ID NO: 399602 - DNA, 861 bp, Salmonella enterica
atgtcatctgaaaaaactctcccgtcggtcgatctgatgtcctgccagcatggcggtgaagtgatcccgtccattgctattgagcgcattatctcgttgcggaatgaaggtattcgcgtctatctcgacggcatagacaagctgcgaaaagcgcgcgatctgatgcagcaggccggaggctgtcagtacctgtatgactacgacaaagccgtagagagcgcgatcaaatggagcgacaccagaccagaccaggccgaaacggctatttcccgcgttatcgacggaaaaatctgggatcggctgatgtcggaaaccggcatgtatacgctgatgagcaacaaacaacgtcaggaatgggatcggcaggtggcaggcgaagaaatgccgccgataacgctggagaacgttatgagcacgttccggcacctgaacgcaagcaaggccgataccttcacgcaagggctgattgatatctttaaatccctgtcgtgggattataaaaccaataacccctgcatgtttggcaagcgtatcatcatcgcgccgttgctcgatgtctggcgcagtggctgggtgcgcttcagctcagacgggcacaccaaaattgacgatctggcgcggccgttctacgtgctggacgggcgtaacgtgcctgattaccgtgtttctgacggtgccaaactggatgcctttttcagtgaaaaccagttcaacggtaaggtgttcgagtgtgattacttcagcgtgcgatattacaaaaagggcagcgcgcacattacgtttaaacgcccggagctggttgagaagatcaataatctggttgccagtcactatcccggaatgttaccccctcgcgtgtaa

SEQ ID NO: 399603 - DNA, 180 bp, Salmonella enterica
atgagtaaagcactgaccccctcccagcttaaagctgaactggacacgcagaaagatgcgctgctgaaggcgtgcctgtatgccctcaacgaaatccctaaccgtcgtttaagtggcccgtatgcgtccacgtatgcgctggccgagcaggtcagtaaactgcttcagcgctgcaaataa

SEQ ID NO: 399604 - DNA, 1284 bp, Salmonella enterica
atgaatactgataactattttttcagagtcccggccacacgcggaatacagggcggcatagaacaatacatgctgacggttcctatggtcgtgttacgtcgtattctcgcaatggacaatgatggcgatgttatggatcgcagccagcgagaagcgaacaaaacgcgggccaaaaaaatacggaattatgttgccggcgcaacatcaaaacgagctccctatattttgccgtcaattaccggaaatattgatagtcatgttgaattccttcccagcgaactctcgccggcagtcggtattcttaaaattccgatggacgctgatttaaaattattcgatggccagcaccgtgcgctgggtatttttgaatttgtacgcgattattccaacacggaagatacgatcagcttattgcttaccgttggcctggcacttgagttacgccagcagtttttcgctgatattaataacaacgcgagcaaaccggcagcggcgatcagtatggcatataacaacaatgatccggtcaaccagctggcaatgcatctggcccgaaccgtcaccgggctggcgggcacagtggattttgaacacaacgtggtcccggcaaaaagctcacggcttatcagctttaaagcgctgaacgatgcgacgaaaaaaatgctcaacctgcgggccaacagcattccctcgccgcaacagcgtgatatggcagaaagactctggactgcctgggcgcaggcgatgcgctggaatgatattgcccaggatgatatcgccgcggagtaccgtcaggaggcgctgggactgcatggcatcatgattaatgcgatcggtatggcaacggccaggatgttacggcacagaacccctgaaagcatcgagaacctactggcctgtgctgaaaacggtgacaacggttttcattaccgggagtcgtttgtacctgagtgctgggaagggaagtgtgttgatccggagacaggcaccatcaaaaccgacaggcgggcgctcgaagcaacggctgaagcgttgcaaaagctgatagatccgttcgcagatgcgctgtggttgcgtgattacctgccagctgaggaggcgagtgatatggcattactgaaatatgcagccgacatcgagaattataagcagcgtactgccgcgccgatgatcaatatcgtggagaagctgaaggcgctgggtgacggcgaaccgcagttcagagcgtcggtgctggcttcccgtgaggggctaagccgctacctggccggagctgaaggctga

SEQ ID NO: 399605 - DNA, 267 bp, Salmonella enterica
atgggcaataaatataccgtgccgcttaacgtgggcgcgatccgcgaaagttgtttccgtcccgctgataaatggaccccgccgacgggggatgaactccgctatctgctggaaaatgtgctcaacctcagtcaggaggggctggcgcgacatgttggcgtgaacggcagaacggtgcgccgctgggtgaacggagaaagtgacatcgcgtattccgtctggtgtgtcctatgcatcgatgccggcttaccgccgatctggaaatag

SEQ ID NO: 399606 - DNA, 450 bp, Salmonella enterica
atgaaattttcagcagaagaactcaacattatccgccaggcggacgccattattgccggtaaaattaccacaacggattttatcaccggcgccgacgccgcgcgttccttactgcggtttcgtcttgctgcagaacaacgcgaatcattctgcgcgttctttcttaactgccacaacggcgtgattgcgtttgaagaactgtttaagggaactatcagcagcgtcaccgttcatccgcgtatcgtcctgcaacgcgccctgcatcataatgccgccgccgtggtactggcgcataaccatccttccgctaacactgcacccagccaggctgacaagctgatcaccgagcgtctggcgcaggtgctggggatggttgatgtcaaagtcctcgatcacctgattgtgggcggcagcgatatttactcttttgctgaacatggtctgatttga

SEQ ID NO: 399607 - DNA, 363 bp, Salmonella enterica
atgaccatgcaatcagaacttgtttttactgatcctatgctcaacgtcgttattgctgaagttaagcgttttaattgcccgcttctttttgtcaaagatcatggcgtgtatgtgatggcggcgaaaggtgagaaaaacagtaatgggatgcacaatgtctgttacgccaatggtttcaatccggatacaacggattttgacgagctctgggaccggatgcgtgatgcctgtggcggagatgatttttgcgaatccctggacctcgatccgaggtcgattgaacttctcagccgtaccaaaccctgcctgaaaattatgctttcagagacggaactggaagttattgcagggggacagaaataa

SEQ ID NO: 399608 - DNA, 264 bp, Salmonella enterica
atgactgctctcaattctcagcaacaggctgatgttgcccgctatatccgggaacatggcaataaaaccgttatttcccctgaatggtcacttatttatttctcgctgtgtcagtgtgaattacatcaatcgcatgaagccattatttttcataatggccgacctgcagggctatttcttctgaatgaaacaggcgagctcaccgaattatacctgctggggtcgctttctgacattctcgccgccgctgcggtcaacaaatag

SEQ ID NO: 399609 - DNA, 411 bp, Salmonella enterica
atgatcaccacacaccgaatgttaatgctgtatgcctgccttgtgcccgtagccctgacagggtgtgatctggctgattatttcccgaatgtgccacagcccgtgcccgtgatttcgcccggctatcaggttgatatcgatggccatccggtccgaatatcaggatttgatgactgcccgcgggataaagatgaagcccggcacgcagctgcacaagatgagaaaggctgcattgtgctgtctgcagagcgttccgaggtgaaggtcagactgtatcagccagccggcgctgtcaccgaaacctggcggatcatccgggaaaaagacgctcgccagaacgatattattcgcctgcagcgcccgaacggtgcgcttgtgatgcaaaatttacaggggaaagagtctccttaa

SEQ ID NO: 399610 - DNA, 480 bp, Salmonella enterica
atgattaagatggttagcgtcgttccgcagccggaaacagtgaagacgctccgggaaaaaatgggcatgactgaaaccgcattaggggccgtcatggggtacgaactgcgcgcctggcagcgtaaggaagctatcagcgacgatctcagccagtacaacaagaccagtcttcgcccaggcgaatataacatgctgatgctgatcgccggcgtgcatcctgattaccgcctgaacagggcattcagtccggatgatatggtcaaagatcccgccacggccgaagacgttcgccgcctgcgtctggcgctggggctgaagcacgctgaaattgcagcgctgtttggctataaaccggcgtcatggcagaccaaagaaaaggctgctcagcgcggcgtaaagctcaagaccggggaattcaatttcctgttactgctggccggtgagcatccttcactgcagctggttgagaaggtgaaataa

SEQ ID NO: 399611 - DNA, 507 bp, Salmonella enterica
atgcaatcattccccctgttcgtttcccgtgtcgttcctgtgatcaccctgagccattgtctgcggcagcggcgctggtccctgcacaacacgtcatgcccgattgacctgagatcaggttgtcacctgcgctcacagcctttcggcacgctatccagacgggaaataagcgaccggccaccggctatgccccgcggttactggttcaggcaatgcagccgggatgtcatgtttacggggcgcatcgatcaggcagatcctatgaaacaggtctattacaacgaaggctggagcggtccgaacaagtatacgtttgaagtttatcagctggagaacgggagttaccgggcgctggcccgcaaatggaatggcaaaatcaacaaggtgcagcaggaaacgcagtacctgtctgacacgcgggaggggctgaagcaccaggactatccccgcacacgccaggtgaaaatttttctgaattcagacttctgggagaagggtaatgattaa

SEQ ID NO: 399612 - DNA, 564 bp, Salmonella enterica; identical to SEQ ID NO: 95969

SEQ ID NO: 399613 - DNA, 444 bp, Salmonella enterica
atgactgataaccgtaagtgctcgttttatatctacccggagcgcaatgcggcggaccgggtagcagacggctttcttgagaaactgcctcagaaagagcgtggccgcgcgatgcgcgccatgatgctctgtggtgccgcgttgatgaaacaggacgaacgcctgccgttcctgatcgctgaatttctgacggagagcacctcgatgcaggatattcagcggatcatcagcagtacgctgccgcagcaggatacaggagagatggcacgcctggttgaggcgtttctgcaggccaccggcggtggcagcaatacggtgtcgccggcaggcggcgctgcgccggaaaacagtcccgccgtgactcccgaaccggccgcaccggaggataggaatctggaagaaacccgtaagaacgtccagcatctgttcccggatgatgattaa

SEQ ID NO: 399614 - DNA, 975 bp, Salmonella enterica
atgcgtatttttgttgatgacggttccaccaacatcaaactggcctggatggaagaaggcgcagtgaaaacgttgatcagtccgaacagcttcaagcccgaatggtccatgacattgctgacagattcatcggtgccggcttccgccaactatgaaattgacggggaaaagtacagctttgaccagctgagcccggatgccgtgcgcaccacggaaacccgctatcagtacagtgatgtgaatgtcgtcgctatccaccatgccctgatgcagtccggcattgaaccgcagccggttgatgttgtggtgacgctgccgctgggcgagtacctggatgaaaacgatcagcctgatttggccaacatcgagcggaaaaaagcgaacgtgaagcgtgcggtggccgttcaggggcgtgagagctttaccgtgcgtaaagtcagcgtactgccagagtcggtccctgcaggcttcagtgtgctgaaggatctggacgatctggactccctgctgattgtggatatcggtggaaccacgctggatatcgcgcacgttcgcagcaaaatgtccggcttcaccaagacgcattgcgatcctaaaactggcgtatccatcatcaccgaagccgtaaaacatgcactggataccagcgtgagcacccgtaccagttcgtattttgccgaccgtctgatccaggcgcgaaatgacgaaacgtttctttcccgttacctccagaatgctgaccagcgggcccaggtgatgaaggtactgcatgagcgggaaaaagccctgacgcaccgtgtcaccgattcagttggccgctttgccggcttcacgcacgtcatggtggtcggtggcggtgccagcctggtcgccggcgcagtgaagcaggcaacgggggtgagtgacgatcgtttcttcgtcagtgataacccgcagttcgatctggttctgggtatggtggcaatgaagggctga

SEQ ID NO: 399615 - DNA, 741 bp, Salmonella enterica; identical to SEQ ID NO: 95966

SEQ ID NO: 399616 - DNA, 249 bp, Salmonella enterica; identical to SEQ ID NO: 95965

SEQ ID NO: 399617 - DNA, 486 bp, Salmonella enterica; identical to SEQ ID NO: 95964

SEQ ID NO: 399618 - DNA, 588 bp, Salmonella enterica; identical to SEQ ID NO: 95963

SEQ ID NO: 399619 - DNA, 249 bp, Salmonella enterica; identical to SEQ ID NO: 95962

SEQ ID NO: 399620 - DNA, 462 bp, Salmonella enterica; identical to SEQ ID NO: 95961

SEQ ID NO: 399621 - DNA, 546 bp, Salmonella enterica; identical to SEQ ID NO: 95960

SEQ ID NO: 399622 - DNA, 585 bp, Salmonella enterica
atggccaccaagcatattaatgacgagctctggcatcgtattgaagttctgaccgtccgggcaaatgccaggcaaaacctgatccgcccggtcaaagaagcggacgtgcttcatctggttctgcagcgtggcctggagctgcttacagacgacgatctgctgcagctgggcaagtaccgccggcccataggatttgtgctgcgtcggccgggcatggagatgctgaagctggacacactgagtatggctgacgctgctactatcctcatgcgcagcggaccggcaacgctgtgcatctggagtcgtgacgatatcctgcggcaggccagtgaagcggtgatccgcgaacggctaccggaaacggccctgctgtcggagggggatgaccgggcccggttccagacgctgctgcctggcgtctggaatgccgcgaaccggggagaaatggccgtgatttccctgcgtgctgacaatgcggatctcgctattgcacgcatcactgacctgatgtgcgaatccctgctgggttataaggggcagcgggcataccgggcaggtgaaaacgaacagggagaagagtcatga

SEQ ID NO: 399623 - DNA, 216 bp, Salmonella enterica
atgatgcgtcagggggtgatttctgccgttatatatttactgctggcaatgctggtcatgatctacatgccggagggttactccgcgattagctgggccataggcgcggttgtggttgtgacgctgatttatattcgtgcccgtaaaggtgtcaacgccacgatttttaaccgttatttgccattttcatgcccgctaagatactttcgttactga

SEQ ID NO: 399624 - DNA, 345 bp, Salmonella enterica; identical to SEQ ID NO: 95957

SEQ ID NO: 399625 - DNA, 1275 bp, Salmonella enterica
atgaccggtttgtttgaacgtaaaaagcgggccaaaaacgcccagctgaccgtgcgtctcgatgagcagctgaagaaacgcgccgaactgcgtctggaagcaatggggatgaccgccacggaagcggtggagcaactttaccgcttcatcgccgatcacggccggatgcccgtcacggagcgtatcgtcacatttgacatccagtcacagcgcggccacgccatcgccctcaatcccgccgacgctgtgaccgaaaacacccggcggtttctgcagtcgctgggagctgtggaagtggtctgctgcgatcccgctgcatttgaacaggcggtgctggaatacttcagcctgtatgtggccgaccaggctgcctgtttactggccggtgtactgaacgtcacgttcatggttaatgccgccagtcgcgtgaaagatgactggcatgacaggctgctgtccctgttacagcacgactttgatttcagcgaagaacagtcagtgacgttcattaacagcatcgtggacagcgaacatgtcgatccggccatcgtcagtcgaaataatacggtctggcggagcggaaaaagcaccgggtccgacgccggcgctgaacaggccttactggataacaccaacgtcagggtcttctatccctccggagaagcgcccgtctccggcgagatcggcgccgccgtcctgcagcgtttcctgacgttcctggcggagcggggcgtcagctgcagcgatccgcagagactgaccgaaagcgccggccgtgcatggggcgtgcgtgaaaatatgatcgggaatatgcccccggacatgcagcaggccataaacgatggcgtcatttttgaggccagcgctgacacgccggacttttcccctgagctggcggcggcgtttggcttcacacaggcccaggcagaagcggtgctgaaacccgccctgaccgccagggatctccccggtttcctgcagcgctttctggcgttcctggccgaccggggtatcagctgcagcaatccccggcggtttactgaaaaggtcacggaatacgccagccatgagggaccgcaccggcttattgcaatgttgatgtcgcgcatcagggatgagggggtcagttttgtctttcacaatgaatccccggacgaactgccgcgcctggccgcgtcactgcccggcgaactggccgatatcttcgggtttacgggatggcaggcaacaacaatactgcgtcaaatccagccggcacggccggggcaggattag

SEQ ID NO: 399626 - DNA, 273 bp, Salmonella enterica
atgaaaacgacctgtcatgcggccggcatcacggcggcgccgctttccccgcaggagtggcgggcgctgctcagggcgaaaggctggaagcagaaggagctggcccgccgctggaatgtgtcagaaacctggatcagtaagctggccaataaccccgatcggggcacgcactggaacgatgcctgccggggtctgcccgatattcgtgcccggcggcccggcgaaccgcgcgcggcaggcactgacgcaccagagccgggaggcactgaatga

SEQ ID NO: 399627 - DNA, 321 bp, Salmonella enterica; identical to SEQ ID NO: 290278

SEQ ID NO: 399628 - DNA, 849 bp, Salmonella enterica; identical to SEQ ID NO: 290279

SEQ ID NO: 399629 - DNA, 1305 bp, Salmonella enterica
atggggtgtggttacgttcactgtcatgagacaccgcccgtgtacgccttaatcgatgtcaattcgatgtactgcagctgcgaagaagcgttccgccctgatttacgaggtcgccctgtggtcgttctcagcaacaacgacggggcgcttgttgcggtcaatcgcgcggcgaaagcgctgggcgtgcgccgcggggagccctatttccgctgccgccgcctgctggaacagcataacgttgccgtattcagttccaactacaccctttacgcctcattctccgccagatttgcaaccgtggtggagagtctggcgccgcggacatttgtttactcaattgatgagctctttgcggatgcctctcatatggagggagtgatgacgccgcaggcgtttggccagcttttgcgggctgaagtgctgcgccagacaacgctcacctgtggagtcggcgtcgcgccaacgaagacgctggccaagctgtgcaaccacgccgcaaagacgtggcctgccaccggcggggttgtagcgctcagtgatcctgcgcgactgaaaaagctgatgagcctggtggcggccggcgatgtgtggggcgttggccatcgtaccgaaaaagggctggcggcaatggggatcaaaacggcgctggcgctcgcagagatggatatccgtcttgcacgccggctgtacggtgtgacgctggaacggaccattcgtgagctgcgtggcgaggcctgctttgccctggaggaaggaaccggcgcgaaacagcagcttgttgtatcccgttcgtttggagcgcgggtcacgcaactggcgcagatgcagcaggcggtgactaaatatgccacacgagcaggggaaaagttgcgccaggaaaaccgcctggcgaaggtggtaacggtctttatccgcagcagtgcttatgacgccggcggtgtgccctacagtaaccaggctacggaagtgcttcccgtaccaagccaggatacacgcgacatcatcgccgcggcgcagctggggctgtcgcgtatctggcgtgagggcgtgcggtatgcaaaagccggcgtgatgctcagcgatctgcagggatatgaaacccagctggatctgtttgcgccggctgcagtgcggccggggagcgaaaaactgatggccaccatcgacaaaataaacagggaaggaaggtcaagggtcttcttcgccggagaaggtattgatccggaatatgccatgcgccgtgaaatgttgtccccggcctacaccacgcagtggaaggatattcccgcggcgtttatgcgataa

SEQ ID NO: 399630 - DNA, 435 bp, Salmonella enterica
atggcgctggatctcgtttatccccggccttcagtggaaggcgacgcactccctttttttgccgaacccgttgcggccggctttcccagcccggcagcaggctatgaggccaatgaacttaacctgcatgattactgtgtgcggcacccggccgcgacgtacttcttgcgtgtgtccggcgattccatgcgtgatgcgcgcattcatgatggcgatgtgctggtcgtcgatcgggcagaagaaccccggcacggcagcatcgtgattgccagcatcgataatgaatttacggtcaagcagctgcagctccgcccttacccctgcctgatgcctctgaatccggcttttccgccaatcaggtttgatccggaggcgctgcagatatggggtgtggttacgttcactgtcatgagacaccgcccgtgtacgccttaa

SEQ ID NO: 399631 - DNA, 351 bp, Salmonella enterica; identical to SEQ ID NO: 21590

SEQ ID NO: 399632 - DNA, 396 bp, Salmonella enterica; identical to SEQ ID NO: 21589

SEQ ID NO: 399633 - DNA, 1308 bp, Salmonella enterica
atgcaaaaccagccacaacggaaagggggaggggatgatggcctgatgattatcggggcccttctcatcatgatcacagtgatgtggtttggctttcgtgattatgtgatttacggagcctgtcgcctgctttactggatctacggtgtactgccggacgccattacaccgggtaatgcggccgagcgccgggacatgctgctgtcggcggcgcggtataaccaccaggtttcgctgtgggactttatcagcgtgatgaacgacacggccagcgtgctctttcccctgttcattttaatcatcgggctgttcgtctgggttatctcacgcaatccttactaccgtctgacccgtaaactgaccatccggaacctgccctgggtgatggtaaaaaactatccggggatcgcccatatcctcgcccggtttggccacctcgatcagctgctgctgaatgaagatccggaagaagcacgcagcgcgcagtcacctgttgagtttgcccaggaacataacctgattgataccgctaaacgccgcctccgtaaaaaagccgcacataaggtcttcctgtcacaggtaaacctggctcccgaaggggcggccctttccctggcgccctgggaaaaagcactcgctgcctcgtttgtacatctgcggtttatgggcgaccggccaacggctaaatccattctcgacgatctcaaccgttcctgcctgcggaccaaagacggcttccctgattattcgctggccgccgggctctggaccgtcgccagccagtgcgaagcgttcagagaatttgcaaaggggcgccgcagctcccgttcgctactctacgcgctgttcgatgatgacctgcagctgccatccgcaaatttccggtggctgaaaggcgtggaccgcacgttatggtatgcactttcaagcgccggccgcgggaagttcttcattgagggcggtggcgttattgcctggagtcagtgcgaaagttaccggctgacgctcgatgaagaaaaggcggcgaaatttccgccgaccgtgcgggcggccgtgctgggccttgagctggatctgctccattaccgccatattgaccgccgcgatcccgccattccggtcgctcactggcaggaagatgttataccgccatttgcatttgaatctgacgctgaagcggaagacgagccggctacgccgcctgcagctccgcacgacaccccgaacaacagtctgcgactgacagacgatgaaccgacgccggctaaacctcagccggcaacccgtcccgatcacctggaactctaa

SEQ ID NO: 399634 - DNA, 951 bp, Salmonella enterica
atgaaactcaccgtaaaaaccgatcgcaacacactttatctttccgctgacggaaactaccaggaacaagccctgcactccttccccctgtcagcctgtcattttggacttggccatgatgccggcagcggccacatcctgacgcacaatacgttttctggtgaagcggtgcagctgttccgctttgaaaacgaatatcaggccatcgaggcgctgaacaatatccgtaaaaagctgaaacagcagcgcggactcaatgccgtgcgccggctgtctaactttatcttctggccagttgccgcgctgggctttatcgtctccatcaacggcgcgttgatgaatatgcatcagccggcacagccactgcaggcaaactcgtatgctcccgcgccgggtctgcagcagccggccactgcgccggagcagctgcaggttcaggcagcacctgaagcccctaaaaaactgactgataacgacttgctgtcactgaaagatgccgtcaccagcggacgctttacgatctcgctttcaaccgggcataaacacaccctgtatgtgttttccgatccgatgtgcccgcactgccgcgcgctggaaccccgactgcaggaactgagcaaacgctataacgtcgagattttccccgtgtccgtttatggcgacctgcgctcgatggtccgcgccgctcctgtacttgataccgggaaagatacccgactgaaaagctgggaagacacgattaacatgggatacaccaccatgaacccgaaaattgacgatccgaaaacagccccggataccaccggcgcccgcctggttgacgcgaacaatatggcatttgcgaaattcgggtttatcggcaccccgtccatcgttgccgattcgggtgatgtgatcccggtttccgtcgtcaaagacgatgcccgcctgcagcaggcgataggagaataa

SEQ ID NO: 399635 - DNA, 2088 bp, Salmonella enterica
atgcaacaggaatctgtagacagtaaaaaagtcatccgcccggatggttcgttcatggagtggttcctcactccgaacgtacagtttggcctgctggccatactgaccgtgctgggtctgtttctcccctttaccatgctgctgagcatcctcatcctaccgccgctgatggtggcattcacggatcgtaaattccggccaccgctgcgaatgccgaaagactgcgaaatgttcgacgacaccctgaccacggaaacccaggcggaataccgtctggggcccattcgcatcccgcataaggtccgggagcgaaagaaagcgaagggaattttatatgtcgggtatgagcggggacgcctgttcggccgcgagctgtggctgaacatgacggacctgctgcgccacatggtattttttggtaccaccgggtcgggtaaaaccgaaaccttctatgggtttatcgttaacttcctgctgtggtgccgtggctactgcctctcagacggtaaagccgataacaagctggccttcgccacctggtcgctggcgcgccgtttcggccgtgaggatgattattacgtcctcaacctgctgaccggcagtattgacaggttcgtgaacctggtgaagcaggaaagcgtccccgcgcaatccaactcagtcaacctcttcagcgttgccccgccgaccttcatcatccagttgatggaatccatgctcccccaggtgggcggggattcggcacagtggcaggatacggcaaaagccatgatgtcggcgctgatcaatgccctgtgttataagcgcgcccgcggcgaactgcttttgtcacagcgcactattcagaaaaacatgtcgctgccggcaatggccgcgctgtacgttgaggcaaagaaaaacggctggcacagcgagggttacgccgcgctggaaagttatctggaaaatacaccaggcttcctgctggccaacgcggaatacccggaaacgtgggaagcccgcgccttcgaacagcataactacatgagccgtcagttcctgaagacgctctccctgttcaatgaaacttatggccatgtttttccggaagacagcggcgatatccggatggacgatattttccacaatgaccgcattctcatcgtcatgatcccgtcgctggagctgtcacgcggtgaagcggccacgcttggccgtttatatgtgacgctgcagcgaatgaccatcagtaaggacctgggctaccagctggaagggaaaaaagaggaagtcctgctcactcacgcgctgaataatcaggcgccatacgggcttatttatgacgagctgggccagtatttcaccagcggtatggatacgctgagtgcgcagatgcgttcactggaaaaaatgggcgtattttcctcccaggatcacccgtcactcgcccgcggcgcgaacggcgaggtggattcgctgatcgccaacacccgcgtgaaatattttgagtcgattgaagaccggaaaacctttgaaatactgcgcgaaaccgtcggccaggactattattcagagctctccgggcaggaagcggaacacggcacgttttccaaaacggtccgggaaggggatctgtaccaaatccgtgaaaaggaccgcgtgaacattcgtgagctgcgtaagcagaccgaaggtcagggggtaatttctttccaggatgccctggtacgcagcgccgcgttttacattccggacaatgagaagttttccagcgagctgccgatgcggataaaccgctttatcgaggtattaccgccatcgccggcgacgctgtacagcatctatccggaacgcaaggatgatgaactggcggaaacgaacccggatgcaatgcacttcccgccaatcaagctgttcgggtacgacaaagcggccaacagcctgctggaaaaaattgaggtcttctacgagctgcagtgtggcgcaatttcaccggaggaaatgtcggtgtgcctgtttgaactgttcgctgaatggcttgatggaacggaaacggacgacgtgctttaccaccaggaagacgatctgttcccgatgatcgaaatgtaa

SEQ ID NO: 399636 - DNA, 1056 bp, Salmonella enterica
gtgaatcaaaagaatccatacctacagctttctgacattgagtcagtagaaggtctttcgccggagttcatctcctggcttgaaagccagtcccctaaagaatcaccccagcagctgcttcttgatgaagccaccaaacccgtgcgcaaaacccgccgtcgtcgcggtacgcactcaacggcgtgtctctgcccggaacccagctggtaccgaccggacaatttcaaaaagctccctggccagcttggccatgcctacaaccgccttgttcgccgcgatcgtaaaaccggcgcgttaagtctgcggatgcggatcagccgccacccgtattttgtgcagctgcgcgagcaggccggccggaagcgggacttccgcccggagcgggagaatctgcttgatgccatcgtgccgcttatggtcagcacggttgaccgggcaactcatatagacactatcaacctcagcaaaatggcgtggcagctcagcgaaaaggacagtgaagggaacgtgatccggaaggtgacggttccgcgggtttgccggctgctgcagcacatgatggagtacgggttactggagctgcccgaaggcgtcacatgggacccgtttaaccgcaagtggttccccaagcatgtcgtgctgacggaacggctctggaagataattggcgttgatctcgataagctgtatgcggagcaggccgaacaggtggccgctgaagcggcaggctggataacccgcgatgagcatggtcaggcggaagaaatctctgtcaaagcggcgcgccggcgctggtatgagaatatgatgcacgccacactggttcgccggcgtgaagccgctcagaaggctaagcgcgagaagaagctgaaagcactggcagaaatgccctatgacgaccgggcttacgccatgtccgttcatctgatacggacgctgccgaaagacgaactgcacgcgctgtcgcctgatcagtttacccagcgagtacgcagccacctgtatcagctcgatctggggctggagagggaagcaggcccccctgcttatcactga

SEQ ID NO: 399637 - DNA, 249 bp, Salmonella enterica; identical to SEQ ID NO: 290280

SEQ ID NO: 399638 - DNA, 654 bp, Salmonella enterica
atgaatgcgttatcaaacactgactttaagaaaattagtaacaatgcgcgtcctaaaaggcttggatactacgcatcatggctctggatgatgtttgtattcctctttctgttcgtaagcgctttcgtgtttctgagcggcttatactggacgattagagacggttcaattcaggagcactggtttagtacagtcggtatctttgtgatcgatgcagtgctgatctggatgttgaaaaaggacttcaggagccgcaagctctaccaggtaactgcttcaatgaagaactctggtttcttcgagcctcataaggactgcgagcactatgacctggcccggagaacttacatcggctttgacttcagtactggaatcataggagtagcatccctgtatgccacatccagtattaaacgtgagcggctattttttgaagccgaaacagtcgagtcatgggagtcagtcggcagggagttaatcataaacctgcgaaatacggggcttacgacgataacgatcacagctccaaatatcaataaagcgtacagggatatggaaatcatctgcagaacgcataaaaatagggatgaaaactatcagcatctgaagagtaaactgacagacgctggatggttcataaacagcaattattga

SEQ ID NO: 399639 - DNA, 2181 bp, Salmonella enterica
atgagtaaattaaaaaggttgcttctatctcttttcgttgtggcgtcgccttcatattcagcggatttggggattgatggcataactgaagcggctaaacgttcaggtgacctatcgcgtcaaatgttacataccgtttttggtgaggtagttaataatccgtttagcccttccggcgatggcttgcttaataacgttttcttcactgtcaacgaagttatcgcgattcttgcccttgtctatatggggataatcagcattaagaaacttcaccaggcaggtcagttgggaagtttcattgagggtgatggcaataacgcattcaaaattgttaaaacgacttttgggtggttgttgcttgtacctaccgttgtcggttggtctgtggcgcagctgctttttctatggtgcggttcaatcattggcgtaggatctgccaatgttattgcagataaaacggcttcggaattagcgagtggtaaagctgtctatatagcccctgttatgccagaaatggcgtctgttgcaaaagggatgtttgaaacaaacctttgtgctttgggtgtaaatcaggggattgctcaaatggaggcttctggccaacattatgagaataacgccagaatgcaataccaaacaggtgacagcacatattctatatctgtaaacaacggctcagctgtatgtgggaccgtttcgctgccacaacgtccagcaggatggacttctatcttcgctagcggttatgcggattccgtctacagcgttcagcaacaagcaacggacacgttgtggggaaaaatgaagactgctgcagagcagtttaatgcagcatatatggcaaaaatgcgttccggggacggtgagctgccagatgttgaaagcgcgatccagactgctgcgcgtgattaccagcttcaggttcaacatgctgctaattcagcagccggtgacgacgaaattgttcaaaaaatggagtcggatatcaaagagaaagggtggctatatcttggtgtgtactatcacacattagctactgcgaataccgagatgaaagatgttgctaacctgaagccggtagtttcaggaatgagtaacgatggcgatatcggctctatcgattactttaaaggcttgttccaggcttaccattctcaactgaaaaatagtaattatacgccgcctcttggtaccgaatctaacgcacttgcaaggaacattgatcaaaaaagccttgaaaatgccgccacaactggagacggaacgtcccttattacaaaaattttcgacttcaacgttacaaactggcttgcaacgagtaactacggcactggtgatggttacagtgacgtgaccaaccctttactcaaaatgaaagctatcggcgattacacgttaggtgtagctgaggttggactcgccagttggaccgctatcaatgttgcagtgaaggtttcagaagggaagagtctacccggttttgctgcgggaatgatgaacaaacttacagggattcgagatgctattgctggcgtattagaatcggtttcgttcttggtttacccgctgttttatagcctctttggtatcggtcttgcactatctatctggctgccgtttataccgatgatttattggtttgttgctatggcagattggctggttacgcttatgacaggtgtattggcgtcttccctgtgggcagctacccatatcaacattggccagagcaatgatgagcggagtacatatggttatgtgttccttatcgatgtaatgattcggccgatgctcatggtaatggggtttatttttgcttctctggccatcgtagctttgggaacagcgttaaacatgatgtttaaattcgctatggaacaggtccagtctgactctttcactggcctgctgtcatcgatcggatttttgatgctatatgcaaggctttgcacaggtatggtggctcgcgtatttgcacttcctgcgaggatgccgaactatgttataaactggattggacagaagatgaacgattcagtgttgggtgatatgcagaaccatgttcatgacatctttgctgcgttcggtcgtggagccaaaaatatgaaccgtaacaaccctaagcaatttaatcctgacgcaggtgtagataagagcaaggacggcatcaaaggagcttaa

SEQ ID NO: 399640 - DNA, 651 bp, Salmonella enterica; identical to SEQ ID NO: 83596

SEQ ID NO: 399641 - DNA, 1209 bp, Salmonella enterica
atgataaaaatcggaaaagcaaaacggtcagtgatggccgtttcaattctggccttcagcgtacagtcagcatttgcctatacggtcaacgttaacagcagcattcccatctcaacgcaggttatgccggcgttgagcacagctaatggcctgttaggtaacatccaggccacgctgattaacattggtacggcaatcagccagcagggcgatcgccaggcagcattaatgcagcaggtggctgaaactaaccgacagttcgaagtcgagcaaaaacgtaatgaccggctgctgcaggcacaggataagtaccgtgttccggatgatatctgtgcgcagtctattggcggtggcgccgcgggggtatcctctgcggccgctggcggtcagcgaacgctgggaagcgccagttctgcgaaagatgttaaggctatttttgaagtgccggcacgcgcaaccgacgtggatgcatcttcaacggccgaagttcacagccagtactgcgacagttcggattatgctgcatttggcgggacttcattctgcccaagtgtatctgacatgccgcgggcagatacgtcgctgagctcgttgctttatggcgccggcaaagaaggcaaggcacctgatctgacgtttacagatgagcagacagatgcggcgctgcgctatatgaaaaataccgcgttgcgcagtgctggtcgtcagctgagtcgtggggaagttaaaggcgccagcgggcgaatttacctgggcatgattcagcaataccaggcgctcaccgacgcggccgcacaacctcagatggaaatgatcgccaactccaaaccgaacccggccactgatgccgcgcttgcagatgcgcgcaaagtgccggaagtcgaatcctatttccaggcgacggccagtaacagggcgaaacagcttaaccgtatgtctgccagagagtttgaggaattcgaagtaggtcgccgttacagcaaccctgcttaccaggcgacgttgaccaacaagaacaccgaagatttgatgcgtgagcaaatcaatatcgccaacctgaacaactggttagtgctgaaaaccaaacagcagctggagaaacaaaatgtgctgcttggccagatcctggcgaacgacgcatatcaaacatacaaaccgatgctggcagcacagctggagagtgtgaacgcgggagtatccagaaaatga

SEQ ID NO: 399642 - DNA, 3051 bp, Salmonella enterica
atgatttctttctttgaggatgtgatcgaaggtatctcacgcaatctgacatcaaatgactcgttaaaatactgtgatttgacaacggttgtagggcttacgtcgcaggatcgcgttgagcatcctgaaatcagggctccgtacattctgaccactaagaacaacgattttcttaccgtgattgaggttcagggcgctaaatcatcgtttgacgagaagtcgtttaatgacttcatcatgcacctatcaaactccttgtcgaattcctttattaacagcggccataagttgtctgtggtgttcgaacgcgactttaccaagaaccaggaagagctgaataatgtttataaaccgcaggtagcagcaatagagcgtctgcagatagacattaaagacctgatcgccgatgacgcaaaaaaaatcgccgcacattacagccgtgaacgcgcttacatcgtgctgtatacctcgaaggggatgattgcgaaggatgaacttaaaaacgaacaggcaaaagctgccggcgtactgaaggatatcccgcagacgcgcttcagtcagaacccaatcgaatttcagcttgaaggtttgaagatcacgcatgacgcgatgctgtggcgcctgattggtatgcttcagggggatgatgaatcgggaatggggcttctggttgatgtcctcgatgtcaaacacgctggcgcaatgatgcgtcagatgctgttccggaattcaacatcagaaaactggtaccctcgcacgccgtttgaccaaaatctgcgaatttatggcgccccacggaaagacaatatcgactccgtgctgccgccgcggctgaatatccagatcatggaaggggaactggaagaagatggtggcctgatttactgtgatggtaagtattacggttctgttgcccttgagttaccaccacttcaccctgtcaaatttaagcagttattcaacgcgattaaccggaaaatcccgtaccggataaaatatgactttataggcgggggcaaaaaagcactgttctggccatcagtaatcatatctttccttcgtttcattccctcactcggtaatatcgcgcgtgatatggattatgtccgggcccagagcgaaaccgatccaacggctatcatggccatcaactttgccacctggggcgacactaaggatgaagccaaacgcaacctggcggctttaactaaggcgattgaaggctggggtgtatcaggtgtgtccaagacatatggcaatccaggtagcgcactgattgcatccgttccggggctgacgacggccacacctggctcattgcattatccgccgttgagtgaaggcttgcggatgttaccttttgaacgtccggccagtccctggcatggtaaaggcaatatcaacttcatcacgctcgatggcaagctgttcccctatcaaatcgccagtcccctgcaggagaaatttaccgatgtcatcaccggtgttccaggttccggtaaaagcgtgctggccaaccgccttaacctgagttcgatttaccgggctgataaaaaactgccttatctgaccatcattgataagggctacagtgcaaaaggtatcgccgatctgattagcgctgagctgccggcagagaaacgtcaccagattgccagtatcaccctgaacaatgacgaatcgcactgtattaacatctgcgatacgcagttaggttcaaggtatctgacgcagtttgaggaagtattcttaaagcagatgcttaacgcattctgtattgatccggcaattggccagccgccagatgcaatgagcgttgggcaaatcgtcagtaaagttgtatcaaacgtatacaaagcaaaagcgcattcaagtgctaacttgtttaagtataacgacccggtgattaatgaagctctgaaagaatcaggtctggataaagagctcggtgaagactggtttgaaagagctacatggtgggaagtcgttgataagctgtttgccaaaaaatatcttcatgctgcgacggttgctcagcgttatgctgtgccaaccattcacgattttattgctgaactacaaactgaatcatttaaaaaccaatacgctgacgtaaaagttaatgggagtgagcctgtagtaggcttcgttgcacgttgtttccaggctgctgcagctgagtatgccattttctcagggatcacggtttacgatttcagcccggagactcgcattgcgatcctggatatgcaaaacgtcctcggtgacagaacgacacctgcaggtaagctcaagtccggcattatgtatctttttgcgcgccagatggctgtgcgtaactactacctgcctcagtccgcagaaaccttcattcctgctttaccggagcagtacagggcatatcaccaggcgcgcatcagggagctttcagaagaggttaaacataccttttatgatgagtgtcataactttgccggcatcgactttattcaaaatgcgctgaacaccgctgaccttgaagatcgtaaattcaacgtccgtactgccttctcgtctcagtatctgagccatatgccttcgagtgtgcttaaaaccatgaacagcctgtttatgatgcgcctgacggaaggggatgaagagtatctgaagcaattagagatcaacatcccggccgatatcctgcgtcgtttcagacagcttccgcaaggggtttatccggacggaagtggtactgcattcctcggtatttttaaaacaaaacgtggtcttatttgccacattctgaaaaacacattaggaccaaaactgctttgggctttgaactcatctgcaaaagacagagcgctcagagatgtgctttatgaagagctgggaacgaaaaaagcaagggaagaattagcaaatagattccctatgggaagtgcatcaagtatcattgatgaaatggtggtcaatcagggtggtgagcgtgattctgaagaagaatcacaaactatggcgatgaagctcgctaaagaaatcatttctgatgtgagaaggggattcagatga

SEQ ID NO: 399643 - DNA, 495 bp, Salmonella enterica
atgaaagattttaagctcaccaggaatgaacaacctgccagatgccatgtgtgcgggataaagagcaaagatgttttctccctcgcagaagatggacagaaagagagaatgctttgctctgtatgcctgtcgctcgaacatccggagaaaatgaaactagagactcaaaccggacttctgctgaagagaaatacaaaccgaaaactctacagcctgctgtttcgttcaattgcaaaggcggaaaagtcaacggacgattcttaccgtgaaaaggcgaagaaacttaaacagatattgctcagcacaactgacgtagttctaaacgaaaccggcagtgatgatggatacgatttactgcacctgataaaaaaacaccatcagttacttcccatgaattttgacgatgagtttgtcgcttctgttgcagagtcagacgaattgccggatgtaagtgactggaatgaaatttacaagggtaagagaggttttaaatga

SEQ ID NO: 399644 - DNA, 390 bp, Salmonella enterica
atgaaaattgttaaacttatcaaagacaaggcattatctgcatccatcgcagcgtatcagctgcgcggaacggtggcaaaatcgttagtggtattgccgctggcattactgagcaaagaggctgcggctgaaacgactgtctgggagaaaatcaataccttcacggaaggtcttgccagtacccagcctggtctgattaccggcggtaaagtcattggtgttgtgttctttattgtcgggcttgtttctcttttccttaaaaacaaacgcgggaaagatatcagtggcagcttcatcttctggtcaatggttgttggtgcctgcctggtcggcctgaccgcatggatctcttctgttggttcaactgttggcgttgacgcaaccctgtaa

SEQ ID NO: 399645 - DNA, 531 bp, Salmonella enterica; identical to SEQ ID NO: 83591

SEQ ID NO: 399646 - DNA, 705 bp, Salmonella enterica
atgaatctgtttgaagaagacaataaaaacgaagcagctcctgcccaggaaccggtgtctgccaagcctgctgaaaagccaaaaccgacagtgacgccagcagcaaaagcaaacaaaaagccgcttaagattagtgactatgcatggattggtggtatcgctgtcatagctatcctgcttttagtctggttgtttgggggctccgatagtgacactgcgcctgcggccgggaatggcacgatccagtcttcagggcaacgtcagaacgtacaggctgcccctgccgggcaggattctggtgacttccgcgagcaaatttccgggattttgctgcagcaaaaggaacggctggacgcgatagaatcaacttctaaaaatggaatgatgatcctttccagtcagttacaaagcgctaatgaacaaatcaaaaatctgaacaatcaggttcaggaactgaaaatgaaagccgctggttatgggccttcatttggtaatcagagtggaacaatttctggggcaacgtcgcaggcattacctttgttgagaggtttttcaattaatgatttatctggcgatcttgcttgggtaaaatacaaaaaccagacgtatgctgtgaaggtcggtagtcaacttggcggagtcaccattacgggtatcgatactgaaaatagaatcgttactacaagtaaaggccttatccgctaa

SEQ ID NO: 399647 - DNA, 1350 bp, Salmonella enterica
atggctacagataaaggtaaagaaaccagaaaaatgatgctctacgtcggtggtgctgctgcagtggtggcgcttctgggagggtactggttgtttggctcatcagatgagccggcaacgggtgggtcgcaggtgaaagcccaggggctggaagggaaaactggcagggaaaaagctaatgatccccaatacaacaagctgctgaatgagtggaatgttgataattcagataaagcggctctcacaggggatagcttcatctccacgttgtcagccagtaatccggtggccgttgattacggcaccaaagcaccgccaccaaaatattcgtgggaatcgtcagcaaagccgtcgggcgataacagtaaggcgaatgatgctgagcagaaagagcgtgagcgtcaggctaaagcggtggctacgttactgcagaaaatagaccaggccagaacaccagttgtcacgggtgttgctcttgcaacccctctgggagcagaaggaaatgacaagaacggcggtaccttctcagggtggaccgattcggtctatccgcagaacaaaaagccggatgctgaaaaacaacagggggcgaagaataaggccaaagataaaggagcccgacttgtatcggcttacacgcttgtgccggcagtaatggatacggcgatggacagtgacgatcagaacagtattgctattgcccatgttccaactggagctcaggccggcgccaaattctattctggccaaaaccgtcttgccggcgatggtattcgaattcacttcaccggcatggagctgaacggagtgcagtgtaaggtcgatgcgtatggcgtggcttccgactcgttgcgcgcggccgtttcctcaaatgtaaataaccgctggttcagccgtattattctgccggctgtcgctaacggattaggccgaactggtcagctgtatgcggacagcaattcgcagatgattatcactgacggcgggaacgcataccgctcaactggcacaccgaacgggaaggctgtagccggtaccattattggcgggatgggtgaacaggcagggcgtgtcctggctgacgatgcagcccgtctgccggtgaagcaggttacggttgaccgtaatcagctcataggcatccagtttgtcgcgccggtgtatgaaagcgactgtggcgagaatatggaaaatgcttctgcagagcaggcgcagcagcaagctactccgacactcaccagtgtgccgcctcagcagatgccacaaccaccggctccaaattaccctcagcaaaactttcccagctaccccggctacgggtatggctccagtaacccgtattaccgttaa

SEQ ID NO: 399648 - DNA, 1152 bp, Salmonella enterica
atgaagattaaactgttaactgtacttatggccgcactgttttcggcaaattctgtatctgcagctgatgcgccgactggtaatggagcgccgcagcaaacggcgccagctgtgcctggtggtgatattgctcaatggcagcaggccagttccgggttgcccgtaaatcagcagtcacaggtgcaacagcctccacagcaaacagcacaggaacaaggtcagcagcaggcgcaaggccaacaaccacaggcacaggcccaacagcggccaacgactgcactgcctcctgcacccatgccgcagattcctccaccacagcagcaggtgactcatgttaatccgcagacactggaagagttacctgcacctgttctgcagcagatccagcctattacccctggtcaggtgcggtcggcccgcagcgcaatggaagatatgagcgcggcggccaaaacctcaccattaacgccgatcccacgaatttcaagccagacggtatcactgtcagctggcgcatccattccgcaggtacgggtatttccaaaccaggcaacgacagtgacgttttcagatgcaaccggacacccctgggtattaggtgcccctccatataattcgagtccctgtgcttcaggtggtgaactgtgtgttggctatattccaggatcggcggtattcacaatccagccgaccaatgcctatgccagcgggaacatcacagtgcttctgaaggggctggccacgccggtcattattaacgtgaagggggcagaaccctccgttaaatcaaaaaccgttgatgttgattatcgtctggatctccgtatcccgaagcgcagtcctgacacaccggtttataccgctacgcctgagaaaaaaatctcactgtatgacaagcagctgcagagcgtgctcgatggcatcccgcctgaagatgctcagcggttgaaacttaaaaacgcgccagggagtaccaaagtctggcagatcggtgatgagctctacgtcagaagtaacatgcagctgcaggatgagtttgaaaaaacgctttccgctatcgatggcacacatgtttacgtgctgccggcaacaccagtgctgactttttctgttaatggtcaggcgcgtgacgttgaagttgagctgaattaa

SEQ ID NO: 399649 - DNA, 714 bp, Salmonella enterica
atgaaaacacaaaatggtgaaaatattatggatcaaactgactcggatcaaaactcagtcgttgatgatgacagcaacgcccttgctccagctctggctgaagagagtaaccgaacggtacaagaaatcgtatcgaaacatggtttaaaagtaattttgattcaaacgctaatcatattagtcgcaatcattatcattggtcttcagggttactggcttcaccagaaaaaaaccaaatatattgcaacgaatgggggcatgatcacagaagttcatccaaccgatgaacccgcttacacggcggaagaggtgatggactttgccaaccgtacaatgatcaaatcgctttcactgaactttgtgaattacgaaaaccaattaaccagcgtccgcggcgattttagcgctgaagggtacgttagtttccgtaaagcgctgtccgatagtgggctgctgaaagatatcagtgaaaaacgtctgaacgtaaaactttccacaactcctggaaccctgatcacggaaggtcttatccgtggcaccaaaacctatgcctggcaataccgcattccggtgactgttcagcttgttgggcaggctcaggactacagaccgcaaccttacgatttgatggttcaggtacgccgcgtaaaagaagacgaagatccacggggtattcaagtagcacaggccattctcaaaccccggaactactga

SEQ ID NO: 399650 - DNA, 411 bp, Salmonella enterica; identical to SEQ ID NO: 21571

SEQ ID NO: 399651 - DNA, 198 bp, Salmonella enterica; identical to SEQ ID NO: 21570

SEQ ID NO: 399652 - DNA, 327 bp, Salmonella enterica
atggggttcagttcattatcaggggttagtggttggatgcaattattagatatcagtggcaataatgatttatatacacctgtgtttgaagtattaatagatgaatcattgtcaagtgcgaattttaaagatgttgtaaccagtcaagagcagaaaatagtaaaaatttcatttatgaagataataatacaattagggattgaagacaaaatagctgaagtgtttatcaaaaacattcagaagatacataacgaagtatattgtgaggccattaataaagtaaataatgaggatgttagtattaaggagttctttgacctgatctaa

SEQ ID NO: 399653 - DNA, 204 bp, Salmonella enterica
atgttcagtatcttctactttgtttacaatacagatcataaatggtgttttctcatagggatgaaagagtgttattattttaatatttttcattttattttttactttttttattactatttaatacaacatcgcgatcgtgaaaatcaaatttatttatgttttaaccatgattttccctcttattttaaaactactttttga

SEQ ID NO: 399654 - DNA, 753 bp, Salmonella enterica
atgctcatgcacccgcaaggccttgtcgctggcgctcatggcggtaaattctgcctcgctcatggtatcaaacggactttgcgccggtggccggattgcgtcatatatcgctttccgcgtggcctccccgccgtgctgcttaaacgtatcattccagtcaccgaacaccggaggcagggcaacaacgccctcacaggcgtctgcggccgcagcggctttgttctggccgtcgccgttaaggtcacggtcggcggcgagcacaatctgacaggccgggtgtttctgacgggcaagactcgccagagaaaggaggttcacggacgagagcgccaccatgacggtttcgccggtcaggtgatgcacggtgagcgctgtcgcatagccctccgcaatccacaggcgttttccggcctgttttttcccttcgatgatatgacatgcccctttgacctgaccgcctttcagggtgcgcttgagaccgtcagcattgataagctgaaggttaaccagtgtgccggtatcctcatacagcgggacaaccacatcaccggcgcggaacgtcacgccgccggttttatgcatgacggtgagcgtcagacattcccggtcggggaaacccttgcgggtgaggtaggcattgccggtggccggtcgggttttctccatgagcctgacggccagcgcggccgccgctttgcggtcggccacagtttcagcctctgcggccgcaatcacttccggggcaaccggtaa

SEQ ID NO: 399655 - DNA, 321 bp, Salmonella enterica
atgaaaaagccattaccacccgtattacgcgccgcgctctatcgtcgcgccgtggcctgtgcctggctgaccctgtgcgaacgccagcaccgctacccgcacctcaccctcgacgcgctggaaagcgccattgccgccgagctggagggcttctacctgcgccagcacggcgaggaaaaaggccgtcagattgcctgtgcactgctggaagatttaatggaagccggaccactcaaggccgcgccgtcgctgtcctttctcgggctggccgtaatggatgaactctgcgcccgtcatatcaccgcaccggtactgcgctga

SEQ ID NO: 399656 - DNA, 228 bp, Salmonella enterica
atgagacacaccactattaccgcccgtgacctcgaatgtctggagcatatgcgcaacgtcggccagctcgtcggcgacctgatgcaggtgcaggactgcgccaccgttcgtcgtgacccggcgcagcacttacagctcacctccgtgatttacctcatgaccgcccagctcgacggtgtggtcgaacgctgcaatcagcagtggctgaccggggagggtaacgtatga

SEQ ID NO: 399657 - DNA, 195 bp, Salmonella enterica
atggctacgaccctcaccccgtcacacccgcaattcgtctttgtgtttgccgccgttcctcgcgcagaccgtaaaccccgtatctgtatgctccgcaccgttgccggtgatgaacacaccgcacgcctttctcttgttcgcgattacgtcctctcgtttgctggccgtctgccgattgcggaggtgcgcgcatga

SEQ ID NO: 399658 - DNA, 897 bp, Salmonella enterica; identical to SEQ ID NO: 373205

SEQ ID NO: 399659 - DNA, 336 bp, Salmonella enterica
gtgaaagcgaccgccagttggaaagggccggtgacggagatcaccaccactgaatacgaaaatggcgaagcgaaaaaagtgaaagcgaaattccgcgtctatagctcgtatctggaggcattatcggattatgtcgcgctgttaacgcgtaacccacgctacgctgccgtgaccactgccgccacggcagagcagggcgcagtggctctgcaaaacgccggatacgccactgacccgaattacgcgcgtaaattgaccagcatgattcagcagttgaaagcgatgagtgaaaaggtcagcaaaacctacagcgcgaatctcgacaatctcttttaa

SEQ ID NO: 399660 - DNA, 735 bp, Salmonella enterica
atgcggctgaaacggtcaataaaccgctcaatgggcgcacggcgctcttccgcctcttcaatcagcgtcaggatacggtcaatcgcgctggagccaggttcagataacacctccagggtgacgagacggtcaacgctggtcgcgcctgccgggactttgtcgcccgttgcgcgctccacagggatagactcgccggtgagcgcgctttcatcaaagctggcgaaaccggaaaccagtttaccgtcggcgggtaaacgccccccggcggcgacttcgataatatcgcccggtcgcagggtattaatagcgacctcttcccgtacgccgtcgcgcagacgggtcgccgtttccggtttaagcgccattaacgcgctgacgcctttacgggcgcggctggcggcccatccttccaggcgctcgccgatgaggaacagcagcaataccattgccgcctccgccgtcgcgccaataaacagcgcgccaatggcggcgacgctcatcagcgtttcaatagcgaaccaactgccgcttttcatcagccgcagcgcctggcgggcaataggatacagaccgaccagggtggtggcgataaaggccagttggccgaacgggtggttaaattgctccagcccccagcttatcgccatcataatgatcagcgtaataagcggcaggttctctttaagacgagattcaggcgcggcgtcgcgcgaatcttcgctacgcaaggtataa

SEQ ID NO: 399661 - DNA, 528 bp, Salmonella enterica
gtgcggcgcggtacggacattgaccgccttcggtcgtttgccgtgcatgtccagactaatccagtcctcgcccacttcgatatccgcgccagcatcgcgcagtttcgccagtaccgcgtccagagtgtccggttgcgcgttacggcagaggattttgccgcgagagatcgctgccgccaccaggaaagtccccgtttcgatacgatccggcagcacacgataaacgccgccgcccagacgctctacgccctcgatcgtaatacgatcggtgccctgcccggcgatcttcgcccccagcgtaaccaggaagttagcggtgtcgacaatttccggctcgcgcgcggcgttttcaatgatggtcgtcccttccgccagcgtggcggcgcacataatggtgacggtcgcgccgacgctgaccttatccatcacgatatgcgcccctttaagacgtccttcgacggaggcctttacgtagccctcttccagcttgatggtcgcacccagttgttccagaccggtaatatgtag

SEQ ID NO: 399662 - DNA, 4497 bp, Salmonella enterica; identical to SEQ ID NO: 380850

SEQ ID NO: 399663 - DNA, 1191 bp, Salmonella enterica
atggaagaaaataaaataaaagaaatccactacaataatattattaaaacaattctacagtcagatagagtttccccgccccttacacttgaatcagatatcgtgtcagactttaaagaacgatgcgagtactatatcgattcccttaaaaaatatgacaaagaaaacaataccaaaataaacttcgacttaatgatcaagcgaatttcgattatagttaatgggattacaaaatgccttgaagaatttttgtctggagatataaaatctgcttacgatgtatttaacgatattttttcatctagcactattaataaacacataaggagaataaccattcccctttatgatgtctgcaatgaaaaaagacctttatttcgagtaaggaaatctgacgcaccattaactgatagaacagatatttttcatataccttttactaaaaggtataatgttaatgcacaacgatattcagttgctgggctaccatgcttatatcttggagcttctctttacgtttgttggctagaaatgaataaaccagattttgacaaattatatttatcatcattcatatcatatgataaaaggcctaaaatcctgaatttttcacctaacttgcttaatgatcctatagctggcattttggaaggggatgaacttgaaaaagccaactggattaaagcttcatactttattctatggccattaattatttcatgtagctatataaagaaaaatcaaaatgcatctttcattcaagaatacataatccctaatattttaatgcaatggattagtaggagaagtaattcacctatcgctggtatagcctattattccactagaatgcataatgctaataaaacacatagatcaatcaatgtagtattaccacctaaagctacttacaaacagataatagctcaagaatattgcccgcgcttacaggctttatttcattttacacctcctgtctcgtggcaggttctaaaaactttagactatcaatttgtcggagaaagaactcctgaccaagctaatgcagcaactttcttgcaaagaaaagagaaacagactggtatttcaaatttttatgaagatatagtggaattatatccccttaccgatttttataaacttgaggtctgtatagaccgacttttcgaatatagtacaatttcttgttag

SEQ ID NO: 399664 - DNA, 291 bp, Salmonella enterica
atggaagcattaggaatgattgaaacccggggcctggttgcgctgattgaggcctcagatgcgatggtaaaagccgcacgcgtgaagctggtcggcgtgaagcagattggcggtggcctgtgtacggctatggtgcgtggcgacgtggcggcgtgcaaagccgcaaccgatgctggcgccgctgcggcgcagcgcattggcgagctggtctctgtacacgtgattccgcgcccgcacggcgatctggaagaagtgttcccgatcagcttcaaaggcgacagcaacatttga

SEQ ID NO: 399665 - DNA, 651 bp, Salmonella enterica
gtggccgtattcgcctttcagtatcccggcggtttccttcgcgatggttttgtagcgctcgccggtcagcacgttgagcaccgcctgggtgccgacaatctgcgaggtcggggtcaccagcgggataaagccgaggtcctcgcgcacgcgggggatttccgccagcacctggtccagtttgtccgccgcgttctgctgcttcagctggctttcgaggttggtcagcatcccgcccggcacctgggccaccagaatacggctgtcgtagcctttcagctggccttcaaaggcgtgatactttttgcgcacctcgcggaagtacgcggcgatgttttccagcttcaggatatccagcccggtgtcgtgttccgtgccgacaagcgttgccaccagcgcctcggtggccgggtggccgtaggtggcgctcatggaggaaatcgccgtgtccacgccgtcgacgcccgcttcgatggctttcagcagggccatctccgccatcccggtggtggcgtgacagtgcaggtgcaggcgcacctcaaaacgttttttgatttcgctgaccagctcaaaagcggccatcggggtgagaatgccggacatgtccttaatcgcaatggaatcgacgccggtttccagcagttgctctgttaa

SEQ ID NO: 399666 - DNA, 981 bp, Salmonella enterica
atggaagataaagattacactgacgtaagagaattttggaagaatgagataatagctttcttagcacttacatgcttgaaaggtgtaggctattggacattaagaaaaatttatgagtctaaattaggcttcaaaaatctattgaaagatagttctgctgatgcgttagctagttatttaagggtggctcttcctaaagatatttcttgggagcattttcagaaagaattatgggctaaaggaattgaacgtgcaagggatctaaataaaagaggtataaatttatatttctatgaccaggttacatttcctagttctctaaaaaacatacctgaacctccattttggatttttgttcacggcaacaaggaagttttaaataagaaatctttcgctattgttggtacaagaaagcctactgatgacgggatatttttagtgaaattaattgtttccagactctgcaataatgatattgcaacagttagtggtttggctacggggattgatcagtcctgccatctagaatcaataagatatggtattccaacaatagctgtgttaggtaatggacttttcgtagaatatccaaaaggttctaaattattatacgataatattatattaaatggtggtgctgttgtaagtgaatatttgcctgagcaaaactatagcgcagagaattttgtacgacgcaatagaattcaggccgcattatcgtcggcccttatacccgttgaatggaaaattaaaagtggtactgcgcatacagttgaatatgctttcaaatatgctaaaaaaatcgccaccccttatttgccaaaaacttacaatgtcaggccagaattaaagtttgcagaggaaaatagaaattcaaaatcatttgaggttccgatcaagctagaagcaatgattgactatattttaaatgatcagtgtattgaaagcactcagccatatcagcaggatttagatatctaa

SEQ ID NO: 399667 - DNA, 1230 bp, Salmonella enterica
atgagcaaaattaaaggtgtcatacttagcgttgaagatattttagtgcctcaagggaaagtagatacggctattttttctgaggttgaaaagctaattagctatttcaaaaagaaaggtatcgaatttgttgttttcacaaacagagcttggactataggcgctgatagaaaaccgttagaagatgttttacgtaaacactggggagactttaagtatttctgtagggctaaagacagaaatgttccaggtaagcctaaagcagaggcaacaaaatttgttctagaaaccatggggtggaaaagcactgaaacgctatatattggcgcttctttaaacgatatgcagactgctgttaatggcgagttgttatttttacgagctacatggtgggctgacaaaactgactatggcttcgaattttccacccctaaagacattgcccgctttattgatactttttgtcttagagatcatttatggtgtcacgaaattcatgatggcgattttaatttttatgctttagctccgttcagcactatgaaggaagaatatacattatattctgaggatgcacgagcagctgcaaagcatggcttaggtcatcctgatttctggacgggtgctttaatatcaagtctttattttagtgggatacacaaagagataaactatgtaagtgtttatccggggcataaggctgggtatggcaataatataatggatgaagcaatttcaatttttggtaaatgctttagaaaagcatatatacccgatttgattattcgtcatacaacttctcaaaaatctcaaaaggcgagaaatgaagggatatcgattgatcattgcaatcagcttaataccatacatttgaattctcaacctcatagaaatccaacgactttatataaaaaaccacctttgggggaagggaaaactgtacttcttattgatgatattacgacgcgtggattcagctttgaatccgcaagggcatatattgaacggactggagcaaaagtgataatggtatcatggcttaaaactataaatactgacatttctgtcttaggccagttacctaaatttgacccctataagcctaatcattttgagaaggttcccttggcaaaaactcatacatataaagataatattgttgatattttagctccaacagagttgactaggttgttttcagcctacagaacttgggattggcctgaatga

SEQ ID NO: 399668 - DNA, 186 bp, Salmonella enterica
atgatctatcgaaatggctttggaaacatacttaccgccatccggagcattggccccgcctccggtcgtttcaatgacgagccccgtccctttgaccgtggtggattgccagccgacggtggcgacacccgagacatacagtgccgcgccatcctcaactcccgaataggtcatcgccggcgttga

SEQ ID NO: 399669 - DNA, 240 bp, Salmonella enterica; identical to SEQ ID NO: 387871

SEQ ID NO: 399670 - DNA, 801 bp, Salmonella enterica
atgtcagaatctgataatttaactcgtagcttactcggtaaacttttccgcactgagatttcgcttattcgtagttaccgtgcatttttaatgttattgcctgtgcatggatcttctgcatatcaaactgggactcctcttctccagcgtcgcctatttgggaaaggatttagtacagccgctgatttagcttttgaagtggaaacacgtccaggtagttttttggttccgcgtacactcggaaaggaaattacatgggagaggtttttttctgcggtcttggacggtgattccaatgtaattcgtgaatatgatacaaatgatattgactatggtatttacgatgccggtgaaaaagtgacttttctgaatggtacagtggatatctataatcccaagaagattcatgagttgcgttctaaatgtgttgatatacagaatgactactttatgcaggtgttctttatctcaatgctcgcaccagagtttgtaagtgttttctttggtttaaaaccaactacagctgatgctattaaagacattggttattcatcgttaaaaacaattaacgatgtcgttcttttcccacgtacaattgctttctcacaagggcatattgaagagagtgtttcacttaaaacgaaagtttttgcctgggcttatgaattgtctgctgacatccggttaggaaaagttagtgatgatttgatggaactattacgttatgacactatgttcaccagtcaccgtcaggatgtgttcaacactttaacaaataaagttatgttaaaggattattaa

SEQ ID NO: 399671 - DNA, 513 bp, Salmonella enterica
atggcaaaggtcgatcaaacaaaagctaatgctctattgcgagcagcaaggactatgtcgcttggggcaaataaaaatacaatacgaattttgtacggtaatcatgttgctgaaaatatcgattttgagcctggtgcaaaaacaaaactcaaaaaaggtatccggggctggagcaaacgcacagataaccgccgagccttttctgctgttattgatgtcgcagttaactattttggttttgatccaataaatccggaagcgagttttcggcaaattgacttcaaccgaataatgagtgtccttcataatctgggatactttgtatgcgcaccggaagttaataaaataatagaaatccttacttctatgaaagaaattgaagaactaggtgcctgcgaaaaatgtaaacgcccatacattgtgccagtgacaaatgatgcttattgtccacgttgcagattatcttcaactgcttcagccatagagaggtattctcaagaagaattagattaa

SEQ ID NO: 399672 - DNA, 870 bp, Salmonella enterica
atgacgcaggcaacaacggcaatactaccagttgaaaaaagtgttccgcgcacctggcgtcgcccgttcctgaaatgggctggcggtaaatactccatgttacccgatctttaccagatcattccggcaggtatgcgcctgattgaaccgtttgtcggtggtggctcggtgtttctcaactcagacaaacatgcctgcttcctgctggccgatgtgaataccgaccttatcaacctgtaccagatgttggctgttgtaccggatacggtgataaggcacgccagggtaatgtttgaccgcctcaatgacgccgaaagctatatggcgctacgggaagagttcaatgctcaggtgatggacggaccggaacgagccgccgctttccttttccttaaccgtcactgcttcaatggcctgatccggtacaacagcaacaaccagttcaatgtcggctggggcaaatacccgtcgccttatttcccggaagaagagatcagggcatttaccgaaatggcgcacaactgcgtattcatggcggcgggatttcgccagacgctggcgctggcgggagagggtgacgttgtgtactgcgatccaccatacgagccaatgcccggcaccgctggcttcactagctacgcctccggtgggttctcatgggatagccaggtagcgcttgctgaaagctgcgttgcagcccatcagcgcggcgcaaaggtgtttatcagtaattctaccgcaccacgcgttattgaactttacgagcggcacggcttcactttgcaccgggtcaatgcccgcagatcaatatcgagtaaaggcagtacccgagaaacagcgaacgatatcgtcgcctcactggggatttag

SEQ ID NO: 399673 - DNA, 4398 bp, Salmonella enterica
atgccacctgccgcgccggtgaaagaagaggataacgggccgttaaaccttttcacgccgtaccccattacgttaagccgcgtagccctcaataacgtcaatattaatattgatgacacgaccgtctccgtcatgaacttctcctctgccctgaactgggaagagaagaacctgaccctgaaacccacctcgctgagcggcctgctaattgccctgccgaaagtagcgaaggtggcgcaggaacaggtggtggagccgaaggttgagaatccgaaaccggatgaactgccgctgggcgaatcccttaagcaactcttcgccaaaccgctgctgccgcagatgacggatgtgcatctgccgctcaatctcaatattgaagaatttcacggtgagcagcttcgcttaaccggtgacaccgatatcacggtcagcaatatgctgctcaaagtgagcagcattgacggcaatatgaagcttgatgcgttcgatatcgattcaaatcagggcacgcttaatgccacgggcacggcgacattgcgggataactggccggtggatatcaccctcaacagcaccctgaatgtcgatccgatgaaaggcgagaaagtgaagctcaaagtcggcggcgaggtgcgcaaacaactggagtttggcgtcaacctgtccggcccggtggatattgttctacgtgggcaaacacagcttgccgaggcggggctgccgctcaatctggacatcaccagcgagcagctctactggccgtttaccggtgaaaaacagtatcaggccgacgaccttaagctcaagctgaccggtaaaatgactgactacacactgtcgttccgcacggcggtaaagggccaggacgtaccaccagccaccatcactctggacggtaaaggtaacgagcagcaaatcagcatcgacaagctgagcgtcgccgcgctggaagggaaaaccgaactcaaagccttgctcgactggcagcaggcgattagctggcgcggagagttaacgctggacggtatcaacaccgcaaaaaccttcccggactggcctgcaaaactgaacgggctggcgaaaatgcgcggcagtctctacggcggaacctggcagcttgatatcccggagctgaaactcgccgggaacgtgaaacaaaataaagtcagcgttgacgggcagcttaaaggcaacagctatatgcagtggaccattccggggctacatctggaactgggacgcaacaaagccgatgtcaaaggcgagctgggagtaaaagatcttaacctggatgccaacatcgacgcgccaggtctggataacgcactgccagggctgggcggtacggctaaagggctggtgaatattcgcggtacggtggatgcgccacaggtaatggcggatatcaccgccagcaatctgcgctggcaagcgctgcgtgtggcccgtgtcctggtgaaaggggatgtgaaatcgaccgatcagcttgccggtacgatgaatgtgcgggttgaacgcctctctcagcctggggtgaatatcagcctggcaacgcttgctgccaaaggcagtgaaaagcagcacgaacttgagttgcgggtgcagggtgagccggtcgccgggcagttaaaactggccgggagttttgatcgcaacgaacagcgctggaagggcacccttagcgatacacgcttcaccacgcccgtcgggctagttgccctgaaccgtgaaatcgcgctggattaccgcaatcaggaacagaagatcagtattgggccacactgctggaccaacccgaatgcggagctttgcgtgccgcagacgatcgatgccggggcgcaggggcgtgcggtggtcaatctgaaccgcttcgacctggcgatgcagaaaccctttatgccggataccacccaggccagcggcacattcagcggtaaggctgatgtctcgtgggatgccaccaaagaaggcttgccgcagggtgaagtgacgctatccgggcgtaacgtcaaagtgacccaggtagtgaacgatgcaccgctgccggtcgctttcgaaacactgaaccttaacgcgaagttgcagaataatcgtgcggatttaggctggctgatccgtctgaccaataacggacagtttgacgggcaggtgcaggtcaccgatccccaggggcgacgtaaccttggcggtaacgtcaatatccgcaatttctcgctggcgatggctaacgccatctttacgcgcggcgagaaagcggcgggtacgctgaacgctaacttacggctcggcgggaatctgcaaagcccgcagttgttcgggcagatgcagctcaacggtgtggatgtggaaggtaacttcatgccgttcgatatgcagcccagccaactggcaatgaacttcaatggcaaggccaagagctttctcacgcaggccaagaagatcgcctggcagcagagcaacattgcgtcgcgatcctcggcatcatcgtcgcagcgcgcccggtcgcagtcatcggcgaagagcggcaaggcatcacggacgagcggttggccgggcctgaaacgcggacgcggtgcggcattcgtgcgcgcccgcacgctctcaggcggatggaagcatagcagtcccggtcggcgccgcgtcgtcgtcaaaacccgctacgtccagggcgcgggaaagaacggcaaatccgccgcccatcttcgctacatccagcgcgacggcacctcgcgcgacggcgagcgcggccagctctattcggcgaccgaagaccgcgccgacggcgctgccttcatcgagcgcggcgcggacgatcgccaccagttccgcttcatcgtttcgcccgaggacggcgcggacctttcggacctcaccgcctatacccgcgacctcatggcccaggtcgaaaccgatctcggcacccagctcgattgggtcgcggtcaatcaccacaacaccggccatccccatgtccatgtcatcatgcgcggcacggacgagctgggtgaaaaccttgtcatcaacggcgactatctcgccaacggcatccgcgagcgggcgagcgatcttacgacgctcgaactcggccccgtcaccgagatcgagcagagccgcaagctctcggccgagatcggtcaggaccgcttcacccgcatcgaccgcgccatgaccgaggaagcggaggaccgcttcctcgacctgcgtcatgagccggccgatcatcgccgccagttcgaccgcacgctgcgcctgcgccgtctcggcaagctggagaagatgggcctcgccaccgagcgtgcaaccggcgtctgggaattgagcgagcggatggaacaggtgctgcgcgagttgggtgaacgcggcgacatcatccgcaatatggacaaggcgctcaaggccgacgggctggagcgagatccgatgaccttccagattcatgacgttgcgccggaagtcccgatcaccggccgcgtcctcgacaaatatctgaccgacgagcttggcgagaacctgaccatcgtggtcgatggtatcgacgggcgcacgcaccatgtcgcaggcatcgacgccgcccgcatcgaggacgcccggatcggcagcgtcatcgagatcggcccggccgagacagcgagccgtccatccgaccgcaccatcgccagcatctccgagggcggcatttatcggccgagccgccatcgcgaacaggcgaggttcgaaggccgtgttccggggggcgactatgagggctacgtcgatgctcatgtgcgccggctcgaagctttgcgccgccccggaatcgtcgagcggatcgacgtcgaccagtggcgcatccccgaagatctcgagagccgcgccgcagccttcgatgccggccgcaaccggcaggccagcatccgcgtcctatccatcttcaatctggaaaaccagatcggcgcggaaggatcgacctggctcgatcggcggctgcttgcgagtgacgcatcggatctcgcaccggccggattcggtcatgaggtgcgcgaggcgatggaccgccgccgtgagcatcatatcgagcagggcgacgccacacgccagcaggacggccgagtctcctatcggagcaaccttctcgccaccctgcgcgagcgcgaagttgcccatgcaggcgctgagatggcagcgaacaagacgctgccgtttcgggtggcaacggacggcgagaccgttagcggcaggttcaccgggaccgtgcaactatcgagcggcaagttcgccgtcgtggaaaagagccacgagttcacgcttgtcccctggcggccggtcatcgaccgccagctcggccgcgaggttatgggcatcgtgcagggcggatcggtgtcgtggatgttagggcgtcagaggggtctcgctatttag

SEQ ID NO: 399674 - DNA, 939 bp, Salmonella enterica; identical to SEQ ID NO: 33798

SEQ ID NO: 399675 - DNA, 714 bp, Salmonella enterica; identical to SEQ ID NO: 33799

SEQ ID NO: 399676 - DNA, 1233 bp, Salmonella enterica; identical to SEQ ID NO: 33800

SEQ ID NO: 399677 - DNA, 537 bp, Salmonella enterica; identical to SEQ ID NO: 33801

SEQ ID NO: 399678 - DNA, 363 bp, Salmonella enterica; identical to SEQ ID NO: 33802

SEQ ID NO: 399679 - DNA, 1362 bp, Salmonella enterica; identical to SEQ ID NO: 33803

SEQ ID NO: 399680 - DNA, 636 bp, Salmonella enterica; identical to SEQ ID NO: 33804

SEQ ID NO: 399681 - DNA, 687 bp, Salmonella enterica; identical to SEQ ID NO: 33805

SEQ ID NO: 399682 - DNA, 279 bp, Salmonella enterica; identical to SEQ ID NO: 33806

SEQ ID NO: 399683 - DNA, 675 bp, Salmonella enterica; identical to SEQ ID NO: 33807

SEQ ID NO: 399684 - DNA, 681 bp, Salmonella enterica; identical to SEQ ID NO: 33808

SEQ ID NO: 399685 - DNA, 1437 bp, Salmonella enterica; identical to SEQ ID NO: 33809

SEQ ID NO: 399686 - DNA, 741 bp, Salmonella enterica; identical to SEQ ID NO: 33810

SEQ ID NO: 399687 - DNA, 597 bp, Salmonella enterica; identical to SEQ ID NO: 33811

SEQ ID NO: 399688 - DNA, 810 bp, Salmonella enterica; identical to SEQ ID NO: 33812

SEQ ID NO: 399689 - DNA, 1437 bp, Salmonella enterica; identical to SEQ ID NO: 19898

SEQ ID NO: 399690 - DNA, 969 bp, Salmonella enterica
gtggctgagacatacgaagataaagttgctaatcatgtttcagagtgggaaatgaaaaatttccgtgtatgttatgatgatcaggttattttcttatgtggcgcggaagtgcttcctaaaggaagtgttcagacttcaatgagagggcatttttatcactattgcttggataaaaataaagatatagctgataaaataattcttgctgaaaacttcaaaaaatatcttcaaaataatcattatccagacttaataacttttgagcatgatgttgcaagtatatccagtttagttgttattttcttggaaagcagtggttcaattgctgagttaggtgttttctgtaatattagcgatgtaaataaaaaattattgatatttgttccatcagaggaagttgaaggtgacaagaaagagtctttcatttacttaggacctttattgtttttaaaagaaaaagtcaatgaaaaagcatttaagatttatccaaaacccactaatggttctgattattccgagcatttagaaattatggctgatgacttggctgaactattgcctagaagtggtaagtttgaaagcttcgaacctgacaatttaggacatatagcttttcttatatgcagaattgtgcatttagtaatgcctattaagctaaaggaaatattaagttgtttaaaaataataggtatcaataaatatacttcgactgaggttgaaagagttttattcttattggaaacattgggttttataaatatttatccgtatggcgatttaaaatactattattcaatgcaagctaggcaaaatcttaaattagggaaaaataaagccggattcacaatcgatgaggccggtatttttgctgatattagtgtttttatcaatgacaataaattatgtggtgataaaaaaagacggttggttttgaaaggcattaaggagaagcataatggacataattaa

SEQ ID NO: 399691 - DNA, 204 bp, Salmonella enterica
atgcctacaattaaaaagttagctgatgccagagacgttattttgcatgaactgattttgcataaactgatcggacacctttcccgtgcagtggtcaacgtaaagtcaatgcaggcaaataacgtaaaccatttttgtactaaaacagaaaaagcgcatctacaccctatgctggaagaaatgtttgcagtggcaggtaaatga

SEQ ID NO: 399692 - DNA, 156 bp, Salmonella enterica
atgactacccgcgaaatcatcgccaccttcaaagagatgtacgacgctgatgtgtcgcccatgctgatacttaagatcaccgccgcagtaaaagagttggtcaaagggacgtcaaaaaatggagtatgccgatccaggactggtcgctggcaatga

SEQ ID NO: 399693 - DNA, 771 bp, Salmonella enterica
atgatgatgtcgcattatgctgataatcaccgtggggggtttttagagtttactatatcagatgatataggtgaaggtataaacaatagaattaatttatttattaaaaatgaccatatccactatcattgtgggccagtcacatacgctgataaggataacagaggattttcctattccaacaataatattgatgatatatatctcgcttgctttgaaaaagggtatgaatggagtgtggaagaagaaattcggtatgttgctgactttcgaaaggctgattattttatactaccagtgaataaccttcttaattattatgtatctagaatagatgatgttatagggtatgaagtagagaatgagtgtgttagttttatatatcgagattttgaggataatcacttaaaattgagggccagaaaaatccaagatatattctacgctataattatgtcaaaggatgaagtcggtacgcttaggctatcggaagacatgaaaactatatattttgatataaataaagatggtgaaaatttcatcataccttttatgaaattaaataggttggtgaaagataacattcatttttatccaatgcttaatgtaaatccagatacattaactggcgtatatttaggtgctcggtttgatagaaaagacctccatagtgaggatttgtataagtttaaaaatttggggtgtaatatttattcgtgtgaattgagtgatattgatttctctcttaagtttaataaggtagagttttga

SEQ ID NO: 399694 - DNA, 330 bp, Salmonella enterica
atgaagagcctaccagctgaaccgggattatattttttcgcatcttttgagtccggtgctcacgtttacaaagtagtggcctggtcagaaaatgagaatggtggtttagatccacagtgtgtgttaacggccttatatgacaagagcagttccagccagcaatgggaacttcactcaacttcagcatctgcatatcagcacagcaatgacggcagaccatttatgtattttatcacctacttcaccagcaatggcgggatacctgaactttataacgcaataaacacactagccgaacgatggggatacccattaattgatttaccataa

SEQ ID NO: 399695 - DNA, 432 bp, Salmonella enterica
atgaacatccctactcatctgaaacacaaaccgattatcgctgtagaaaactatgatcgaattgatggaccttatgctgatgacactgatgctatggggctttccgttggaattgctcaatggaacacccccgggtataccgagctatcagcaaaagtgtggcgcaacaccggagaaaagtggtcacggcaatcagaagaattacctcttcatcgtgttatcgacttggcaacgcttatctgcatagcaatggattacagtaaacatggccgcttatcttccagcgacgactttccggtcagtcgttcaggaggcaatcctgagttatctcgtcacattgatttaatgaaaaacgagctaaaagagaatcacgagtatttagatgagagtcttaagcgtttagcagcagaactaaaacgtttaggttattaa

SEQ ID NO: 399696 - DNA, 270 bp, Salmonella enterica
atgaacaatatcaaaatgatcacactcttccatccccatgacaaaacaccatttatgatctgtattgtaaacaaagtagaaaatacagaacacggattgaaattaacccttgaaaacggaaatagcatttgtttcaataattatagccattatctgttatccgagtctgtaagtcgttgcgataaagacaggttgaaaaatatttatatccgcttggtttcagaactcgcacagatgagtgaagaaactataaaatcgcaaatgttgtaa

SEQ ID NO: 399697 - DNA, 315 bp, Salmonella enterica
atgcgaaaaataaaaacaaaaatctacagacctacagttttaacaagaaacatggataaacactatatccctgttttacaggacttaatagaagcgatatacagcgacagattgttatcaagtcttgcagatagcggtaatattgtaatccatgattcacttggatatccggttgctaagtataaaaatacgaggattagcataggcatagaaccattaaatccgatgataagacaggatctaactcttagatatatcgtggtagttagaaacggaaaagtatcacaggaaattaatggtttacttaacagataa

SEQ ID NO: 399698 - DNA, 1770 bp, Salmonella enterica
atggacgaattaaacattggtaaagttacacaagtaaaaggaaccactgtcaaggcaaaaataaaccatgacttataccaatctacatattttcacaatggaaaaatacttcgtggcatatctataaatgaatttgtgttagtccgaaaaggttatcaggatatagtaggcaagatcattggcgaggaaattgttgagaattttaatattagaatcgatgatattgaacaaaaaaaatatgaaagatttgttgaacttaatattctcggttatttttttgaagggaagtttttctctggcataaaataccttccaatgataaatgatagactgtatttgatttctgatgataaaatatctgagatatacagctttagcaaaaacactaaaaccccacttattaacattgggaggtccatgttagaggaattaccaattaacatcccaataaatggagtttttaattctcacattgggatttttggaaatactgggagtggaaaatcaaatactttagcaaaattatatcaatcacttatcaatcgaattgacaacatagaactatttagtagcaaatcaaaatttgtcttaattgatttcaatggggaatatgggactcttgagaattcctttccagaactgtgtcaatcaataaagcttagtacaaaaaaagatagtggtaaaattcatttcggagaaaaagagttttgggatgatgaactattatcagtgctattctcagcaactgaaaaaacacaaaagccattcttaacccatctaataaagagcaagttaaaatatgatgatgaccttggtgagtatctaaaaagaactattaaaataatgtttggcactaatcctcacaaagagacagttaatttacttaaaagcctaataccttattttgaggaaggtgatcaacaaaaaataatagacgaactgtctctatttacttggcattcaggtcaagataagtatacacaccctgatagctggctcgataacacaactgaagttatgcaacacactcaagctacatacaacagcaatttcaatgtcaccagtgtatttgatgaaattgctatacgtgcgacactacaactaataaactcagtctccagaaactatgtccaatatgatcatatatatccactaataaataaaataatagctatgagctcatctttggctaaagtcatagaaattaatgatgttcagcaaaataataaacccatatcaataatatcccttaaagaatgcaatcagtccataaaaaaaaccattccaatgatgattgcaaaatgttctttcttggaacacaagtcctctgacaataagatagaaagctttcatttgataatagatgaagctcacaacatcctatctgaaagctctgtaagagaagctgaaacgtggaaagactacagattagagttgtttgaggaaataataaaagaaggcagaaaatttggctattttgtcactatttcaagccagcgaccatttgatatatcgccaactatcgtgtcacagttacataattatttcatccatcgcttggtaaatgaaaatgatctttatcttcttaaaaacaccttaagtactttggatgcagcttccagaacgctcataccaacgcttcctcctggtgcatgcataatttcaggaacagctttccatactccgctgcttgtgcagatcgatagacttgctgaagagagtgccccacaaagtgacacgcttgatttagagaatttatgggatctttaa

SEQ ID NO: 399699 - DNA, 621 bp, Salmonella enterica
atgtacaaacatgaactaccaacggttaatttaattaaaatgcatggttcagtctcatggaaaagaaatgagcatgaaacgataagcattaactacccaattacttcaccagaaagaataaaattagagacagataaaaccatagatgacctggtagctactttaaacaacaccaatgataatcttgctaactacttagacttaaatcttaatgataagaatttacttgatgaattcagatcgtattatgactcactcgcaatagttaatccaacaaaagagaagttttcagaaacagtctttcagcagcattattatcaaagcttgagattattaagttatgaattagagaagccacaaactgttttaatttgcttcgggttttcgtttcaagatgaacatatccttgaaataatcaaaagatctttaagcaatcctactttaaaagtctttgttttttgttacagcaataaaagcaagcgcgatataaatacaaccgtaaacgaccctagaataacctatatcttcccaaaagaagatgagcataaaatttcttttgatactttcattgatagaatattcaaatcagaaataggagactgggtcacatggacgaattaa

SEQ ID NO: 399700 - DNA, 327 bp, Salmonella enterica
  misc_feature (309)..(318): n is a, c, g, or t
atgagcacgagagaatttccatgcaaagcatcaaacatctatgacaagaatataaatttcctatttggctcaggagcatcagcatcgtatatacctactttgtggcttgctgaaaatactacttatgagactttattaactcatgaagattgcaaagacgttaaagatttcattttatgttcctattttaataaaattattagaaagacattttgcatagaaccagctttagaaaacaaaaaatacacttcaacaatagctagctatacaaatttcctagatgaacttgttacgttattagctgtctcnnnnnnnnnncgttattag

SEQ ID NO: 399701 - DNA, 567 bp, Salmonella enterica
atgaatttagagacgggtgcgcgtgaggctatcgaacgcatatgtgaggtttacggattcacatcgcgtaaccaattagctaaacatattggaatcactaacagttcgcttggtaataggataatgcgggataactttccagcagatattgcaattagatgtgcgcttgaaacaggggccgcattgcattggcttgttacaggcgatggcccgaaattcgatcatgccttcagtgataccgtaagaattccttcatataaatttgaaggaacaaaattggtgaaaacagcatcatttttgttcgataaggcaatgcttcccgaccacgtaggcaacccggaaatcatcaccgaaggaaacgccaaatatctggttgatagagccgactaccccgctgccgatggcaaatatctgattgaatactccgaaacccaaagcattaaagaactaacactattaccgggtaataagctgcgcatcgactggggaaaatacccgctcgattgtgaaatcggcgacgtaaaaataataggcaaagtcatcatgacgatggtggttaacacttaa

SEQ ID NO: 399702 - DNA, 204 bp, Salmonella enterica
atgacatccaccgtttcaacatatagcgaaaaccgttgggtagatttaaacaccttttgtgaacgttccggcgttcccctgcgtcgcgcccgctattggtatcaaaatggtcgtctgaagatcaaaccaaaagataaacgcggcgagcgggtttatgtcgattggctggcatggactgcagaccaaagtccgtgggtttcttaa

SEQ ID NO: 399703 - DNA, 135 bp, Salmonella enterica; identical to SEQ ID NO: 10665

SEQ ID NO: 399704 - DNA, 222 bp, Salmonella enterica
atgcacagggcgcaagggaagccgcagcctgacgcacacggctggcgggagttggagggtgagaccgcgaaatctgagcgggtgaacgaccggaaaatcacggcagacgggaaggagggaccgggtgaccgcagcggcgaagcgtacccttgcatcaacgccagcccggctaagatggaggcacggcacagcccgcacacgacgctgaggccacagagctga

SEQ ID NO: 399705 - DNA, 234 bp, Salmonella enterica; identical to SEQ ID NO: 30885

SEQ ID NO: 399706 - DNA, 396 bp, Salmonella enterica
atgatggcggggaaaatccccgctttttttctgccggtccccggacagagcacaaaggaagtcgccgccggctccgctttacccggccatgcagagcatggccttgtggtttttcagttatgtggcctcagcgtcgtgtgcgggctgtgccgtgcctccatcttagccgggctggcgttgatgcaagggtacgcttcgccgctgcggtcacccggtccctccttcccgtctgccgtgattttccggtcgttcacccgctcagatttcgcggtctcaccctccaactcccgccagccgtgtgcgtcaggctgcggcttcccttgcgcccctgcatccccgccttatcgcccggcttttctggaggcacggcaccgcccggtgtcgcggaatatgtga

SEQ ID NO: 399707 - DNA, 711 bp, Salmonella enterica; identical to SEQ ID NO: 30887

SEQ ID NO: 399708 - DNA, 297 bp, Salmonella enterica; identical to SEQ ID NO: 30888

SEQ ID NO: 399709 - DNA, 234 bp, Salmonella enterica
atgcagccggagggcatcatatccggcgatttcagtacggaatccgtattctctcagctctgcctgcaggagtctgaactcctgtcgtgtaatatcagcggcatctgcgtttccggcacggagtgttttcagtgtgttttcatctttttcccttgcagcaatcgccgcagagaggcgttttccggcttcagtacgcttattctcattctctttctgctgcgcgctgagcgctga

SEQ ID NO: 399710 - DNA, 294 bp, Salmonella enterica
atgtctgaccctgtacgtattacaaatcccggtgcagaatcgctggggtatgattcagatggccatgaaattatggccgttgatatttatgtaaaccctccacgtgtcgatgtctttcatggtaccccgcctgcatggagttccttcgggaacaaaaccatctggggcggaaacgagtgggttgatgattccccaacccgaagtgatatcgaaaaaagggacaaggaaatcacagcgtacaaaaacacgctcagcgctgatgaatcccctaatgatttttaccaaaatcattag

SEQ ID NO: 399711 - DNA, 1677 bp, Salmonella enterica
atgaattcatttgccatcgttatactcttattagcatttctcgcccctgttctagctgtaatattatttaaacaaagtaaaaaacacaaagcggctatagataacctgacagctaacaacatagccctttctaaccaactgattgaaaatcaagaaaaactagcacagaccgtacgagaattatcagagcttgaagggcgagcagcaccattgtggcaatacgaagaattgcacagcgcagtaatggatgcagagaataagataaaaaatgcggactcaatagccaagcaaaaaatagatgaagcccaaattaaggcggctaaaacagtaaacgaagcaaattatcaagctcagatgacaataagcaacgctaatagcgaagctatagcaatcaccaaagacgctcgcgatgcacgcctgaaagccaaagaacgtcttgataatgctaataataaagcaaatgagctaatctcaaatgctaatgacaatgcagtaaaaattatttctgatgcagaagaaagagcaaaggagattgctggttcagcatatgaagctaaagagtttgcagaaaaatatgaagcagttgcaaaatcaatgaaaaataaaattgaaggttatggtgatgaatggatcatccctaaccgtagtgtacttgatgagctggcagaaaattatgaatttacagatgcaggcaaggaattacaaaaagccagagagttaaccaaatcattaataaaaactaataaagctgcttcgtgtgattatgttgagaaaaacaggcgtaatactgccataaactttgttttggatgccttcaatggaagagttgacagtattttatcaaaagtcaaacacaacaattttggaaaactttcccaagaaataaaagatgcatttcaactagtaaattacaatggctctgcctttaggtccgcaaaaataagtgacatctatcttcaggcaagactcaacgagctaaaatggggtgtagcagttaatgaaattatgctcgaagaaaaagaagagcaaagaaggattaaagaacagcttcgtgaagaggaaagagctcgtagagaatatgaaaaagcgataaaagaagctgaaaaagaagaaaaagctattcagcaagctataaataaagcaacgaaagaacttatgcttgcaaatgaagaacaacgcttagctttagagcaaaaaatagctgaactacagttaaaatatgaagaagctgaagctaaaaatcaacgagctatttctatggctcaacaaaccagatcaggccacgtctatatcattagtaatattggttcatttggcgaagatgtatataaaattggaatgacacgccgccttgaaccacttgatcgtgttcgtgaactcggagatgctagtgttcctttttcgttcgatgttcatgcgatgatttatagtgatgatgcaccatcattagaaaaccatctgcataaagttttcaacgaaaagcaggtcaataaaattaactcacgaaaagagttttttaacgtaaatttaaaagaaatcaaatcagttattgaagacatgaacatcaacgcccactggacaatgtttgcagaggcgaaagaatatagagagtctctagctattgagcaggagcgcaaagcagccacttccgccaacgatgaactacatgttgcttag

SEQ ID NO: 399712 - DNA, 597 bp, Salmonella enterica
atgtcaacatcaaagtacccaagtgagatcaaaataaatcccaataaaggtggtaaggctgcgattgagcgattagtcgaagcctatggctttacgacacgacaggctttagctgatcacttggatgtatcaaaaagcacactagcgaacaggtatttgcgggatacatttcctgctgactggataatccaatgtgctcttgaaacaggaacctccctcaaatggttaactaccggacaaggccttaagcaaagctcgctgacagcagctacagaagagcttgttaagtttcgccttgccgcaggcaaaatgattgaagacggttcatatgtcttcgattcatcatttcttcctgcaaacctttcatcaccaattgttgttcaggatggactcgtcacatacatttgtgatcaaaaattttctgaagtacttgatggaaactggttaatcaatatcgacggaacctattccattcgaaaaatcacaaggcttcctaaaggaaggattaaaattacaacagcagagaatagctttgaatgtgcattttctgatattgaagtggttgcttgtataagaagtacaatagtctcgaattaa

SEQ ID NO: 399713 - DNA, 222 bp, Salmonella enterica; identical to SEQ ID NO: 10540

SEQ ID NO: 399714 - DNA, 819 bp, Salmonella enterica
atgcgagttaattacgatgttattatcaaaagcggcgatgatgaagtagatatggaatacggtctcgacacgcttgcaggaactgcagaggttacttgcttgttggcggaggctatacttaggaaagtaataataaagcgccgctctcatgtaaatcctgcaagggctgtactcaagaggaatttcaccggttcttatggtcaaaattttgacttggttattaatgatgctgaactggtatcagaacttcgcaaaatatctaaaccagtatttaatgaagtgatgagtttctttatttcgcaatcattatatttagagagtcgcgaactttccaatgaagcggaagaagtagttaaaggtttatcggatattgaggatgagttgataggtcgtattcgagctcctctaaaaagaatgcatgaaattaacctcaaaaaaaactataatatcgagttaaattttaaacagcgtgcccatgataagaaaaaagtaattgaattagatacatctactgcaacaaatttattcacatcacgtgttttaaaaaagactgaagtaatcagggcttatattacaagatttaatgctcgcactggcaatggtaggcttgttcttgagggcgaaaatgatacggtggcatttgggttttatagccccttacgtgtcatcattccagctcaaaaaagaatgatttcggctaacttacatgtaaataatccgccttccactgctggttatatttatcttgaactgactgtaagtcgggtaataattaacagtggggaaactgtgaaatatttagtgcatacggtgcagtaa

SEQ ID NO: 399715 - DNA, 747 bp, Salmonella enterica
atgttaaaaataatttgtttagctcttataataatagttttgggggtttattgtattaagtttggcccctggtacttaagtactcaagatgctgatgtttgggggcaatttggggacttcatgggtggggtcctgaatcctatactaagttttatctcgatttgcctgctgattcgctctgtaactttacaagtgcagtctaactcaacattgaaacaagagataaaaagacaagagttacttgaagattacaaaaaatttgaagtgaggtttttctgtctaattgaatctcaagattctaattataataaattgcgtattgtaatcggtaatggagcagataatgatgatgaaagtaaagggggggggaccaaagaacctacacttattgagtatagatctaataatgctataactttcattgatgataacttgagcatcttggttagagctggaatagaaaagaaaagaatcattgcatggttggaaagtttagatgttgatgatcattttttctctttggtaagaagattttatcttttggtgaagttgatagatgataaagttgaaagtgaaaaaaaagctgaacaatatgagctgttaataaatatgactgatgaaaagcttttgactatgattgttattctttgtgagtattttgattgggcaaatgttttgtatattaaaaatagtggaatcatagagcaggctaaaatggatgactatatttctaattatagaaactaa

SEQ ID NO: 399716 - DNA, 498 bp, Salmonella enterica
atggaatatggcttgatgaaaaaaatcttctctaaaaaaacatcggttgtacgtttggtttatagtcctgtagccctggctgttagcacggtttttatctgtgggatgtacagctctggtgtgcaagctaaatattacactttcgatgcttctcagttagataagggtgggaatgttgatatttctttgcttgagcagggcgctcagtttcccggtacctatctggtggatgtgatgcttaatggtaaacgagttgactcacgtgagatggcctttcatatcgagaaagatgcaaaaggtaatccgtttttacagacatgtttaacacgtaagcagttgatggattatggtattaaggtggatagttatcccggattatttccggtcctcaagggggggatggcagtggtgcaactcggggggctgactgtgcgcggatatcagcgatcccccaggccagcgaaacctatcagttcaacaatcaacagttgttactga

SEQ ID NO: 399717 - DNA, 456 bp, Salmonella enterica
atgcttaatcatgaagatccacgaacagctttaattgattttttgaaaagcattccgcaaaacctaagaatagatgaatacctcttcattattctcatgtgttgcggtgaaaacccgccggaggatttagacgatttcgaaccaatcgttgagaaatatttaagccgaacaggatacgctggctttggcgctgttatttgcaccatagccatactggagcgtaggttatcaagtgtaatgttaaaactggaacgagctgaggagtcgttgaaagcattatctaataagaacgctgatttctctcaatatccgctgctaagcatgcctctgaaaaagcggcaatatgctcaggttgttgagcgctggagagctctcttacacggtgcgctatctgctgaaaaccttgcttatttcgaacaaaatccgcaagcgttatcactggtgacaaaagaataa

SEQ ID NO: 399718 - DNA, 639 bp, Salmonella enterica
ttgccgcgtaaacaagtaattttgtggtatatggataattcaagtaacgactactggctggtttatccggccagtcatattgctgtatttgacgctgaaacccagacgtggagcctgttcgaagaccaccgtggaaaaacggtatacgatacgacaaccggcaacccgatttatatttcagaacccggcccgctaccggaaaacaccaccacacaggcccctgcatcaccgatagataaattcgaaaacggtcagtgggtggcagatttgaataccgcgcttattcagaaacatgccgaaattaacgactggcgtaatattcaggagaatatgaattatgtattccggtttaacaatcataactgggactacggcaaagcgatgcaggagagattaagcctctccgttcagatggcgaaacagaataaattaccggacggttttatctggacggacgccgataataacgacgtgccgatgacagcgggcgagctgctgaacctcagcgacgccattgaccaggccatgttcaccaaaggtctgcagattcatatgcgacagcggcagatgaaagaggaagtggacaaattaacggactataaggcgattaaggattacgccgtgggctggcccgaataa

SEQ ID NO: 399719 - DNA, 225 bp, Salmonella enterica; identical to SEQ ID NO: 25145

SEQ ID NO: 399720 - DNA, 192 bp, Salmonella enterica
atgaatgcagtgaagatgatccagaaggaagagcggccccgtgggttaaaagtaaaaatcctccagctcttcatggtcaggctttcgctcaactggtcgaagcaactcagcttcatcagcgaactcaagctcaggatgaaaagcaggatgaaatcctcgatgccagactggacggtcattatcgaggtctaa

SEQ ID NO: 399721 - DNA, 756 bp, Salmonella enterica
atgcaacaaacattaaactttgatctatcagaacaacccatcccagtgcttttgcgtggggataagtgggattctgtttggtcagaactgactgataacgaggatttgaacttcgttgatgccagtagaggaaccagtctgtcatcgttgatcacgtcatcggttgagtccattcacacggccttaattgatgggtggaccatgatgatcggctattccagtggtaaagattctgaaacggtcttgcacctgttcctgatggccctgatccgggctgtaaggagtggggcgaccatcagccagcaccacttcatcttgcacactgacacactgatcgaaagcccagaggtaaggtggctggcggatcagaaactggccgagctggagcgtttcattgcgaaggaaaaccttcctctgaccatcgttctagcaaagcctgggatctcgcagagttggacgggccgaatccttactgggagggggttgcctacgttttccaactccacggcccgccagtgtagccaggatttaaaaatcacctctgccaaaagagcgaaggcagcttatatgcgagagcttcccaaagaggttcgacagaaagtctgccttttgctgggcagtcgtgatgctgaaagcactattcgtgcggccaacattgcaaaacagcgaggaagctcagatcgcgtcattaagacgaaagatgggggtgagctgtatgtggtgaaaaacggcactgttgcaaatagtcggtggtga

SEQ ID NO: 399722 - DNA, 441 bp, Salmonella enterica
atgtggcatgacaaacagggcaggaaaaggacgcggcgctgccgtttttccataggctccgcccccctgacaagcatcacgaaatctgacactcaaatcagtggtggcgaaacccgacaggactataaagatcccaggcgtttccccctggtagctccctcgtgcgctctcctgttcctgcctttcggtttaccggtgtcactccgctgttatggccgcgtttatctcattccacgcctgacactcagttccgggaaggcagttcgctccaagctggactgtatgcacgaaccccccgttcagtccgactgctgcgcctgttccggtaactatcgacttgagtccaacccggaaagacacgacaaaacgccactggcagcagccattggtatctggtttacggagcggagaggcgtgtacaagcatacacagagttcttga

SEQ ID NO: 399723 - DNA, 1533 bp, Salmonella enterica
atgaaaaaaagtgttgttagacaggtgcttgaaatgagcgggccatgcatctcttcggatcttgcagagagaattcagtggcaatatccctcaatgtcccctgaagcgatacgtaaaatgatctcgcgaagcacggacataggtaagctgccatttttgaaattcagccataacaggagattcatttatctaaaagatgattttggcagtttcaaattttggcgagctctcgaaaagtgcatgtacgaagcaaactcaacttactcacacgcgatactttccgtaataaataatggcggttatttgaaggtgaaagattttgggattgtgtctggatctcctataaaacaagctaaacatttaagttatgaaacagttctaagaaatctactttcggcaaaaatacttagagccgtgtatattgatggagttggtgattgcgtactgataaataacaacatagccaacgatgttaatattagaacaatggcaaattgcgaatccttttttgacaaaccaatatttgagcttgttaaagcttggttgaggaatttaggcctagtcgcttttaatcagataaaaacaaaatatgatggggagggaaatccagttgtaggctcttttgaatgggatatgaccgctccaagttacgtttcccctctcgctgaatatgtcggcggaaaactgatgcctggtttcgttgcctgtgatttttctctcggctttaatcgtgatgaaattactaccgctgcagcagaaacattcataagaaaagtccagatgaccaagtcttctcgagcgagtcagaggataatgtttgttattttcgcaaggcgtttcggcaaaatagccttcaataagttgagaagtgagggggttctggctgtaactatagcaaatgcgtttggtaataaagttgatgaaagcttaaccaggttgtcgagggtggttcagggttctttgtccattgaaaagcatccagatgagttgcttcagatggttaaagatctggagtctgtttctggagagaatggcaatttgagagggtatgtttttgagctttttgtatcctcgcaaatttctaatttttatggccttggtaatatttacattaatagagagtataagataaatggtaagcatgcagaagctgatgttgtattggagagtagtgacgatatttatataatagagtgcaaaaatgttaaggtcttaccttcaactgaacttacgcgttggatgaaagaaagggttccaattataaactcttactataaaataaataatttagaaaaaaagaatatccaccattatttgtgggttacagggaatgtgtacaacaaagatttaaaaaggttagactcttttaagaataataataagaatatcgatgttgattatttgtttggtgagcatttggatgatttcttttacaagaaaaagcgggtgttcaacttatatagaaaagtcatttcacctgattataaaaaaggcgtaatgcctgattttgagttagaggacgattttttctag

SEQ ID NO: 399724 - DNA, 243 bp, Salmonella enterica; identical to SEQ ID NO: 375752

SEQ ID NO: 399725 - DNA, 465 bp, Salmonella enterica; identical to SEQ ID NO: 375900

SEQ ID NO: 399726 - DNA, 1089 bp, Salmonella enterica; identical to SEQ ID NO: 7431

SEQ ID NO: 399727 - DNA, 1182 bp, Salmonella enterica
atgctattagttggttatccacttaattgttttatcaatttatttgatgacaatttacaccatgtgttcaaggtattgattatggaattacagacaaggctagtttttatcgatacaagcgcttttgaaaagaaaaactatcaatttgggcaacacgctcttggtcgtcttcaagaactaattgaggatgagaaaatccacttgctcattactgatgtgacaaggaaagagatcgactcccatctcaaacacaaatctgaagaagcagcttctatgataaagaagatgcaaagagatgcgatgttcctaagaaacacccccgaccttgattgtcatggcatcttcaccaagattaaaggtgatgatatttatgctgttatcagtgaaaaatttgatgatttcgtcgaaaacggctacgtcgaaacaattgatgtaagcactgttaaccctcaagttgtatttgatgcttactttaacaaccttcctccttttggcaaagaatcaaaaaagcacgagtttcctgatgcatttgcgctagaagctattaaacaggtgagcttggctagaggatattcagcctatatcgttagtgacgacggcgatatgaaatcattctgtgagaaagaagataacttcattcatcttgaaaatgtcgatgacctaattgacttgattgttcgaagcgacaaagcgtacgaagaaccagccaaatttgctgatgaaatattcgaacaactcctagaacaaatcaaagcggatgccctgcaagctctcgaagatggcgagttcaactatgaaaacgcagatcctttcgatgagactatcaattctatagaaatcaactcggtgaatgttgggaagaaaaacttacagaatgtcgatgccgagtgggctgaatacgaagtagaatttgaggtggttgttacggcagattatcgattctcagattatgaccgttcaccttgggaccctgaagacaagcaatatgtattcgtcttgagtaatgagtcaacagtaaaacacaaagaaacatacactgcccacataacacttgcctataccgatggattaaaagctaacgcatacattgaagagttttacttccaagatacatattttgagctgactgataatgactccgaagtcattagcttcaaagaactagatatcaacggtgaatga

SEQ ID NO: 399728 - DNA, 960 bp, Salmonella enterica; identical to SEQ ID NO: 290940

SEQ ID NO: 399729 - DNA, 441 bp, Salmonella enterica
atgagaaaatcaggaaaagcattagcgagattgcgagcagctttagaacgcctaatttcgggcaagccacaaaatgtttcaccttcaggtaaattaacccttaataaaataaataacgaagctggacttggtaacagttacatacacaaatttaaagattttattgaaaatgaagcaaacccagccattgagtcgtttaacgctaattacgatcccgtcaaagcgaaactatcacaaaacaagcagaatctaactgagaaagaaaagcataaagccagaatgaagaaagaagtcaaacttaaagagcaataccgccaagagcgagatgatctaaaaactataaacaaagaattagaaacacaaattagttctttgatgttcaggctgtatgaattacaagaacaacttaatgtacaaaatgttgtgaagatctctcaataa

SEQ ID NO: 399730 - DNA, 1992 bp, Salmonella enterica
atgatctcagtattaaaacataatttagcttcagtaccagattatgacgaaaacataccagtaagtagttacagtgatggcagtgttgaaagctacatttttgataaaaagtggaagtttagcggcgctattcaagtaggcgttggtggtctaacagatatctctttttcacggattgacatgaaataccgcaagtacattcagtccacactcgcatacatcatggatgaatataaacaaaagaacaaaacgcatccaactatcggacaacttcaacactggaagaatgggctgaaatatattgttcaaagccttggcgagtgtaactggaaccttctatcagacgacagaatattcaagcaattcaagaaatctttcagtgagctagcaattaaaaggagcctttctcaaacactaatcaacaatgtagtaaccacttttggtctgctaaatagcctgaacctgtgccataggattgtaacgataaaaagcttaaacatacaaagtataaagccaaccaagcaatacattgcaattccaacgaatatctaccaacaaatacttaatgatgctatctcaacagtagagtcactgcacccccatcgtcatgaaatatcggctcttatgaaccgaattcagactatatacgacgaagaaaaaaatcgaaaagacagatcgtcttctctaggccagataaacgacaggactcgtaatagaattcggaagataggtcataacattcctgattttaagcttactcgtgacggcacaaacatttctaatattctgactccctgtgcgatagttttactggcatttagcggtgtaagagttggagagttaaatagctttactaaagatagttacgaagaaagggaaggagaacacggcgataacatatgctttttgaaaggtgaaactactaaaacagtcaatggtattcctaaaaaagaagtatggcaaacacaccgcatatctaaagatgcacttgagttagcctatgactgcacagcatatcttcgcacaacctacatagatgatgtgaacaagcaatacactgaacaaaagatcaatttagatgagtacaaaaaaaccttacgggtgctagagtctgtatttctgccagtaacactaggaggctctaaaaagaccaactacagctcaacggctgcacgctcaaaaaacctcaagtcttatttggaacaactaaatattaaagcaacaaaagaagatgttgattcattcaatacccttaacccttcatggcacggagaactcaaagaaggtcaattcttacctaagatcagtgctcatgactttagacgaacattcgcagtattctttaagcgttatggatttggaacaacgtcaacaatcaagtttcaatataaacacagaaatataaacatgtccgaatattacggcaaaaacgcccaacttcagtacttcgaagatgtcttattagactctgacttaatccaactattgcatgaagaaggggttaacattgcagtcgatatgtttgatgaaatatacaacgattcagaaacgctaagtgggctaggtggagaacgaatagccaaggataagtttgaaaaactacgctctggagacaaggtatatatgacgcggactgaaattgagtccctagttcgcaatggcacgctttctattgtcaagctacctacaggcggatactgcactaattcgtcttgcagtagagtgtgtggtattggcgagttctccgctgaaattaaaccatgcgaacatcagataatcacagacaaggaggccaaaagaactcaacgtcaaaataagcggctaataaatacatttcgagatttgaataatggcgaccctatgatgaaaagtatacttatcggagttaagcaaaagataaaaataaatgagtcattgattatcaaccatggaattaaagtcacagcctttgaggataatatcaaaggcataatcgcaaccagtagaggttaa

SEQ ID NO: 399731 - DNA, 1851 bp, Salmonella enterica
atgccaaaacataataccagaaagagaaaatatctacttccaggtaaaaacttaataaaaggcaaggccgaagttaaaaccttacatttagccgatatggttatatgtgtaaacggcagtattcttcgttttgaaaggtttgcttttaaagcctgtccagtattgtttcgaggtttcagaaaggttgaaactagtcagttcactgacatgaaacgaagcagttttgtgcgtcaaatatactctttgctaagtgagaacgtcacctctaccacagcctctagatatgaaacgctaataaaatacgttaggtgggtggatgatagtaacgacactgaattaatcgataaagacatgtttcactgggaactaattgatggattcatgacatggtgtgggaggcaaaacagtaagggattactttctcgacctgtctgggggaggcacagaacaaatatttcatggcttttaaagcaattaaataggacgcaggataccaaaagacttcctaaaatatcaaatgtttcaggacacacgacaccccacaaaagtcttgatattgagagagaattaaaaccgatcacaaaaaggttttttaactcgtactttaagcttttagaacactataatgctggcacaatgcctgaaaaacatccgctttatgataaagaattgctagaactaatagcccaaaaaaaagggataaaaggcagtgacagagttgcccattttgctgcgttttcaagagcagtacaacccagctcagggcataaaaacaaccccatcacaaaaatagcaatgatgctgtgctatttgtttacgggaatgaatacaacgcctttagctaagatgaaaatttcagacgttaatttcaaagaggtgcagggtggaaagtacattctgaattccgtgaaaggtagagctcaacaccaagagcaagataacgcacttggtttcagtaaacacgcaaaggacttcattgaaagctggttaaatgtagctaaaagcatggcaaatggtgatagcaacagccctctcttcccctactatagtaaagatggtcagataaagctttactctgaaataggtagttccccccatgcaagcatcaacaaactattgaccagactggacttccctaaaataaccccttcaatactcagaaaaaccaaaatggacactctgtttcaagcaacagagtctgtttatcttgttgcaatgtcggcaaacaacagcattaaagttgtttcatcacagtatttatatgggacatctggagagcacgaaaaaaaattaaatgcggcaatggatgctaaattttccaacgctaaaggcgttgatatcaacaccgcagttgaagaggctaaatacaaacattcaaacattcttgatcattatgagtatgaagcactgagagagggctctaacaggtctcatgaagcaagaacccctacagggatacgttgtaatgataataaacaaggtgctgtaaaaaccataaataaaatgctagagcgtatcggagttgaaatgaattctgatgaagaagcttgcaccagctttcttgattgctttgagtgtgagcaccattcattggtctctgatgtaacagatatatggctaatgatgtcattcaaggaaacattacaagagcttgaagtaacacctgcaattaactcaatgccacctaagaaaatgaatacactattaaacaccattgaaactattctaggaggatttagagataaatctccagaaaattataagcaagcctatgagctacaaaaacaaacatcacaccccttgtattcgaatatctacagtctaaatgatctgcatgaggtgttttcatga

SEQ ID NO: 399732 - DNA, 1530 bp, Salmonella enterica
atggcaatcgtatacgagatcaaaacaacagaaataaaaccattcacgtatagaacccctctaattacgcctgatgaaaatggtgaactatctattaaatactctcgacaacaacctaagcatattaaaaaggttgttttgttgaatttggttggtagaaacactaatggcgatatagtctcatacgaaccaatggaacaagttaatcgctttttactagcacaccacctaaatgacaataagcaagagtcagaacaatacagtaaaggcttagttcactacttttcattcttattagaattacagcgcttgtgggactctgaatacgacgaagacctttacgaagaatttattgatctgcctagacctagctgggataaattcccatttagaaaaagtgataaagctacgtaccaataccgagaggctctaataaaggctgtacttgagcctgacaccccaaaccatgcgatagccagaactacagcaattgcatatatgggtgctgtagttaagttttactctttccacattagaaatggctacaagtttaacaatcctccctttgagcacgaggttgtttctatacaatatcagggaggcagtacaagcatcggtgcctacttgagtaaagatatacacacaacagatctgcggttgaatttaggaaaatctaaacgtaatgacggtggcgcactatcatcagctagacgagatttaaaacccctaacaaataaagaatggcttgccgtagaggatattctcaccaatacacgtcgagttatcaaaaaagttgctggtgaaacaactacttccaacttatcaattgaatattgcctgttctttcttgtcgcacgatacacagggcttagaaaggaagaagtggctagccttcacaaaggtcaagtggcaaagcctggtgaagataagaaagcaatgaagcttggtgttggcggtcaatacggctcattaacaaaaaccgctggatcaggtaataaatctaggcaaacaatcatccccacccgaattatgcaccttttgtacgaatacactagaagtgatagatataagaagcgtatctcgaaattcaaagaacattgtgaacttaagcgtcaaaaaggcgaactaggatactttgatggggaggatggagtagatgatacaaaagagtatttattcattagccaaactggtgtcccacttttcactaaacttcccgaggccaacgccagatggaatgaaattagagccactgtaaatatattgtctgggtttaacctaacagcaactatacacaatcttagagctacatttgcggtatcactttttaggctccttttgaggcgtgtaactcctgacaaagcacttgctttagtgagtgagtgccttgggcacggtgaagagtccgtaacgttaatataccttaaaatcgctcaagacgaacctacaggcgatgaaatttatgaagatatccttgaatttataggtgcatttgaagatgctgatataagtggtatggagagccaataa

SEQ ID NO: 399733 - DNA, 942 bp, Salmonella enterica
atgccttccctgagtgaactacagcagaatgcaaaaacagagcttaacgcggctctgacgcaggggcttgacgacctcagtcgctttcaggtggttacgtttacgaagtatatccggaaggttcttccgcttgatggattcgtgttctgggttaaagcctcagtcctgtctgataacccgggcaacgaacccgacacggtaaacgtcaaaggctaccttcatctgacgacagaaaccatccaggacgatgaacaactctacgaccgcaacgtcgttacgtttactgcgcaggccgatatagacccattcaacgatattgggtcggacgtcctgtacatcggcgagttctttggcattcagttttctttctcccgtcgaaccgggctgaacgaaccggccaatctttatcactacacaggggaggcgatctatccgcatatgcggtcgcagattatcaactctgcggatgatatcgacctgagtgacgttgtggtttccagttcgttgcctgtatggcttgggctgagtcagtttatgccaatgtttccggcgatgctttccacgcagaacctgtcgcctcccttcgcgacaatacggtgcagcaatgtctctccgatcgccggggcgttttatatcgatgaacgcgacaaccagtaccagctggtttccgaggatgtgacgatttcgattacaggcctcaggaatgccgtggttgaggactttctgcgatatgttcagcagtacaccctgcgcgatgatgcagaaatgggcgtaatgaatattcctgtgatacaggatgagcgcgtcacgcagaacgagctcaacattatcgccatgcggaaaaaggtcaaattcaaagttaattactaccagcagcggatgaggaacgtcgcccgcaggctgatcacgtctgcaattccgtccatttatgtggagaaataa

SEQ ID NO: 399734 - DNA, 435 bp, Salmonella enterica
atgatcacctttcatcttggcgttatcgacattccctacgaggatgaaaacaccacgaccggggatgttgctgagtacctggaagaaaaataccagattatgcagaccttttttgacaggtacggaaacgacatcgccgacctgatgagtaaagacctcgccgcaaatcttgaaaatatgctggctggcgcgccgccgttaagggatccgcttgcggaatccatgtcacgcgttcacgacctgttcgtggcctttctggataacgaagagatgaacggcatgtcaggtgtgccaacccgacgcgcgctgctgggtatatctaaacgcttcaaaaataagaagggcgatccgcgggcatcctttatcgatacaggaaactatcaggcggcaatgcgcgcctgggtaagcggggtattaaatgccttccctgagtga

SEQ ID NO: 399735 - DNA, 429 bp, Salmonella enterica
atgagcgtaaatctggctgcattcatcatattcgttcgcacagatatgggcgtaaccgccagccaggttccttatgactctccgtcctttgttgttgcgtataacgcggccgtggaatgggtgaaccgggatattgaactggttatgcccagcctgtatgaggttgccgtttacaatcttggcgcatcgtttctggtcaactacggtactgagtcggtatttgctgaattcaggaaagagtatgggctgaatgatttcaaggctggcgtgataacgggggccggggataactcaaccagcgcgcagcgtcttgtgcctgacttcttcaaagatttgtctctggccgatctgcagatgttgcaggacccttggggacgccgctatctgatgattgcccagcagttcggtagcctgtgggggctgtcatga

SEQ ID NO: 399736 - DNA, 483 bp, Salmonella enterica
atgaaactgtatatcgccaacaccactaaacagcgtcatatcttcacctatcgcaagctggagacagggagacttgttcagatccctattgagcacggcgcacaaatgatggttcttgatggctccaccgaagaggttgacgcggttattcagcaccatcgtgtttatggtctggttgattcgacaaaaattgatcagagtaaagattttgtcggtctttgctacagcattaacaagcctgtttcggcatcggtaatcgagaaaactattcgcgacaacgatgttcatttgacacgtaacgctcacaacctccggcaggcatcaattattgctcacgacagtacgctgcgaaacagtggtacgggttacgacggtgatatggaattcagcgttgagcaggccagaggccgtgatgaaagcgacgaaactcaggtcgttaacgagacgattgttactccgaaagccgggaataagaaaaaatga

SEQ ID NO: 399737 - DNA, 558 bp, Salmonella enterica
atgaaatactcacagcaagaaaaactgcagatccaaatgctctgtgatattcaccgcgcactgaaaattaaaaactcttttgatcctgacttcatcgatgaggcagttagcactgatagctactgggccttgagatggaagtacccgagtctagatgatggtgaagaggatccagaggaagtacaactgtttgttgatacgtttgatatgtatgaaatacttcaatatacctacaaccacttcagcgatgaggataaggcagatgttgcagaatcaattcctcatttcaatggtgaggcatccttagctttccctggctttgatggtaataacgaaacaaattatttgactatcggtggcatgcttaagcgtatggggcgcttctcaggcaaggaagagttaacgaagaattcccacatgccttcagttgaaatttatcgccgtatgcttgaggttttcttacctgctcgtgcaaaaaactggatacacgatgtaggtatcacaaaacaagattttatcgatacactcaacgcgagagtgcatccagaaaatcgttaa

SEQ ID NO: 399738 - DNA, 720 bp, Salmonella enterica
atgacaactattaacaagcatgggttatctagaacaattccagaaccagtcaaattggaagtaagacagcgctgtgggttcggttgtgttgtttgtgcttctcccattgttgagtatgaacacgtaattcccacatacgctgatgcaaaggagcactgtccaaatgcaatagcactactttgtcccacgtgccatgcaaaagtaactaaacgtctttactcaaaagagaaaataatcaaagcaatggagtctcctgcagccttacaaaaaggaaaggttgctgatatattggatttttctgataggcatccaacaataatatttggtggtgcgacttttgaatcctgtactgtaccgataatgtttaaaaatgagccattgttaactattgaaaaagaaaataatgcctttcttatttcgggtagattttacgatagtcaaggtgttgttaatcttgaattagttaagaatgagtggatttgtagtgcaaaacattgggatgttcaggtcgtgggtccaagaataactattatagaaaaaaagaaaggtcctcgtttaattattaaagttgatgcacctgagagattgattgtggaaagattagatatgttggttaaggggacaaggattgtaggagatgaacacaagctaagagtaggttcacatcaatttcacaactgtggggcttcaaattgcaatgttggtttctgtttcggataa

SEQ ID NO: 399739 - DNA, 1083 bp, Salmonella enterica
atgaaaaagaaaacccgctttgcctttaacgcttacctgcagcagttggcgcgcctgaacagtgtggaggttgaagaactctctagcaagtttaccgtggagccgtccgtgcagcagacgctggaagaccagatccagcagtccgccgctttcctgacgctgattaacatcacgccggtcactgaacagtcaggacagttgctggggctgggcgtgggcagcaccattgccggaaccaccgataccaccaccaaagagcgcgagcctaccgatccgacgctgatggaagacgtggaatacaaatgcgaacagaccaactttgatacggtgctgacctacgcaaaactggacctgtgggccaagttccaggacttccaggtgcgtatccgcaacgccatcgtcaagcgtcaggcgatggatcgcatcatgatcggctttaacggcgtgaagcgcgccaaaacctcaaatcgtgctgaaaacccgctgctgcaggacgtcaataaaggctggttacagaaaatccgcgaagacgcgccggatcatgttatgggcagtaaaaccgcagaagacggcaccactactgcggagccggtaaaagtaggtccgggtggtaagtatgtaaaccttgacgcggtggtgatggatgcagtcaacgagctgatcgatgtggagtatcaggatgatgacgagctggttgttgtctgtggtcgtgaactgctgtctgacaagtatttcccgctggtcaacaaagagcaggacaacagcgaaaaaattgccgccgatatgatcatcagccagaaacgtatgggcggcctgcaggctgtgcgtgcgcctttcttcccggcaaatgcattgttaatcaccagactggataacctgtccatctactggcaggaagacacccgccgccgttatgttatcgacaacccgaaacgtgaccggattgaaaactttgaatccgttaacgaggcgtatgtggtcgaggactaccgctgcgcggcactggtggaaaacatcgaaatgagtgatttcactccgcctgccgcacctgttgtagccgcagagtcaggaaatggagagtaa

SEQ ID NO: 399740 - DNA, 2160 bp, Salmonella enterica; identical to SEQ ID NO: 379348

SEQ ID NO: 399741 - DNA, 2001 bp, Salmonella enterica
atgtcccgtaaagaccttgccaatgcgattcgtgcgctgagcatggatgccgttcaaaaagccaattccgggcaccccggcgcgccgatggggatggcggatatcgctgaagtgctatggaacgattttcttaaacataaccccaccgatccgacctggtatgaccgtgatcgttttatcctttccaacggtcacgcctccatgctgctctatagtctgctgcatttaaccgggtatgacctgccgctggaggagttaaaaaacttccgtcaactgcactctaaaacgccaggtcacccggagattggctatacgcccggcgttgaaaccaccaccggaccgctgggccaggggctggcgaatgccgtcgggctggcgattgccgagcgtacgttaggcgcacagttcaaccggccggaccatgagattgtcgaccactacacctatgtctttatgggcgacggctgtctgatggaggggatctcgcatgaggtgtgttcgctggctggtacgctgggactgggcaaactgatcggcttttacgatcacaacggcatctccattgatggcgaaaccgaaggctggtttaccgacgataccgccaaacgttttgaagcctaccactggcatgtcgtacatgacattgacgggcacgatccggaggcggtgaaaaaagccattctcgaagcccagagcgtaaaagataaaccttcgctaattatctgtcggacggtgataggttttggctcgccgaataaagccgggaaggaggagtcgcacggcgcggcgctgggcgaagaagaggtggcgctgacccgccagaagctgggatggcatcatccggcgtttgagatcccaaaagaaatttaccgcgcgtgggatggccgtgaaaaaggcgagaaagcgcagcagcagtggcaggaaaagtttgctgcttatgagaaggcttatcctgagctggccgcggagtttacccgccggatgagcggcggactgccggaggcatgggaatccgccacgcaaaaatttattaacgacttgcaggctaatccggccaaaatcgccacccgtaaagcatcgcaaaatacgctcaatgcctacggtcccctgttgccggaactgttgggcggatcggcggatctggcgccgagcaacctgactatctggaaaggttcgacctcgttgaaagaggatccggcaggtaattatatccactatggcgtgcgcgaattcggcatgaccgccattgctaacggcatcgcccaccacggcggctttgtaccgtataccgccacgtttctgatgtttgtcgaatatgcgcgtaacgcggcgcgtatggcggccttaatgaaagcccggcagattatggtctatacccacgactccatcggtttgggcgaagatggcccgacgcaccaggccgtggaacaactggcgagcctgcgcttaacgcctaacttcagcacctggcgtccctgcgatcaggttgaggcggcagtcggctggaagctggccattgaacgtcagcacgggccgacggcgctgattctctcgcggcagaatctggcgcaggtggaacgcacgccggaacaggtgaaagcgattgcccgcggcggttatattctgaaagatagcggcggcaagccggatatcattctgatcgctaccggatcggaaatggaaattaccctacaggcggcggaaaaattgactggcgaggggcataacgttcgcgtggtgtcgttgccttcaacggatattttcgatgcgcaggacgaggcatatcgcgaatcagtgctaccggcacacgtaaccgcccgcgtcgcggtggaggccggtatagccgactactggtataaatatgttggcctaaaaggcgcaattatcggcatgacgggatacggtgaatccgctccggctgacaaactgttcccgtattttggctttaccgtggaaaatattgtagaaaaagcccgccgggtgctaaacatcaaaggctaa

SEQ ID NO: 399742 - DNA, 558 bp, Salmonella enterica
gtgaaagagaatcaaatccgagaactggttaacgagctgcgcgatattgctattgagtatcacggcacacaacagttacgtgaacgaattgcgcgtacagttcgcgccgccctgcatcatgacttagaaaaactaaaccaacctgtaagccaaacttacaacttgccagaattaatcgaaggcatggaggtgtccattgatgtcagcacttgtgatgctgatgccgggaatcgctatttcggtactgtcaacgaggtatcagaacttgattcagctaagaacggttacatccttctggttcaggacgcaaagccaaatttcgatgtgaatggcaactctccggtaagtccgggtggttggataaactgtagtgagcgaatgccagataatgatgaatctaaacccatcgcaatttttaccggaaaatgtctgggtcaggggatgttcgttgctacatacgacgatgatgggttctttgactattgggagggtatggaagttatcggtgtaagccactggatgccgctgccagcagcaccagaaccagatcagagctaa

SEQ ID NO: 399743 - DNA, 615 bp, Salmonella enterica
gtgaaagagcgcggaatgatttttaatgccgagatggtgaacgcgattttatccggtcgcaagacgcagacgcggcgtcctatcaaatggaaacagacgcggttcactgaaattgccgaacgtgatgatggttcgctgtggccgtgggcggaggattgtgaacgcggcggtgatatctggtttacgtgtccatttggcgaggtcggcgatcgcatctgggtgcgcgaaacgttccgtgtgcatagccgggcaacggatgtcgccacgctggtctaccgggccagtgtccgaaactcctggactgagcaaactcatcgcgttccagttgcggtttgcaataaaccggccacaccagagaagtggacgccgtctattcatatgccgcgctggtccagccgtatcacgctggaaatcaccgatgtgcgcgttgagcgccttaactcaattactgaatccgacgccgaagcagagggagtaactgatacagggtttggtgttttgctcgttgatggtttccgatatctgtggaaatccatctacggcgacgacagttggcaggctaacccgtgggtgtgggtgattgaatttaaacgtgttgaaggcggtgcagcatga

SEQ ID NO: 399744 - DNA, 273 bp, Salmonella enterica
atgaaaatcgatttagatctcaaggcccagggtgttgacgtttcaaccagtggttatcgcaactttgtgaacgccgaagttcgtggcgttgaacttgaagatgtactggaagatatcaaaagcgatgtgctgttctccgctatcgacctgtctgattacatcgactgggctgacaacaacagtaagttaccggagattctggaccgtctttcgcctgatgaagttatcagttggctccacgaaaacgggcatctggaggataacgatgattga

SEQ ID NO: 399745 - DNA, 339 bp, Salmonella enterica; identical to SEQ ID NO: 31407

SEQ ID NO: 399746 - DNA, 1335 bp, Salmonella enterica
atgagaattaaaaagcctcaccttcgtccgatagtcataaccttgtccgttggtggtattttgttgacttctatttttctgattgtcgttattatggtttttaaacgcgaaaatatagaaaaagacttgcttgatgctaattcatcgtacgctatgaaaatgtcagatgtaatgagtaattatattgaaattgctcaacgtgaattggcgtatggcgcaaaaaaaatagagtcaactaatgatattgactcacttaaaaatgaggcggataggttaagattgcagtctggtatgtttaattcagttcttgttgttagtgatggtgctgttgttctggcgacttcgccagaatcacttggtttagttggagttcacttgaattcaagtgccagtaagttggcgattgaggctaaaaaaccatttatatcggcaccttacaaatcagcttctgggaatttgattatttttttgtcacatcctatttatgataagaatagtaattatatagggtatgtcggcgggtctatatatctaaaggaacagagtttatttagcgacgttttgagcaggcattttttcaaaagcgacactgaaattagcattgttagtgatgatggaaatgtgatctttaataacgataacagtgctgttggtcgaccaatggttatggatgataatttgaaatcgaagttaacttcgtctgagagaggtgagggtatctttttttcttcggggaataaatatcttcttggttatgctcatatgaaaaatactgcttggagtgtgttggtttatagtcacgctgacagcgtgactactattcttattacttatgctaagagtgtacttgttctgctaattgtaatagttattacattttcacttttttcatatttcattgcttcccgtatttcaattcctttagaaaagcttgctatatctaccaatgctaaagatatagggggttcgctagttgatattaaaggtatcaatgcttggtatgtcgaagccgaccgactaaaaaaggcactttttacgcatattaagataatgatagaaagagttgattctctaaatgaggtggcgcttaaagatcccctaaccggcgtgaacaacagactggggttttcaaataaaatacaaaatcacaagcagggttcaggggcttcagttattgctattgatgttgatttttttaaaaaaataaatgataacttcgggcatggggtcggagatgaggttcttgttactttggctcaggttattaattgcggttttcctggcctgggcaggttcccccagtcgcgggggcagccggaaagaaaacctgaatga

SEQ ID NO: 399747 - DNA, 612 bp, Salmonella enterica
atgcaactgacgctccagatagtcatcaccgatgaatcaggctccagtcgaacggaggaactgatgacaatccagaaatcaggggagacccggaacgacatcggattatcggtgtcagaatccaagctgttgctgaatacggtccagcagtcggtggtccagctgcaggcagacgaatatactcaacaccatatccggtgccctcactgccttgctgcgcgcagaatcaaaggcaaacagaaaatacggtaccggacgctgtttggcgttattccggtatccgggcttcgggtgtaccggtgccgttgtgaagagagtgatacaaagacagtcagtttgctcagcgactgggccggcgattattctcacccggcactgaaatatattgaaacccgctgggcctcgatgatctcctatgaaatgacgactcgtctgctgaaagatattctgccggtgggccacagcctgaatgcctcaacggtgaggaatcatttatgccaggtggcgcagcgtcttgacgctgaggctgaagctcattcaggttttctttccggctgcccccgcgactgggggaacctgcccaggccaggaaaaccgcaattaataacctga

SEQ ID NO: 399748 - DNA, 573 bp, Salmonella enterica; identical to SEQ ID NO: 21679

SEQ ID NO: 399749 - DNA, 546 bp, Salmonella enterica; identical to SEQ ID NO: 109948

SEQ ID NO: 399750 - DNA, 258 bp, Salmonella enterica
atgcctactaaaaataagctcctcagtattctttcggacgccgagcaggaagcgctctatggtctacctgatttcgatgatgcacagcggctggagtttctggcgctgaatggatatgaactggcgctggcctgcagtcgccgggggcttcacgctcaaatttattgcatcatccagatcggagagcatgaaaaacctcggggcagccatcgaatgatgccatctacaggggttaaaataaccaccatcatttcataa

SEQ ID NO: 399751 - DNA, 615 bp, Salmonella enterica
atgttcatcggatatattcggatgtcaaaagctgatggttcgcagacgaatgatttacaacgtgatgcactgatcgccgcaggtgttgatgccgcacatttttatgaggaccgggcatcgggcaaacgagaagagcgtcctggacttacagcctgtctgaaagcactacgacccggagacacgctggtcgtatggaagctggaccgcctcggtcgtgatcttcgtcatctcattaatacagtgcacgacctgaccgcgagggggaccggtctgaaagtgctgaccggtcacggggcgactatcgacacaacaacggccgctggcaagcttgtcttcggtatctttgccgcactggcggagtttgagcgcgaactgattgctgaaagaacgactgcaggtctggcatcagcaagagcccgtgggcggaacggcggccgaccttataaaatgacgccagtcaaactgcgactggcaatggcatcaatgggacaatcagaaacaaaggtcagtacgctatgccaggaacttgggataacccggcaaactttgtacaggcatatttcccctgttggtcaactgcgggcggacgggatcaagctgttcaaccgtggataa

SEQ ID NO: 399752 - DNA, 657 bp, Salmonella enterica; identical to SEQ ID NO: 21682

SEQ ID NO: 399753 - DNA, 192 bp, Salmonella enterica; identical to SEQ ID NO: 21683

SEQ ID NO: 399754 - DNA, 165 bp, Salmonella enterica
gtgccggcctccgaactcgctgccgccaataagcaaattcgcgaactccagcgccttctgggcaaaaagacgatggaagccgagatactcaaagaggccgtggagttcggccgggcaaaaaaatggattgcgcatgcgccctcgttgcctgggaacgacgaataa

SEQ ID NO: 399755 - DNA, 825 bp, Salmonella enterica
atggcggtggctgacctgccgacgtatggttatcgccgtgtgtgggcgctgctgcgacgggagtcggagcgggacggcctgcctgtggttaatgcaaagcgggtgtatcgcattatgagaacgcataatctgcttcttgaacgtaaacccgctgatccttgccgtaagcgggcccataaggggcgcgtagcagtagcggaaagtaaccggcgctggtgctcagatggctttgagttccgctgtgataatggcgaaaagctgcgggtgaccttcgcgcaggactgctgcgacagggagatcattgattgggcagcgagcaccggaggctatgacaaagaaacggtgcaggatgtcatgctgggtgcggtggaaaaacgcttcggaaggcagttgccaacagtgccggcgttcgcccggttgctgggactggagccttgtacgacagcagtgcgaagcccggaaagcaatggcatagcagaaagcttcgtgatgacgataaaacgggactacatcagcatcatgccgaaaccggataattcttgctgccgtagtgaagatattgtttgtcggtttggtggagaagagtttgttgtttttctgccgaatacatctgtggtaacagcggagtgtgttgcggagcgtattaggagtgttattgaaagtactgttttccctaataacttgcgggtcaccgtctctgctggtgtggcaacacaagaggatcctcttggtgggatcgattttttgctgaaaaatgctgatgatgctctttatcaagccaagggagaggggcgtaataaagtgattgtatatagcgctatttga

SEQ ID NO: 399756 - DNA, 279 bp, Salmonella enterica
atggagccgtttccgttcctcgcaggcaccgctggcgcgctggtcggcgagctgaaaaaagcgcatattccgtatgcgataaacgcggacacacagttttatgacggcgaagaaggagcgtggcgtccggcgcaggagtccctgctcaatgcgatgatcgcgccggaatgtgaaacgcccggcaaaaagccgggcgagggaaatgttaaaccgtctgtccctgatgcgatatccgtgacgccagcggcagccagcacgccaggatcagcaaccccataa

SEQ ID NO: 399757 - DNA, 492 bp, Salmonella enterica; identical to SEQ ID NO: 379319

SEQ ID NO: 399758 - DNA, 300 bp, Salmonella enterica
atggcgataaccgagcaggttctggccgcgcagcagcatctgcagtggggttttgggcatggcttttttcagttcgcgcaggcgcagccacgggtcttcgccgagaaagcggatacaggcgtcaaaggtggcgccgccccagcactccagcgagccgtagcccacgtcatcgagcgcggcggcaatcggcagcatgtcatcaaggcgcaggcgggtggcgaaaagggactggtgggcgtcacgcaggacgacgtcggtaatggcaatggtcatggattcctccgggaaattaagcgttaa

SEQ ID NO: 399759 - DNA, 213 bp, Salmonella enterica
atggcacgtacacgcgccctgcgccgccaccatgagcggcgtttgaaagcaatccgtaagtattataataatgctggaagtcgttcgctgacgcatgttggcatggtttaccacaccccctgttcgtgtagttgttggatgtgtggaaatcagcgtaaaaatcatgggatgaaccggcaggaggttagagcccgcctgcgttacaccgattga

SEQ ID NO: 399760 - DNA, 255 bp, Salmonella enterica
atggtattgcaggtgcttttcggtctgaagaaaaagcataaacctatgatgttcgaattggcgttgctgcgtggttaccctgttatggatagcattgatgcggttatgtgcatattgatgaagaggccagggatgaaattgcgctatacagagtggtcggaactcataagcaggggcattgtgcccccgttattgatggagtttcgagaatggcacgtacacgcgccctgcgccgccaccatgagcggcgtttga

SEQ ID NO: 399761 - DNA, 1791 bp, Salmonella enterica
atgaacgttaaacctgagtatatgtcctttggagaattatttaaaaatagcaatattttttatacgcctacatatcaaagggattattcatgggaagatgaacagattgaacaattttgtaatgatatacaagatgcattggtaaagaaaaaatcaaagaaaagttgcgaacatttctttggaggggttgtctgtgcgcaagaaaagacatttggaggacacagaaggatagagaatctattagttgatgggcaacaaagactatcaactatagtacttttcttttctgttattcgtaacgttattaattctcttaattgtgaggaagataaagattcagaatatagagggatgattttaaaagatatttataaatatttttatcttgatgaaagagaaaatcgcgaaattaaaaaacatgtaagaattacaataggtaatgccgataatgagttctatcagtcattaattgacgataatccattaaaaggcactaggaattctcatgaattaatgctaagggctaggaaaaaattcaattcctttattaaggatgatttatttaaaaacagaaaaatctctgagtgcctggaaattattgatgatatagtcaagttgtttgaagaatcttttttagtcattcatatagtaaccaatagtatcgacgacgcctacaaattgtttactgtgctaaatgatagaggtattaatttaactgaaggggaattgcttaaagcacacacaataggtatatgcagtgataatctttcgcatcagcgaactatttctgataattgggatgccatactcaaacacccatcaaagaaagtcaccgattatttgagatggattttaattatgttgactggaaataatattacagcatcctctgttttagaggaatataaaaaaacggtctttaatgaactaattagtaaatcagaaatagctcagacagttgcttatattagagattgtgttgaacgactggagtatatttcaagtggtgagtggccatttgaaaataataatgataataaatggcataaaagtaaactggaccttcttataaataaattaaaacatctacatgcaatgccattattattagctgcaagtttttcatctgagaataactttaaacatattgtaaatgaaacgagtaaatttttcattagatgtaaaatgattagcgacttacatgcaagtattttctctaaattatatgcagtgttagcactaagaatacataaagaacgtgatagatttgatattagtaagttacatggtgcttttaatgagatactcttggataaagaccctgaagatgtaaggtttagtactaatgttaggagtttgatttaccaaaaaaaaggggataataaaccaataaaatgtttgttaatgactattcaggaaaattgggagtggttaaagcaaccgtgtcaaggtaatagcctaaaccggttgaagagagaagaccaaactataattttcgattttaatagtatgactcttgaacatatatatccatactcagcgctacatgaggataaagatatggatatggaaaaattaaaaaataacattggaaatattgttctcttagatccaaccaggaataataagaatgacaataaacctttcatagataagaaaaattcatttgaaaatacagggattggtattcattcatggatttatgaacaaaaggaatggaccgaagagtctgtgaaaaaacttactgagacgtatgttgatgctgccgtaaaagttttttctttctcttag

SEQ ID NO: 399762 - DNA, 363 bp, Salmonella enterica
ttgaaacggcatctgtgtctggggttctcagaacctgtttcgctcaatacctggccgattgcctgtagcgacgggcagctccatgagatcaaatgtgggatttcttccaatagcggggaaacgttaaaacaactttgcctgaacggtaacggcattgcatgtctttcagattatatgattgataaagagatcgcgcggggagaactggtggaactgctggccgataaacgtctgccggtagaaatgcctttcagcgccgtttactacagcgatcgcgccgtcagcacacgtattcgggcatttatcgactttttgagcgaatatataagaacagctcccgcaggagctgtgaaagaggggtaa

SEQ ID NO: 399763 - DNA, 435 bp, Salmonella enterica
atgagcaacatcgacaaacaggcgctgcgtgaagcggctgtagcaatagagacagtagcaacgccgcagaaattgcttgcgtttcgtgtgaaggttacaccgcaggttgtgctggcgctgctggatgagaatcttcagctccaacgggaaaaagacgcaatagaggccgtggcacttgcgctgcgtgatgatatgcgacaggcgcgggagcaactggaagcaggatggaagcagaacgctacggacgttcaaatcaaggccagactttgccgggagagcaatagcctgcatgacaggctgcgtgaagcagagaagcgcatagcagaactggaggcgcgggaggtcagcgtttctgagattcgcaagaataaattcatcgagaaaactgaggatgaacttgatggagaccactacactatctgtaaaaatggatga

SEQ ID NO: 399764 - DNA, 471 bp, Salmonella enterica
atgatgttcaactggaaaacgatgtttgttggcctgttgctcgtctctctaattgttgtcggtcggctggctaatcactaccgaaataacgccatcacctacaaagagcagcgcgacaccgttactcataagctgacactggcgaacgcgacaattaccgatatgcaaacgcgccagcgtgatgttgctgccctcgatgcgaaatacacaaaggaactcgccgatgcaaaagctgaaaatggtgatctgcagcgcaagcttaataatggcggccgggtgctcgtcaaaggccaccgtccagtgccagccacaaccgaaacctccagcccctccggcgtgggctatgatgccaccatcgaactctctgacgttgctggacgaaacgttctcggtatccgatccggtatcaagcaagaccagacagccctgagagctttgcaggactatattaaaacgcagtgcttgaagtag

SEQ ID NO: 399765 - DNA, 756 bp, Salmonella enterica
atgactgaagcacaaagacatcaaatactgctggatatgctggcacagttgggctttgttaccgtcgaaaacgtgattgagcgtctggggatctccccggcgacagcgcgccgcgacatcaacaagctcgacgaaagcgggaaacttaaaaaagtgcgcaacggcgcagaggccattacccaacagcggccccgctggacgccgatgaatctgcaccaggcgcaaaaccacgatgaaaaagtacgcatcgcgaaagcggcgtcgcagctggtaaacccgggtgaaagcgtagtgattaactgcggctccaccgctttcctgctggggcgtgaaatgtgcgggaaaccggtacagatcattaccaactatctgccgctggcgaattatctgatcgatcaagagcatgacagcgtgattatcatgggtggtcagtataataaaagccagtcgattaccctgagcccgcagggaagtgaaaacagtctctatgctggccactggatgtttaccagcggaaagggcttaaccgcggatggcctgtacaagaccgatatgctaaccgccatggcggaacaaaaaatgctcagcgtcgtcgggaaactggtcgcgctggtcgatagcagtaaaattggcgagcgcgcgggaatgctgttcagccgcgccgatcagatcgctatgctgattaccggcaaaaatgccaatccgcaggttttgcaacagcttgaagcccagggtgtaagcatactccgcgtttaa

SEQ ID NO: 399766 - DNA, 546 bp, Salmonella enterica
atggagatcctctacaacatctttaccattttttttaatcaggtaatgaccaatgccccgctattactgggtattgtgacctgcctgggctatatcctgttgcgcaaaagcgtcagcgtgatcatcaaagggacgatcaaaaccatcattggcttcatgctgctacaggccgggtccggcattctgaccagcacctttaaaccggtggtggcgaaaatgtctgaggtttacggtatcaacggcgcgatttccgatacctatgcttcgatgatggcaacgatcgaacggatgggcgatgcgtatagttgggtaggctacgcggtgttgctcgcgctggcgctgaatatttgttacgtcttattgcgacgcattaccggtattcgcaccatcatgttgaccgggcacatcatgttccagcaggcggggctgattgcggtctctttctatatcttcggctattccatgtggaccaccattatctgcacggcgatactggtttccctgtactggggcatcacttccaacatgatgtataagcccacctag

SEQ ID NO: 399767 - DNA, 966 bp, Salmonella enterica; identical to SEQ ID NO: 388178

SEQ ID NO: 399768 - DNA, 633 bp, Salmonella enterica
atgaacgatctagaattaaagaaacatgatgacgctataaaattagaaaatctcaagttgaaaattgatatctggaagacagttgttgacgttcagaaacattttaatgatcttgagatgaaggttagaaacttcggaattttgatcttgtctgcatttattggtgcaattggtgtaagctttaattccggcgctgaatttatagcctttggcaatcattactctgttgctgccattcttgctttcggggcatctgttgtttggttgttattttattttgttgacgtttactggtatcacccattacttcttggagctgtaaagaaaggttcagaactcgaaaaagaaattgcatccgacatcccaggaattaatcttacagaaaccataggaaaaagtagcccaaaagatattttgctctggaaaaatatgcatagtactggaaaagctaaccttttctactttggggttttagctgttctgttaactatttttatttctctactgtgctttaaagccccgcaaaagacaaatcaactaaatgaattaaatattaaagcaaattgcactagaaacagtaattacaatggagttaattgcattatcgcatcacagccaagtgacaacaaatag

SEQ ID NO: 399769 - DNA, 246 bp, Salmonella enterica
atgatgcgctgccctttctgtcgtcattcagcgcatacccgcaccagccggtatgtgagtgacaatgtcaaagaaagttatctgcagtgccagaatatttactgttcggcgacatttaaaacgcatgagtcaatttgtgccgtgattcgttctccggtcacggaggaaaaaccagcaccggcaagcacagcaccggctgttgtccgaaaagttaaaggctgttacagctcaccattcaaccattaa

SEQ ID NO: 399770 - DNA, 267 bp, Salmonella enterica
atgcaagctgttttttcttccccgtctcccgcccctgtgacgccactgatgccgctgccggacatcacgcaggagcgttttttacgtctgccggaagtgatgcacctgtgcggcctgtcacgctcgaccatctatgaactcatccgtaagggagaatttccgccgcaggtgagtcttggcggtaaaaatgtggcctggctgcactctgaagtcaccgcatggatggccgggcgcattgccggacgcaaacgggggtacgacgcatga

SEQ ID NO: 399771 - DNA, 363 bp, Salmonella enterica
  misc_feature (245)..(254): n is a, c, g, or t
atgaataaaatacatgttacatataaaaatctcttacttccgattaccttcatcgcggcaactctaattagcgcctgtgataacgataaagatgccatggcggaagctgaaaaaaatcaagagaaatacatgcaagaaatccagcaaaaagagcaccagcaatcaatgttcttttacgacaaagccgaaatgcaaaaagctattgccaatatcaacgcaggtggtcagataaggcgacggcagannnnnnnnnngccaatatcaacgcaaaaggtggagccaatcttgcgattattgaagtccgtttcttcaagggcgggtattcattcattcgacagagcgttaacacccctgctaaagtag

SEQ ID NO: 399772 - DNA, 300 bp, Salmonella enterica
atgtcaaacacgataagcgagaagatagtcttaatgcgaaaatcagagtatttgagcagacaacaacttgctgatttaacaggggttccgtatggcacgctgagttactatgaaagtggtcgttcaacacctccaacagatgtcatgatgaacatcctgcagaccccacaattcaccaaatacactttatggttcatgaccaatcagatcgctcctgagtccgggcaaattgcgcccgctctcgcacactttgggcaaaacgaaacaacgtcgccccactccggtcaaaagactggttaa

SEQ ID NO: 399773 - DNA, 276 bp, Salmonella enterica; identical to SEQ ID NO: 12778

SEQ ID NO: 399774 - DNA, 360 bp, Salmonella enterica; identical to SEQ ID NO: 388124

SEQ ID NO: 399775 - DNA, 792 bp, Salmonella enterica
atgaaaaaggttatgttaagcgctctgttactgtcgttacccttgctgggctacgcgcaggaacggttcccctccccggaagcggccgccagcgccttcgccgcggcggtagccggaaaaaacgaaacgcagcttaccgcgctactgggcgatgactggcggcaatttctgccgccggaaggtgccgatcccgaggccgtggcccgcttcaatcgtgactggcgcgaaggccatcgcattgtacaaaaagacaatacggcgcacctgaatgtcggacgagaagactggcagctcccggtgcccatggtgaaagagactggcggctggcgctttgatatggcggcagccgggaatgagatcctcacccgtactattgggcgaaatgaactttctaccttacaggccatgcatgcttacgttgatgcgcagcaggattattacttacaaaaccatcgctgggcgcacaggataatcagtagcgaaggccaaaaagatggcctgtactggccaaccaaagcaggcgacgtccccagtcccttaggcccaaactttagccccgcagcgccagacgagggttaccacggctaccatttccgtattatcagcgataacgacggtcacggcgcggcacttctggcctggccgatgcattacggcgaaaccggggtgatgagttttatggtcaaccaggacgatcgtatttatcaggcggatttaggcaaggagacggagagtaaagttcaggctatcacgcgttttgcgccagacgcgcagtggcaggtcgccgaataa

SEQ ID NO: 399776 - DNA, 666 bp, Salmonella enterica
ttgaaagagtatgggaacagtatggtatttttaacgacttacaaattaccgggtaaaaaaaatcaagtaagtggttataagaagattcgtgtaaaacaattgcataatttacacactacgagtatggatgaatcgtttgaaatagaaattcctcgtctgctacaacaaggaaaaattgttattgttgacttgtcacagggggaaccggtagttcagcgattattctctgagaaaatttgtcgttccacatttaacatctctatggatcgctttatcaataaccttccaaataattttatccaattttattttgaagaggcacataacttatttcctaaaaaagatgataaagatcttagtcagatatataacagaattgctaaagaaggagctaagctacatttagggatgatatatgctactcaagaggttagttctattagctcgaatatattaaagaatacacaaaactggtttattgcacatctaaataatattgatgaaacaaaagagcttgagaaatattatgattttaaagatttcacacattcattagttaatttttctgcaaccaatgataaaggttttgttaggatgaaaacttatacaaatccttttattgttccagtccaaattgatcgttttttagcaaataagggtatgtga

SEQ ID NO: 399777 - DNA, 129 bp, Salmonella enterica; identical to SEQ ID NO: 388177

SEQ ID NO: 399778 - DNA, 834 bp, Salmonella enterica
atgacagtgaaagcaaagcgtttccgtatcggggtggaaggtgccaccactgacgggcgcgagatccagcgtgaatggctggtacagatggctgccagctacaacccgacggtctataccgcgctgattaaccttgagcacatcaagtcttatctgccggagagcacgtttaaccgctatggcagggtgacggggctggttgcagaagaaatccaggacggcccgctggcgggcaagatggcactttatgccgatatcgaacccactgacgccctggtggatctggtgaaaaaaggccagaagcttttcacctccatggaggtcagcactaagtttgccgacaccggcaaagcctaccttgtggggctgggggcgacagacgatcctgcgagccttggcaccgaaatgctggctttcagcgccagcgccgcacataacccgctggcaaaccgtaagcagaaccctgaaaacctgttttcggaagcggttgaaacgctgatcgaacttgaagaagcccaggacgaaaagccatccctctttgcccgcgtcaccgcgctgttcaccaaaaaagagcagaccgacgatgcgcgattctctgatgtgcataaagccgtggagctggtcgctactgagcagcagatcctgagcgagcgcactgataaatccctgtccgatcaggaccagcgcctttctgagctggagtcctccctgcaggagcagcagaccgcctttgccgagttacagcagcagctgagccgtgaagacagccgcaaagattaccgccagcgcgcgccgggcggtgacgcaccggcaggcaccctgaccaattgctga

SEQ ID NO: 399779 - DNA, 1767 bp, Salmonella enterica
atgaacacgacactgacccccgcagacctcgatccccgtcggcaggccatgctgctgtactttcagggataccgcgtagcccgcattgctgaaatgctgggcgaaaaagttgcaaccgttcacagctggaaaaaacgcgacaagtggggcgactatgggccgctggatcagatgcagctcaccaccgccgcacgttactgccagctcatcatgaaggagcagaaagaagggaaagacttcaaggaaattgacctgctggcgcgccagtcagagcgccacgcccggatcggcaaatttaacgacggcgggaacgaagctgatttaaacccgaaagtagccaaccgtaacaaaggtccgcgcaggcagccggaaaagaacgttttcaccgacgaacagatcgaaaagctggaagaagtcttccacgcctctatgttcgactatcaacgccactggtttgaagccgggaaaacaaaccgcatccgcaatctgctcaagtcgcgccagattggtgccacgttttattttgcccgtgaagcattgattgacgccctgctgaccggacgcaaccagattttcctttctgccagtaaggcccaggcacacgtctttaagcagtacatcatcgactttgcaaaagaggttgatgtggagctgaaaggcgatccgatggtgctgcccaatggcgcagccttgtactttctcggcaccaacgcccgcacggcgcagagttaccacggcaacctgtaccttgatgagtatttctggataccgaaattccaggagctgcgcaaggttgcctccgggatggccattcacaagaaatggcgacaaacctacttttccacgccgtccagcctgacgcacagcgcgtatccgttctggtccggcgcgctgtttaaccggggccgtgccaaagcggacaaggtggatattgacctgacccacagcaaccttgcgcgcggcctgctctgccctgacggacagtaccgccagatcgtcaccgtggaagatgcggtgcgcggcggctgtaacctgttcgacctcgaccagctgcgcatggagtacagcccggacgaataccagaacctgctgatgtgcgaatttattgacgatctggcgtcagtattcccgctcagcgagctgcaggcgtgcatggtggacagctgggaagtctggactgattttcaggcgctggcgctgcgcccgtttggctggcgggaagtttggatcggttacgacccggcgaaaggtacgcagaacggtgacagcgcaggctgcgtggtaatggcaccgcccactgtaccgggcgggaagttccgtattctggagcgtcatcagtggcgcgggatggacttccgcgcccaggcggacgcgatcaaaaagctgacgcagcagtacaacgtgacctatatcggcatcgactcgaccggcgtcgggcacggtgtttatgagaacgtaaaagcgttctttcccgcggtccgggagtttgtctacaaccccaacgtcaaaaacgccctggtgctcaaggcctacgacattatcagccaccgccgtctggagtttgacgccggacacaccgacattgcgcagtctttcatggcaatccgccgcgccaccaccgccagcggcaaccgccccacctacgaagccagccgcagcgaagaagccagccacgcagatttggcctgggcaacaatgcacgcactgtttaacgaaccgctgcagggcgaatccgccaataccagcaatattgtggagattttttga

SEQ ID NO: 399780 - DNA, 1014 bp, Salmonella enterica
atgggtaagaataagaaaaaccgcactccagttaagaacaacagcggcacctctgcagaagcattcagctttggcgacccgatcccggttctggaccgccgcgaactattggactatgtggaatgtgtgcagatggacagatggtatgaaccgccggtcagctttgacgggctggctcgcacctaccgtgccgccgtgcaccacagctcaccgattgccgttaaacgcaatattttgaccagcacctttatcccgcatccactcctgagccagcaggctttcagccgctttgtgcaggattatctggtgtttggcaatgcttatctggaaaagcgcaccaaccgccttggcggcattctgtctctggagccgtcgctggcgaaatacacccgccggggcgtggatctcgatacctactggtttgtgcagtatggcatgaccacgcagccctacgagttcaccaaaggcagcatctttcacctgatggaaccggacattaaccaggagatctatggactaccgggttacctttctgccattccatcagccctgctaaacgagtctgccacgctgttccgccggaagtactacatcaacggcagccatgcgggatttatcatgtacatgaccgacgcagcgcagaaccaggaggacgtgaacaacatccgccaggctatgaaaagcgccaaaggaccgggcaacttccgcaacctgtttatgtactcgcccaacggcaaaaaggacgggattcagataatccctctgtcagaggtggcggcaaaggatgagtttctgaacatcaagaacgtgagccgcgatgacatgatggcagcgcatcgcgtgccgccgcagatgatggggattatgcctagcaatgttggtgggtttggggatgtggagaaggcggcaaatgtgtttgtgcggaatgaacttttacctttgcaaaaaaggatgcaagagtttaattgttggataggagaaaacataatcacatttgataattatattttatag

SEQ ID NO: 399781 - DNA, 1782 bp, Salmonella enterica
atggctgaactattaccacaaacaacttctatacaaaccatttattcatggtttactgaaggtaagatatttgttaatagacgttatcaaagaaaattagtttggactgcaatagagaaacaaaaattaattgagtctatacaaaaaaaatatccaattcctgcagttcttcttgcggaaagggaaaatgatcctggtacatatgaaataatagatggtctgcaaagattacatgcaataatgtctttcatcgaaacaggatatgaatcacttgatggaaagcgttttaatctggatgcttttccaaccgcgaaaaatcgagcagatgaaggtaagtttactgcggtcaaagctgatgatcttttaagtcagcgcgaggttactcagttattggattattctcttgccatgtccattatgcgtaatgcaactgagaacgaaataaatgatgtttttgatagaattaatacatacggacatagacttagtgatcaagaaaggcgtcaggctggtatacaaaataaattttcaaatatggttagagatattgcctgttccattaggggggatgtatctgacgacatattgcttttagagcaaatgccatctattagtattgatttgccgctaactaaacatgggtatcaaattcaatcggaagaagtattttgggtaaaacatgggattttacgttcaacagatcttcgtgacagtatggatgagcaatgcattgcagatatagcagcttgtattgttggtggtaagttaatagatcgttccaaagatgcgcttgatcagatttataataatgaagatgatgagtatagccgtattagctctgctattaatgtttatggtgaagggaaattttcagaagagtttaagttctgtatacaagagataacaaaggtatgtaatagtgatggagatattaaactcagggatttaatctttactaaacgtactacaaatgcatttccagcgatatttgctgtgttatttattgcatttcacgaattacttattaaagaaaacaagaagattaataattataaaggtataaaagataatcttaataatatagttactcgactggatactaaaagatcagctacaggcggggaagaaagaagaaagaatattaattctatcattggtttgattaaagataattttattgatagcgcagatagtagtcatatatataattctcacaatacggttgatatcgaggatattttgcgaagatctgaaatagaacttgcaaactatgaactgaaacagggtttgttgatgttggggggggagcgaactgttgataatggcattcatgagaaaatattctccacaatttgcgctattgctaacatcgggaaaggtaacaaaaacggtgtggttggtaagttattgattggtgtaacagataaaccaagtgatacaagtagagtaaaagagcttgatgatatagatgcacatattgttggtgagagaagcgtggttggcgttaaaagagaggctgttaaactcggtatatcaatggaggagtattataggcgcttttgtgatgagttaaaaaaatctgatttgagcgagcctcttaaatcacaagttgtaagtttgattgactataacgacttttatggttatggagttatagttatcacaatcccacttctagcatcttattctagttataatggagatatttattatcgttctggcgataatacaaaaaaagcaacagtcatcgaagcagcagatattgcaacgcgttttaaataa

SEQ ID NO: 399782 - DNA, 1017 bp, Salmonella enterica
ttgagaaactaccgcaatacagactttgaagttttagagaaaattcaagtcgaaaacgacatcattatcaagagtctcgaagaaagcattgattctattaacaaagaaatcaaacacactgatgatgaaataaaggaattaagaaataaaacatccaatatcgacgcaacaatctcctcgataaactcaaaattaaaaaaccttggcattacctgtttctacattgataaacatccaaccataaaaaatagtttcgttatagttcgctcagataatacaccaagtaaaaatgtatatagatctcttagcgaaggtgaaaaaactctcattacatttctctattttattgaatattgtaagggacaaacaaacacagatgaattcgacaaccgagacagtttaatcgtcattgacgatcctatttcaagtctctctcagaactatatctatgatatagcatcaatgattcactatgacattttcacttctgctaataaagtgataatcctcactcataatctatatttttttcatgagctaataaagttagctccaatttcagaaaggaaattcaatagcacctatcagctttttagaataacaaaaaacctacatagttctttttctaacatcagcagagatagtttgcaaaatgaatatcaatctttatggcaaatactcaaggatgccagagatggaaaagttcacaatgtagttatccctaatacaatgagaaacatcttagaatattactttgcatttgttcataaaactaacgagttacaagatgaattgaacaagcttgcacaaaatgaaagcaatagtaatttcaaggctttctatagatatataaatagaggttcacactcagattcgataaacataacagatatgggtgaaataacacccgacatatacatcacacaatttaaagagatatttagacttatgggagatatttcacattttaataaaatgtatgaagagaaaaagaatatagaagacactaccgcttag

SEQ ID NO: 399783 - DNA, 192 bp, Salmonella enterica
atgttaaagcctgcagatgttgtttgtttgaaaagcggtggatttaaaatgactgtatcggactctactgaaactcatgctaaatgtatttggcatgataaagaaggagttttgcacgaggagtcattctccattgatttactggaaatagcagagagtaaaagtggtatgctgtgtcgtccacgtaagtga

SEQ ID NO: 399784 - DNA, 681 bp, Salmonella enterica; identical to SEQ ID NO: 38577

SEQ ID NO: 399785 - DNA, 942 bp, Salmonella enterica
atgcaaggtgaagttgacgaacagcaaccaaatgagattatttcggagtttggatactatccagtagaagttaacattgagactgaacaattttctttgcgtactttacccggtcttattgagaaagtggaacgtattaacaatgataaaaacgttgttaatggttggatataccctgggaatcgaaaggtatataaccttaatggtgacacatgcacaatgccttatagttaccgagtattcggcatgcccaaaacgcacacactaaaattaaaaaacacatcctcgttagaaactctcaactttgttgtgtggtgcctctcttttttcaagggtataagattgacaaccactgacgctggttttcttgatgcaaccactatcaagcccactaagttaaccgactttattctcgttggatgctctgaaaaagaagtaatagagctagcacttaactatataaaagacaaacaaaaagatgatcgctccattaaaagaatagctgcggtgatacactccctattcctgtcacataacccactatacctttcctttgagaaattccagtatctttatatggctcttgattgctgttttgctatagcatgggatgaaagggataaagtcattaaagagaaaaaaccatctcatcaaaatagagtatattggacgtgcgaaaattacggtgtaaaaatcccgtcatgggcaacagatgaatgtaatgtttcagttatacgcaatgataattttcatgaagccatttttaatgggcaaccgcttggtttctctagtatcaatgattgtcaatatggtagcgatatattgctacaaatgcaggctctggtatgtcgtctactagcggcaatactctctgtaaatgatcgtaaatatatcgcatctacaatcagctcgatagagtaccattcattaaaattaacttaa

SEQ ID NO: 399786 - DNA, 957 bp, Salmonella enterica
gtgcagcagacgctggaagaccagatccagcagtccgccgctttcctgacgctgattaacatcacgccggtcactgagcagtcaggacagttgctggggctgggcgtgggcagcaccattgccggaaccaccgataccaccaccaaagagcgtgagcctaccgatccgacgctgatggaagacgtggaatacaaatgcgagcagaccaactttgatacggtgctgacctacgcaaaactggacctgtgggcgaaattccaggacttccaggtgcgtattcgcaacgccatcgtcaagcgtcaggcgctggaccgcatcatgatcggctttaacggcgtgaagcgcgccaaaacctccaaccgtgctgaaaacccgctgctgcaggacgtcaataaaggctggctgcagaaaatccgcgaagacgcgccggatcacgtcatgggcagcaaaaccgcagaagacggcaccactactgcagaaccggtaaaagtaggtccgggtggtaagtatgtaaatcttgacgcggtggtgatggataccgtcaacgagctgatcgatgtggagtatcaggacgatgacgaactggttgttgtctgcggacgtgaactgctgtctgacaagtatttcccgctggtcaacaaagagcaggacaacagcgagaaaatcgccgccgatctgatcatcagccagaaacgcatgggcggcctgcaggctgtgcgcgcgcctttcttcccagcaaatgccctgctgatcacccgtctggataacctgtccatctactggcaggaagacacccgccgccgttcagttatcgacaacccgaaacgcgaccggattgaaaactttgaatccgtcaacgaggcgtatgtggtcgaggactaccgctgcgcggcgctggtagaaaacatcgaaatcggtgatttcagcgcgcctgccgcaccggaaggtggggagtaa

SEQ ID NO: 399787 - DNA, 651 bp, Salmonella enterica
atgagcctgagtcccgcacggcagcaccgcctgcgcattcaggccgaacaggccgcccgtgagggcggcagtgttcgccatgcgtcgggctatgacctgatgctgctgcagctggcagaagaccgccgccgcctcaagggcgtccagtccacggtgaaaaaggcggaaatcaaggtggagctgctgccgaaatattctgcctgggcagagggcgtgctggctgccgaaggcgcgcagcaggatgacgtgctgatgtacgtgatgctgtggcgtatcgacgccggtgattatgccggtgcgctggaaatcgggcgtcatgcgctgcgccatggctgggttatgccgctgggcaaccgtaacgtgcagaccgtgctggcagaagaaatggcagacgcggcgcaaagcgctctgcttgctgctgccggttttgatgccgatctgcttctgcagacgctggacctgacaaccgatctggatatgccggaccagtcgcgggcgcgactgcataaagccatcggcgctgtactgagcgaaagcaacccggcgtctgccctgaatcaccttacccatgcgctgcagcttgatccccgctgcggtgtgaaaaaagaaaagcagcagctggagcgcagactgcgcaatgacagccgctaa

SEQ ID NO: 399788 - DNA, 465 bp, Salmonella enterica
atgaagtttgttgcgcccgaacaggtgccggaacaggcggaggtcatcaaaaatacgccgttctggcctgatgtggacctgtcggaatttcgcagtgtgatgcgaactgacggcacggtgacgcagccgcgtttaaagcaggttgtgctgacggctatttctgaggttaacgctgagctgtacgacttccgcaaccgccagcaattgctgggctaccgggcactggctgaggttccggcggatatgctggacggcaaaagcgagcgtatccggcactaccacaacgccgttttttgctgggcgcgtgctgtgctcaatgagcgttatcaggactatgacgccacggcgtcaggcgtgaagcgaggggaggagctggcggaggccagcggcgatctgtggcgtgatgcccgctgggctatcagccgggtgcaggatgcgccgcactgtacggtggagcttatctga

SEQ ID NO: 399789 - DNA, 579 bp, Salmonella enterica
  misc_feature (493)..(502): n is a, c, g, or t
atggctgacaatgtcgcggcgaggcaggccacaggctggattgttgtctgtacaacaccggatgtctgtaaaacacctatgggctcatcaacgccgcctgttccttaccgggtaacggcgcagatgtctgacgcggtacaggtggtgcccacggtaaacgccaacggcaggccactggtggtgctgacgcaaagttttatcccgaaaaccgatggcgatgaacagggggtggcaaagggggtacagagcggtactgtagccgatatctgtgagccgctggagcacagcagcagcgtcaaagcggcggggtattatgtactgcgtcatgatgaccggttttacatgaactgcaaaaacacggtcggcaaaatcgttggtcagacgccgtcagtcagtaaatcaacgtcagattcgaatccggaagtggtgccggaaacaccggaggaaaaggggttctggaaaacgctggttgactcgcttaatcaggaaacgnnnnnnnnnncccgccatacctccacccaaagggctggccaatttttccgttcttgcagcagtgacaaacccgcaaattccttctga

SEQ ID NO: 399790 - DNA, 477 bp, Salmonella enterica
atgacggcatcaggaacaacaacgaccggaacacttaatacaacgggtaaagcatctgttgcatcagatcttgctgttggtggaacctcaaccctgaacgggcaggtaaatatcaataataacctgaaagtgaaatccgatacttatctgaacacgctatctacaacagggctggctaagtttggtagtcgtatcgcgaccaatggactcaatcccaacgatctaccatctggttgggctggaggtgttcgcacctatgacttgtatgcatcggggactgttggcgctggaaccgggaaaacggttaatgcttatatgaatagtgcaggtaatatttttgcgtcaggcaatattacagccggaacgataaaatccaatggtacaattgaatcagttggtagagttaaagtgggtgaatatctccatctgaatggtcaggcaacgctgaatgcgaaatgtacgcctaataggtcatag

SEQ ID NO: 399791 - DNA, 1326 bp, Salmonella enterica
ttgcactggtatcgcgccgggcttgagcaccgcatccgcgatatcctgaaatcccgccagattggcgcgacgttttatttttcccgcgaggcgctgctgcgcgccctgaaaaccggtcataaccagatttttctgtcggccagtaaaacgcaggcgtatgtgttccgcgaatacatcatcgcctttgcccgtctagttgacgttgacctgaccggtgacccgattgtcctgggcaataacggcgcaaaactgatttttctcggcaccaactccaacaccgcgcagagccataacggcgacctgtacgtcgacgagattttctggatcccgaattttcaggtactgcgtaaggtggcatcaggtatggcctcacagagtcacctgcgctcgacctatttctccaccccgtccacgctggcgcacgacgcctacccgttctggtcaggtgaactgttcaaccggggacgcgccagcgccgccgaacgcgtggaaatcgacgtcagtcataatgcccttgccggaggtcttctctgtgcggacggccagtggcggcagattgtcaccattgaggacgccctgaaaggtggctgcacgctgttcgacattgagcagcttaaacgcgaaaacagcgccgacgattttaaaaacctgttcatgtgtgaatttgttgacgacaaggcgtcggtgttcccgttcgaggagctgcaacgctgcatggtcgacacgctggaagaatgggaagactatgcgccgtttgccgccaatccgttcggctcacgtccggtatggattggttacgacccgtcacaccgtggagacagcgccggatgcgtggtactggcaccgccggtggtggccggtggcaaattcagaatacttgagcgtcaccagtggaaaggcatggactttgccactcaggcggaatccatccgcaaactcaccgaaaaatacaacgtcgaatacatcggtattgatgccaccggcctcggtgtcggtgtgttccagctcgtgcgctcgttctatcccgccgcgcgcgatatccgctacacgccggaaatgaaaaccgcaatggtgctcaaggcaaaagacgttatccgccgtggctgtctggaatacgacgtcagcgccaccgacatcaccagctcgtttatggctatccgcaagaccatgaccagcagcggacgcagcgccacgtatgaggccagccgcagcgaggaagccagccacgccgacctcgcctgggcaaccatgcacgccctgttaaatgagccactcaccgccggtatcagccccccgctgacatccaccattctggagttttactga

SEQ ID NO: 399792 - DNA, 510 bp, Salmonella enterica
atgaatccttcaatcgttaagcgctgcattgttggggcggtgctggctatcgccgccacgctgcccggtttccagtcgcttcatacctccgttgaggggctgaaactgattgccgattacgagggatgccgcctgcagccttatcagtgcagcgcaggtgtctggactgacgggatcggtaatacgtccggtgtggtgccgggaaaaaccataacggagcggcaggcggcgcagggacttatcaccaacgtgctgcgcgtggagcgggcgctggaaaaatgtgtggtgcagccggtgccgcaaaaggtctatgacgcggtggtgtcgtttgctttcaacgtgggcaccggcaacgcctgtagctccacgctggttaagttgctgaatcagcggcgctgggcggatgcctgccatcagctgccgcgctgggtatatgtcaaaggtgtgtttaatcaggggctggacaaccgccgcgcgcgggaaatggcctggtgcttaaaaggagtatag

SEQ ID NO: 399793 - DNA, 516 bp, Salmonella enterica
atgaatccatcaatcgttaaacgctgccttgtcggggctgtgctggctattgctgccacgctgccgggttttcagcagcttcacacctccgtggagggactgaaactgatcgccgattacgaaggctgtcgtctgcagccgtatcagtgcagcgcgggtgtctggaccgacggcattggtaatacgtcgggcgtcattcccggcaaaaccattacggagcgacaggcagcagaagggctgatctccaacgtgctgcgtgtggagcgggcgctggaaaggtgtatgaagcaacagccgccgcagaaggtgtatgacgctgcggtgtcgtttgccttcaacgtgggtacgggcaatgcctgcagttccacgctggtgaaattgctcaatcagcggcgctgggcggatgcgtgccgacagttgccgcgctgggtttatgtgaaaggtgtttttaatcaggggctggataaccgccgtgcgcgggagatggcctggtgccttaaaggagctggactatga

SEQ ID NO: 399794 - DNA, 189 bp, Salmonella enterica; identical to SEQ ID NO: 373633

SEQ ID NO: 399795 - DNA, 291 bp, Salmonella enterica
gtgaaaatgaggatttgcgccgctgggctgatactcctttgcctgctgacattatccggctgcgggagcgtccggccctcgccggaggtgcagcttaccgtgagtggctgtcccagagtgacgcagtgccgtctggaaaggtcagcgccgcgcagtaacggcgatctgaacgcggtgctagatgaaaccgaggccgcctgggcggtctgtgctgacaaagtggacacgattattgcgtgtcaggagcgagacagtgaacaaaccgcagtccttacgcagcgccctgaataa

SEQ ID NO: 399796 - DNA, 294 bp, Salmonella enterica
gtgttgatcggtcacaatctgcgacaggttgtgctgaacaaccagagaaccaccaccctgaaacataaaaaagattccgtcattatggcccagaccgaagaggtgggtctgctgaaatcagtcaccgtgaatggtcccctgaatgtgagttcggccacgtccatcacgttcacctgtggcgccagttccatcacgatgaatgaggcgggtgtggtgaccatcagcggaactgaatttaatttcagcgccagcggtccggtcgccataaagggcaaggatgtggatatcaactga

SEQ ID NO: 399797 - DNA, 123 bp, Salmonella enterica
atgaccaatgttaaatttagcgcgtttttcaaactcagcacgtggaacacggatccccaacacttcatcaaacacataattttcagcaatacgcttatcatggtcagcatcagtggtatctga

SEQ ID NO: 399798 - DNA, 204 bp, Salmonella enterica
atgaaagtgcgtgcgcatcagtatgacacggtggacgcgctttgctggcgtcattacgggcgcacgcagggtgtcacggagcaggtactgaaggcaaatccggggctggctgagtacggcccatttttaccgcacgggctgcaggtggagctgccggacattacggcgtcaaccacggcgcagaccgtccagctatgggactga

SEQ ID NO: 399799 - DNA, 279 bp, Salmonella enterica
gtggtgatcgaggatttcagcggcgaccagaatctgctgatggctcctgtgctgctgtggctaagtgacaaccagccggatgctatcaataacccggagctgcgcgaaaaactgttcacctttgaagtggatattctgcgcaacgatgtgtgcgatattagcctgaacctgcaactgacggagcgcgtgctggtcagcactaacggcagcgtgtcaagcgttgaagcggtgccggagccggacgaacccgaagaaatgtggacggtgaaacgtggatga

SEQ ID NO: 399800 - DNA, 216 bp, Salmonella enterica
atgaagttccgcaaagccaaacagcaacagggcgtcatcacgcgcttcccggcgctgttctacccgctggggaactggatctgcctggtcctcatggctgccgtgctggtcattatggtgacgaccccgggcatggccatctccgtatggctgctcaacctgggcgtcggccacctgtgtaaagaaaaaacggcaaaaacggtgaaagcccactga

SEQ ID NO: 399801 - DNA, 147 bp, Salmonella enterica
atgaggaatcacagaatttctttgcaggatatcgctacgcttgctggcgtgacaaaaatgacggtgagccgttacatccgctcgccgaaaaaagtcgccagggaaaccggcgagcgtattgcgcagatcatggaagaaattaactaa

SEQ ID NO: 399802 - DNA, 624 bp, Salmonella enterica
gtgtttttttataactttacatgcgggttattactactgtttattttagtggcgtgctatcatttcatcattatacaaaacccattctgttataaaaaattatttaaaacaataaaactatttataagcacagcattactgataataattccttgtttaattttattattcctctctatcacattaaatttcaatatcgaaggttcattaacttttaattctatactacaggccgcatttatattatttaccattatcatccttgctggtactggattcgcagatagacatcaaagaattcgtgatacaaaaaataggattcaatactatttgattttttcagtggcaatttgtttatatatgttcacagctttttctgcgggcatatcagaaaaaattgttgatttgatagggttaggatatcaatatagatgttattatgatacggatcttaatcaatatcttattcctgatgaattcattcaagataaattcaataataaaacgaagctatttgtagtcgcagacatagatggcaaaatgtatatcgcccccaaaaacaaacgcactacatcattctatttcactgcgaaggaattagctcaagtgagctgtaataaatag

SEQ ID NO: 399803 - DNA, 987 bp, Salmonella enterica
  misc_feature (830)..(839): n is a, c, g, or t
atgtccactatgccgcccatcatgacgaggtttgttgcctcgctcctatgtttaaccatctcagttcttccgatacattcttatgcgggtaatcaggaacctaacatcggagctgttggtcgtgatgccaaacaatttggtttatctattgcgaacggagttaagcaaaactctgctcaggttcaagatggtaaaatttctctaccagtcggtaatggtcaatcaacatccataaacataaatgaactgtttcctggagttcaacctggtcaaaataccgcagagtatttccctgatgcagcatctccagaggagctagaacagatatttagtgatgctgatgctatggatcagtttggtaatgaggcaaaagccaatttattccaagacgccaacagctccaatccctcaatatcaggttctgcatatcaagttctcatggatgcggccaatcgctcacgccctgatttcagtaatgacccggtattgaatctaagcaaaaagacctatgaggatatggacctcatcgcaggtggctttggggattgttctgccgaaacaaccattaatcagaatactatcaacgcccacattccagagtatgaacggtgtcagcgtgttgtagatcaaagcgcggactgtgaggttgtccatgactacgatgcctctgtggtgaagcactatgatggcccatacaacctcaagtcctgtggtgacggatgcacggagctctggattggtaaggttggggacgattactgggctggtaactgtaaaatctatgaagagtacacaagagtccaggttagtaacccggatgctatcgtttnnnnnnnnnngtgtgggtcggtaagtccggccaagaaactaaagtgtggtctggcccagatggcaacttccctccagaaacagccggtagatgtgagctctccacgagttgggagcgaaaccctaatgttgatgtcactccctattttaagaacgtga

SEQ ID NO: 399804 - DNA, 183 bp, Salmonella enterica
atgaacaagcagcaacaaaccgtactcacacatggcggcctgttcgtcagcatcaagtgcgtccagtttttcgagcagcctcaggctctggctttttatgaatcccgccatgttgagtacggtttgttgctgcttgttcatctttctgttttctccgttctttctgtcatctgcgttgtgtga

SEQ ID NO: 399805 - DNA, 615 bp, Salmonella enterica
atgagcacaaaaaacgcacagaaagaacaaaaaaaagagtcattaatcactactcactggggagatgatgcaaccatacatgggtggacggctataccaaatagcctccttatgctgcaaggtgatcttggtattgggagtactgagatgtgtattctgctgaatatattgatgcatcaatggcctgagtcaggggagtcaatatcttttccgtcaattggtaccattgcatcaagaataggtgtatctaaaagaacaattcaacgcggggttagtaacctagaggcattggggatattaactagataccaatcaacaaggaatgaccctctaaccaatggcgctaatatattcgactcaactcctctaaaagaatatttaaacaaaaaagctaaaggcataacaattagcaacagcaacaaaaagaaagaaagaaagaaaaccggaattacacccaacataaaattaccacgcatttgcccaaaatgtttgaaaactaaagcaaccagccacgaagaaattgttaaattttttggcgtgcgaaaaacaatggctggggaaataataaattcatattgcaaagaatgccgagcttctgaaaaagatctattttaa

SEQ ID NO: 399806 - DNA, 726 bp, Salmonella enterica
atggcaagtatggaaacagagcagcaaccacaacaaactactgagcaaatcgaagtaaaaacaaagcgagtgcagtgctttattgatgggtataatttatatcatgcaattgaagagactggtaataaagctcttcattgggttgatcttaaatctttatgcaagagataccttcctaaaaatgcatctattgataatgttttttggttttccgctaagccatcacatttatcaagagccataaatgaaaattatcaaaattacaccaacgctttaaccgaatgtggtgttgatgttatcggtggacgttttaaaaaaaagaatgtaacgtgcgaagctgataatggatgtggtggagttttccataagcatgaagaaaaagagtccgatgttaatttggctataagtctagtgtctggtgcgtgtaatgatgagtatgatatagccattattatcactgcggattctgacttatgcccccctattaaatacgtaagagagcgattccctaataaagagctttggcttgtagctcctccggggagaatcaggcgagcgacagatctctgctctctgtcatcgagaagtatggagatcaagaatgatgctttgagagcctgctgtatgcgtgatgagttctacaaagatggagtacttgtagccagaaggcctcaggaatggcgagctgttgccaataccaggcaaagaagggctagaagtcgttag

SEQ ID NO: 399807 - DNA, 495 bp, Salmonella enterica; identical to SEQ ID NO: 376080

SEQ ID NO: 399808 - DNA, 168 bp, Salmonella enterica
atggtggttttgcctttaatattaacgctattgaatattactcatttcctttctttgttcgtggtgatgacctgctatttggatatatgcataaaaaacataatattgtcacacttaatggtgtggcttcgtggcaaatggattttgaaagaaaaatatcggttctaa

SEQ ID NO: 399809 - DNA, 555 bp, Salmonella enterica
atggtttcccgtaaaccaacgtattcgataagaccgtcaacgctttttcctgacagcgccgtcagtgtatcgtccagcggctgcttgcccgccagtttattcagtacagtggtggcaaagttcggatcgttacccagcgcgtcagccagttctttcagcgtgtccagcgtttccggcgcagaaccaaccaactgcgccactttcgcagccacaaacgctgccgtggcaatttcaatacctgcagctgcggtttccggagttggtgctgttggcgtaccagtcagtgccggactgtccagcggcgctttggtctgtacctcgtccatgacagcatggaccgcctttggcgtggctgccagcgcttcgctgtcactgtccgtggcgctgcttaacttaacgataccttttttcgtcaggctggcatcttccagggaaatcacgtccgcgatatcttctgcccgttttgcggcatcttctgctctggtggctgctgctccggcagcagtactgctttgcgccgccagtgatgcgctggtatcagatgcggcggcgtga

SEQ ID NO: 399810 - DNA, 1068 bp, Salmonella enterica
atgagcaaggtcggtgattatttctttgagttccctgcatcaagaggaacacagggtagtacagtaacttatatgatgacggttccagctcgtgcactgacacgcgttcttgcttcagacaataacggcagtacgctcgaacgctcacaacgcgaaattaatccagcacgcgtgaagaagttttatcaatatcttgtcaacgcttacgaaaataaagagccattcatcatcccgccattggttgggaattgtgactcgatcattgaatttgatgagtttggtaatacgaatgttggcgtagcgcggttcccgatggatgccgaaataaaactgtttgatggccagcaccgtgctgctggtatcgcagagttctgtcgcacttacggcgagcctattagcattccaattatgctgacgcacaatcttcctctgaaagctcgccagcagttcttctcagatatcaacaataacgtttccaaaccggcagcggcgataaacatggcctacgacgggcgtaatgaagtggctcaggggatggtgacgttcctgtcgcagcacgacaccttctcagaggtgaccgacttcgaacacaacgtcgttccagcgaaaagtaagttgtgggtgagctttaaggcgctgagcgacgcgacagcgaagttttccagcgcgggcagtaagccgttggaaatgggcgacatcgaatccatttgggaagcctggttggccctgacgcagatcgaggcgatacgccacggcaccagccaggcggattacaagcgcgactacattcagttccacgcggtgatgattaacgccttcggctacgccgttcaacggctgatggctgatcactcaatcgtcgatatcgtccggatgattgaagatttggcgagcaatgcgggctcctctgagatggaagacttcttcctgatttcacgctggggtggtatctgcgctaacaccgaaaaagatcgtccaacgattattgcctctgttcccgcgcagaaagctgctgctgaacgcctggtgcagagcatcaagtcgaagaatcttcaggaggcgtcatga

SEQ ID NO: 399811 - DNA, 639 bp, Salmonella enterica
gtgagcaagcgcggaatgatttttaacggcgaaatggtgcgggcaattctcgaaggccggaagacgcagacgcgccgtgtattagccacctaccaagacgctgtgaagttttgtcctgagtgggatgttaacggtaagcaaatatttattgtcctgggagaaaaagaccatacagggatgaatccggtaataaccgccattccttgcccttttggacagccgggtgatcgcgtctgggtgcgggaaacgttccgtgtccatagccgggcaacggatgttgccacgctggtctaccgggccagtgtccgaaactcctggactgagcaaactcatcgcgttcccgttgcggtttgcaataaaccggccacaccagagaagtggacgccgtctattcatatgccgcgctgggcaagccgtatcacgctggaaatcaccgatgtgcgcgtggagcggctgaacgatatcagggagtgcgatgcgaaagcggagggtggccaaacagaatgcactctcattggcgataagtattaccccggattccgcagcttatggaaatccatctacggcgaagagtcctgggcggctaatccgtgggtgtgggttattgaatttaaacgcgttgaaggagccgcgctatga

SEQ ID NO: 399812 - DNA, 195 bp, Salmonella enterica
atgcttgctgatgctgaaattgaacgcgcaaagggcgttgccaaggcaaatcagattatcggagacagcctgcgcaacaacgaagaatacctgcgctacttgtggattgatggattacagcagaataagagccaggtaatttacgtaccaaccgaagcaaacctacctatactcgaggctggaaaacgagaataa

SEQ ID NO: 399813 - DNA, 1008 bp, Salmonella enterica
atggctttaatcggtcaaactctgccatcgttgcttgacatctacaatcgtactgacaagaacgggcgaattgcgcgcatcgtggaacagttggctaaaaccaacgacatccttaccgatgcgatctatgtgccgtgtaacgacggctcaaagcacaaaaccaccatccgtgcaggtattcctgaaccggtatggcgccgctataaccaaggcgttcagccaaccaaaacccagaccgtaccagtgaccgataccaccggtatgttgtacgatctgggcttcgttgataaggctctggcagaccgttctaacaacgccgcagcgttccgtgtttccgaaaacatgggcaagcttcagggcttcaacaacaaagtcgcccgctactccatctacggtaacacagatgctgagcctgaagctttcatgggcctggcgccgcgcttcaacacgcttagcaccagcaaagccgcaagcgcagaaaacgtattcagcgccggtggtagcggctctaccaacacatctatctggtttatgtcatggggtgagaacactgctcacatgatctatccggaaggcatggtcgctggcttccagcatgaagaccttggtgacgacctggtaagtgacggcaatggcggccagttccgtgcgtatcgtgacgaattcaagtgggacattggtctgagcgtgcgtgactggcgttcaatttcccgcatctgcaacatcgatgtgaccacgctgaccaaagacgcatcaactggcgctgacctgatcagcatgatggtagatgcatattatgcccgcgacgtggcaatgcttggtgatggcaaagaagttatctatgccaacaaaactatccacgcatggctgcacaaacaggctatgaatgccaaaaacgtgaaccttaccatcgaagagtacggcggcaagaagatcgtttccttcctgggtattcctatccgtcgtgtggatgcaatcctcaacactgaatctgccgtaacggcgtaa

SEQ ID NO: 399814 - DNA, 393 bp, Salmonella enterica
atgttgcttgatcaacaggctttgttctccgcggctcaggccattacggccaccgcggtatcaaccaacgtcattgacaccggctccagtaaggatgtcggtaaatatggtgatatcccgctgctgattcaggttgttgaggcattcaacaccctgacaagtctgacggttacggtgcagaccgatgataactcgtctttcagttctgcaacggacgtgatctccatggttattcctctggcatccctgaccgttgggtacaaaacgccggtcatcacgctgccgatgaagctggagcgatacatccgtcttaactacaccgtcactggtaccgcgccgaccactggcaaagtaaccgctggcattgttggcggggtgcagaccaatgtctaa

SEQ ID NO: 399815 - DNA, 285 bp, Salmonella enterica
atgtctaaatatcgcgtaaaagaacgctccttcattaacggcaagctctgcgagcctggcgatattgtggagttttccggggaggctggcaaaaaccttatccctcataacgacggtgatgtcgtggtgaaggatgacgatctgccaaccaatgaagagcttcaggaacttgaccagcttcgtaccatttacgaagagatgttcggcgaagctccgcataaaaacaccagcgcaaaaactctcaaagagaagattgacgcccggcgtaaagaactgggcgtgtaa

SEQ ID NO: 399816 - DNA, 336 bp, Salmonella enterica
atgaaaactgtaaacatgaaaacaggcaccgactcattcgttggtgaagatggaaaaccagaaaccaaagatcagtatccgtgggggcttcgcatcacgctggataatgaatctctgcaacgtctaggcctgaatgcaaaatcactgccagcggtaggtgatagcgtttcagttatggcaatggctagcgtatgttctgtgtctacccgcaccacagatcacggtgaagacagctatgttgagctgcagatcaccgatattggcctggctccgcagaaacgtgatgatgccaaagaactgaaagatgcattctacccagtcggggaggatgattaa

SEQ ID NO: 399817 - DNA, 2967 bp, Salmonella enterica
atgccgcgtcgcttgatcctctcggccacggagcgggacaccctgctcgcgttgccagaaagccaggatgacctgatccgctactacaccttcaacgactccgacctgtcgctgatccgtcagcggcgcggcgacgccaaccgcctcggcttcgccgtgcaactctgcctgctgcgctaccccggctatgcgttgggcactgacagcgagctgcccgaaccggtcatcctgtgggtggccaagcaagtccagaccgatccggcgagttggacgaagtacggcgagcgcgatgtgacccgtcgcgagcacgcccaggaactgcgcacctaccttcaactggccccgttcggcctgtccgacttccgcgccctggtgcgcgagctgaccgaactggcccagcagaccgacaagggcttgctgctggccggccaggcgctggagagcctgcggcagaagcgacgcatcctgccggcgttgagcgtgatcgaccgggcttgctcggaggccattgcacgggccaatcggcgggtctaccgcgccctggttgaaccgctcacggactcgcatcgggccaagctggacgagctgttgaagctcaaggccggcagcagcatcacctggttgacctggctgcgccaggcaccgctgaaacccaactctcggcacatgcttgagcacatcgagcggctgaagacatttcagctggtggacttgcccgaagtcctgggccggcacatccaccagaaccgcctgctcaagctggcccgcgagggtgggcagatgacgcccaaagacctcggcaagttcgagccgcagcggcgctatgcgaccctggccgccgtggtgctggagagcactgcaaccgtgattgatgagctggtggatctgcacgaccgcatcctagtcaagctgttcagcggcgcgaagcacaagcatcagcagcagttccagaagcagggcaaggcgatcaacgacaaggtgcgcctgtactccaagatcggccaggcgctgctggaggccaaggaagccggcagcgacccctatgccgccatcgaggcggtgatcccctgggacgagttcaccgagagcgtcagcgaagccgagctgctggcccggccggagggcttcgaccacctgcacctggtcggcgagaacttcgccaccctgcgccgctacacgccggctctgctggaggtattggagctgcgcgccgccccggccgcgcagggcgtgctggcagccgtgcagacgctgcgcgagatgaacgccgacaacctgcgcaaggtgccggccgatgctcccaccgccttcatcaagccgcgctggaagccactggtgatcaccccggaaggcctcgaccggcgcttctacgaaatctgcgccctgtccgagctgaagaacgccctgcgctccggcgacatctgggtcaagggctcgcggcagttccgcgacttcgacgactacctgctgccggccgagaagttcgccgcgctcaagcgggaacaggccctgccgctggcgatcaacccgaacagcgaccagtatctggaagagcgcttgcagctgctggacgagcagttggccactgtcgcccgcctggccaaggacaacgagctgcccgatgccatcctcaccgagtccgggttgaagatcaccccgctggatgcggcggtgccggatcgggcgcaggcgctgatcgaccagaccagtcagttactgccgcgcatcaagatcaccgaactgctgatggacgtggacgactggacgggcttcagccgccacttcacccacctgaaggacggggccgaggccaaagaccggacgttgctgctgtccgcgatcctcggtgatgcgatcaacctcgggctgaccaagatggccgagtcgagccccggtctgacctacgccaagctgtcctggctgcaagcctggcacatccgcgacgagacctattcggcggccctggccgagctggtcaaccaccagtatcgccacgccttcgccgcccactggggcgacggcaccacctcatcctccgatggccagcgtttccgggcgggcggccggggcgagagcaccggacacgtcaacccgaagtacggcagtgagccgggacggctgttctatacccatatctccgaccagtacgcgccgttcagcacccgcgtggtgaatgtcggcgtccgcgattccacctatgtgctcgacggcctgctgtaccacgagtccgacctgcggatcgaggagcactacaccgacacggccggcttcaccgatcacgtcttcgccctgatgcacctgctgggcttccgtttcgcgccgcgcatccgcgacctcggcaaaaccaagctgtacgtgccgcagggcgtgcagacctacccgacgctgcggccgctgatcggcggcaccctgaacatcaagcacgtccgcgcccattgggacgacatcctgcgcctggccagctcgatcaaacagggcaccgtcactgcctcgctgatgctgcgcaagctcggcagctatccgcgccagaacggcctggccgtggccctgcgcgagctgggccggatcgaacgcacgctgttcatcctagactggctgcaaagtgttgagctgcgccgccgcgtgcatgccggcctgaacaaaggtgaggcgcgcaactcgctggccagggcggtgttcttcaaccgccttggggaaatcagggatcggagcttcgagcagcagcgctaccgggccagcggcctcaacctggtgacggcggctatcgtgctgtggaacacggtgtacctggagcgcgccacccaggggttggtcgaggccggcaagccggtggacggcgagctgctgcaattcctgtcgccgctgggctgggagcacatcaacctcaccggcgattacgtctggcggcagagccgcagactggaagacgggaagtttcggcccctacggatgcccggaaaaccttag

SEQ ID NO: 399818 - DNA, 144 bp, Salmonella enterica; identical to SEQ ID NO: 297166

SEQ ID NO: 399819 - DNA, 246 bp, Salmonella enterica; identical to SEQ ID NO: 108023

SEQ ID NO: 399820 - DNA, 615 bp, Salmonella enterica; identical to SEQ ID NO: 108024

SEQ ID NO: 399821 - DNA, 1218 bp, Salmonella enterica; identical to SEQ ID NO: 297162

SEQ ID NO: 399822 - DNA, 630 bp, Salmonella enterica; identical to SEQ ID NO: 297159

SEQ ID NO: 399823 - DNA, 363 bp, Salmonella enterica; identical to SEQ ID NO: 12787

SEQ ID NO: 399824 - DNA, 306 bp, Salmonella enterica
atgaccacttttaccgacaaagaactgattaaagaaattaaagagcgtatcagcagccttgacgtgcgagacgatattgagcgccgtgcttatgaaatcgcactcctatctctggaagtagaaccagatgaacgcgaagcttatgaattattcatggaaaagcgttttggtgacttagtagatcgtcggagagcaaaaaacggcgataacgaatacatggcatgggatatgactctcggttggatcgtctggcagcaacgagctggtatccatttctcaacaatgtcacagcaagaggtgaaataa

SEQ ID NO: 399825 - DNA, 540 bp, Salmonella enterica
atgaatccgtttaacgccattacttttgctgcattgtgcgggcctctggcttgtcctgccgctatggcgcaggagttcatcatccagccagcccctgtgattgctaaaccttttgagtactctccttctgttgaggaattctcacgcagaatggaagagggtaaggagatcttgcaaaagttaacaattgcagcagatgactactatatctgtttgattgatcttaatagccaagatgctcgcgaatttgtttccaaaaacgggacagatacgacagaggcatgcgaaatgttcctgcgtgcttttgaagaagaagtgaagcgtacaattgaatcgcctctgcctgaatttatcaggtcagaactgaaggtttactggcgtcatattgctaaagctcgctcatctgtcactcgccttaacaattacataaagagcatatttaaagaaactgttacttttagcgggcgcgcggatcttgctggaattgcagcactagctagtcacacatcaaataagctaaaatcgatgcaatttcactaa

SEQ ID NO: 399826 - DNA, 435 bp, Salmonella enterica
atgcatctagaagtctctattaatccagaaactagagctgaattttttgatgaagtttttctcaaattcccggagctagagtcttctatcattgatgatttcaagagatacaaagcaaccggtgagcttccgcattatttcggtagggacgttgcgtatactcagccctatggtgcttttcgggctgggttgatgcatatccatctttgtctaccgccaaacaagtttcccgagaaacttccacaaccggatagggtctgcaagaaaggtgatcctgataatgatgcttgtcttgtgtatgtccaaggtgagctttatgagaataaatattcactcattgctattatgtatcccgatgcacatgaaaaagcaagaaaacatgatgtgatgagctatctggcgcgaattgcccagaattataaagatgaaaactaa

SEQ ID NO: 399827 - DNA, 312 bp, Salmonella enterica
gtgagtaattatctgtactggtctggcttagtggctaacatcgcgctcatgttgttcgtggctctttgcatctgggtttggtttatctggccttttgtagaggccatgagcataactcggtgctttatttgcgcatcaaagacttctggatgcaaaccaactgtaagagcaattatcagaactttaaaatactggtatctggatttgcttttcggcaggggctggacgcgaattagtaaccgccagtttgaatgggaaggcgtcggtaactggcgaattcacagcagcaaagaaacgcaggaggtgaagtaa

SEQ ID NO: 399828 - DNA, 489 bp, Salmonella enterica
gtgactggacatgcagcaatcctcgacatgtgctgtggcagtcgcatgttctggttcgataagaatgacgaccgggcgatatttagcgacatcagaaaggaagagcacacattatgtgatggacgacgcctgataattagccctgacctgatagcagattttcgtgcattaccatttgcagacgcatcgtttccggttgttgtattcgaccctccgcatcttgagcgtgttggtgataacgcctggatgggaaagaaatatggacggctgaataaagatacctggcgtgatgatttgcggcagggatttaaagaagcctttcgtgtgttgtggccaaacggtgttctggtttttaaatggaatgaaacgcaaataccggtaagccagattttggcactgacagacagaaaacctgttatcggtcaacgaacaggaaaaaacgataaaacccactggattatttttatgaaagaggcaaccagtgagtaa

SEQ ID NO: 399829 - DNA, 522 bp, Salmonella enterica
atgcgcatgaatgttttcgaaatggaagggtttcttcgcgggaaatgtgtaccgcgagatctgaaagtgaacgaaacaaatgctgagtacctagtacgtaagttcgacgcgcttgaagctaaatacgagacgctggcggcggagaatgcgcggctgaataaatttatcgtacagagttgctatgtgtttaatggcgagcaggatgaaatatctgatgcgtatatctgcgcagcaggcggaggtatgccgcaaattccagccaccgatgcttttctggctgaaattcgtgcggaggctcgcaacgagggaattaactataccgcaagtcgtcttgctgctgctttcaaccacggatttatcaataagtctttacgtgaagttttcgacgttacgcgcatgattctgtcagcgaaagaagagttagctaatgaaccgcatccgattgatggcctgtccggtgaatatgcggagaaatcccttgaagaatgggcggagcagattcgcaaaggaggcaaccagtga

SEQ ID NO: 399830 - DNA, 225 bp, Salmonella enterica
atgccagtggcatttgaatttaaatgcgttccgtttgaaggcctgaaagaacgtccgtttaaattacgcctcagcattatcactggcgatcgtcctgtactggttctgcgcattattcagctggaagcagtgcaggaagaaatggctaacgaatttcgtgatctgcttgttgagaaattcaaagacagcaaagtagaaacttttattggtactttcaccgcctga

SEQ ID NO: 399831 - DNA, 609 bp, Salmonella enterica
atgggtagtttgacagggaagtatcgggctgtagtggtaagcgtcgatgaccctaaaggtctgatgcgtacgcaaatacgcgttgtcggcatgatggatgggctaccagatgcctcattgccgtgggcagaagccatattgtccaatgcaaacacgttttcaccatttctgcccggcgataaagtatgggtagaatttccctacaatggagattcgcggtggccattgataatcggttatgcacaggatgcatccggtggtgcgcctaacgtccctccggaggcctccgggcagggtagcggctacacgcctccagatgttgacggtgccccacccatgccctccaccagcgccaaaaaagactacgtttactcgcgtaacggtcttatggagatccgcaacgctggcggcggctggtctgtcacacacctgggcagcggcacgacgatcggtttcaatgaggctggtgagctgttcgctatctcgcagggcggcgcgtttatctcggctgccgatgatataaacattaaggctggtggcgatatggggattgaggctgccggaacgctgtccattaaggcggcacaggttacagtggataaaggttga

SEQ ID NO: 399832 - DNA, 333 bp, Salmonella enterica
atgaccacagttcgtcgtatgccagccctcagcccggaagaaattcgtaaaatttcgaagaatgccgtggcgacggtcgctgcggaaaaaattgttactaacaaaacggcctttgtaaaggctgccgttgcaggcgtgattgcaggcaaaaaaaatgaagttagtcgtaaaggcgatagccaaactgtccgtaaagtagcagctgcatcagcacgggatgcaaaggcttccagcctgtctcgtcaattagcaatgtccgtcctatcacagagcagcgggcgggaatatattcaagaatcgtttaatcaggttcgtaaaaataaaaaagcgtaa

SEQ ID NO: 399833 - DNA, 711 bp, Salmonella enterica
atgactcagcaaacaaagaaatggatttttactgagctggtaaaagatccaaataatattgagcagcttctttcgtatgcggtttataaaggttttaaggacgaaatagctcgtaacgctcgcgcggccggtaaaaaagaatacgagattgaggctgagcttgcggcctaccacgatcaatgcctcaagtcaccgaggcagcttcaagtatttaaaagaagcgcacaggaaattttagatggatacgtttctggcgtcaacaacgagttgcagacaaggttagaaacaatttttgagcagcaagagaatatttatcaaaaccaaatcaaagccctccagaaagagaaagatgaggcaaacaaaaatgctataaagcagctggttaaaggtgcagaaaaatacagcaagcaaataaagaaacccgtggggttttgggaatgtgcccaagtctatgggattgccatattaaaatttcttttttctggtgtaccaaaactttttgccacagccttctcaataggccttttgtttgcaatatggggactctttaacggtgatgccgtaacaggtctgagaaaaggactttataaaatggtagatataaccgtgccaggagaaaaggttaacactacgcaaaatgatgttggctcaattagccctaaccagaagagtgttacggcaaataaacagccccacgatggaggggcataa

SEQ ID NO: 399834 - DNA, 471 bp, Salmonella enterica
atgtgcgccatagatgctctttccgttgtggcgaatgcggctgagcgcacgcgggagatgaaaaagaaacatctgttgattgctggtgacgtgctgtttgccctggttgcgctcagcttgtgtgaccgtgacggcccggcaccggtaatcgtcgctcagccatccgcgccgggagggggccactattacgataacagcggggtcttcagcgacttgctgatgggacacctgatgagcggtggtggctatggacacagcagcaatatcaacatcacgcatcatacgaccgtcattaaaaactaccatccggcgccgcgctacaacgccaccagcgaccaaacgctattatggctccggctcgttcgcgcgccgctcaaccgttacgtcgcctccgatgcgttatatccgtccgagctacagccgccactgatggttatgcccctccatcgtggggctgtttatttgccgtaa

SEQ ID NO: 399835 - DNA, 393 bp, Salmonella enterica
atgtctgataaagtaacagtaaagcaaactatcaacaaagcgacttcaatctacaaaattgagcacatcactgttggcaagccaggatctgaacaataccgtcatgctttcgagcttgccgatcagcttggtttaaaacacccggattgcatcgagcatgtatttccgacctatgctgatgagcaatgtactcatgttcttaccgaagaggattttttcagcactgaagaacgagaaggcgttgatcgctgcattggtgtgatttgttcttcggtaagtgatgagttattccctaatgtgcctgaatatggtggtattggataccagttcctgtatgaaggcgatgagcttaaatgctatgaacatggtcttcttatcgaaagcgtagaataa

SEQ ID NO: 399836 - DNA, 885 bp, Salmonella enterica
atgccggaagaaaataaaggcttccttagcgttgaagaagttgcaggaaatacaggagaaatccacagcctgaaacccaataacaatagcactatacaacccatcgctttgttgcgcttaggtgtgtttgtgccaaccttaaaatctaccaatgtggcactacgtcgcggatcgtcagttactacaaacacaacgaacgcaaccgaagaactatcaagcctcaaaattgttgagcaggaaggctatgagggaattgaaattcatggtccacgcctggatatggatactgattttaaggtgtgggtgggcataacctccgcgttgtttgactacgcacctgatgatgacggcataatcaccctgccattctccgagtttgccgatcgatgcggctatccacgtaagcgcctttcaaaggcgttccgtaaaagtattgatgactctctgacacgcattcagcagacagttgtcaaattccgcttcccggcggcaaaaggtcatctcaataacattaacgtcaacttgttggcatatagcagcctgaataccgagcttgatgttatcgagatccagccgcagaaacagctatctgaactttactatgttgactataagcgaatcctgaagctgaagatgctggataagctcgggcgcaaagagacggccaaggtattgtatacattctttgaggctctacccgccaacccggcacctgtcagcattgagcgccttagagcaaggcttaatctcaaatcatccgttagcgtgcaaaatagcgttatcagaaaagccatgaaagatttggaagctattgaatatcttaaattttcagagataaaaaacggcaggaaaatcggcttccagatccataagcgcaatccataa

SEQ ID NO: 399837 - DNA, 810 bp, Salmonella enterica
atgcaagaagagaaacaacactacctctacgttctggtgccggagaatggagatacttttaaaatcggcatttcatgtggtccattggcacggtttaaagggctacaagtgagtcccgattttgcgctttcacgggtctatcgtggtacgcgtttggcaatagttaatcttgagcgggctttacacgcaaccttttccccctggaatgcgccgtgggagaaaagcgccggtggcgggcatactgaatggtttacacgagagtgtcttgataaggttttggctcatatcgaatatctaaatgatatgtggggagggattctagagcgcattaagtcgaatgatttacttcagcgtccagtagatgcagctcgctctttcgaaaaagagctggatgttacttctatcgtgactttcaaagatgacgcaggaatgagggacgtggcttatgtctccatatctggctataaaccggacgcgatccgcgctcaatgtgaattgctgaaagcaatgtttatgcttcggactaaatatccctgggagacaaggcgggtgtgcttccctatggaagagttaaccgccaccattgattcccagctttaccacgataatccagagaagttttttagccttttagccggtaatgggcttaactgtgtgtccgggctggggcgaagtagaatccaacatgccttgctcttcggtcccttcttttacgatcgacacgggtactttgaggctgaacttccggcgcttacgcgtgctatagatactatcgatttcgaacgattattcgctgctcttagcaaataa

SEQ ID NO: 399838 - DNA, 1002 bp, Salmonella enterica
atgtcaaagaaaaacagaccaacaattgggcgaacccttaatccttcaatattaagcggatttgatagttcttcagcctctggcgatcgagtcgagcaggtattcaagttatcaactggtcgccaggccacatttattgaagaggtaatacctccgaaccaggtagaaagcgatacctttgttgatcagcataacaacgggcgtgaccaggcatctcttacgccaaaatcattaaaaagtatccgaagcactattaagcatcagcaattttaccctgcaataggtgttagacgggctacagggaaaattgaaattttggatggttcccggcgtcgagcttctgccatcttagagaacgtagggttgcgggttttagtcacggaccaggagatcagcgttcaggaagcgcaaaatttagcgaaagacgttcagacagcattgcagcacagcattcgagaaataggtctgcgtttgatgcgaatgaaaaatgatgggatgagtcagaaggatattgcagccaaagaagggctgtctcaggcgaaggtcacgcgtgctctccaggcagcgagtgctccggaagaattagtcgcccttttccctgttcagtcggaattaaccttttcggactacaaaacgctttgtgctgttggcgacgaaatggggaacaagaatttagagtttgatcagcttattcaaaacatatccccggaaataaacgacatcttatccattgaagaaatggccgaagatgaagttaaaaataaaatcctgcgcttgataacaaaggaagcctcactactcacggataaaggttctaaagataagtccgtagttactgaattatggaaatttgaggacaaggatcgctttgcaaggaagcgcgtgaaaggccgtgcattttcttatgagtttaatcgactttcaaaagagctacaggaagaactcgacaggatgattgggcatatccttagaaagagcctcgataaaaagccgaagccttaa

SEQ ID NO: 399839 - DNA, 492 bp, Salmonella enterica
atgagaaaactattactaccgttattatttatggctgggactgttaatgcagcatcaagcgtaaaggagatttgtaccgattatacgaaataccttgggcacgtttacggatttgctgtcagtgaagacgaatccatgcgcaagaagttactgtcagatatgaagcgccttaaactttctgaagcgatggtgcagcaggaactgtataaagtctcaaccaacgcaaatgctaaataccaatattctcgcctattaaaccccgatgcaaatgagatcaatcgaagcactttcgattatatggtaaaggcatgcgaaaccgctcctgattttgctatccctagctggggtgtgctggtggcgagcaatgccgttaataaagaagatgttggaagaaatggcattgactcaatcagaaatgccccaggaatgcgccatcaaaacgtgcagggtacgcttgaagaacgagccagggggccgggtgtagctccataa

SEQ ID NO: 399840 - DNA, 507 bp, Salmonella enterica
atgaaattatataagtcattgtatagctttttattaatgtcctcttttctgccattatcagcaatggcaggttctaccgtttggacggtaggaggtgagcaagggtggagagaaatctctgcaaccaatgacgatggttatacaattaacttttcttgtgatgctggagcaagggaaggttccgaagatcatatagctggaagaaatttgtatgtaagtggagggaaagagaatgctgatttttctacacgcgacacaatttctcgtaaagctgatgtaattaccttaattgttggtccggatagctttaatattggtacgcaaaacactgctccaaatcgtagggaatggtattctttttggaagtcagcgtcagccacaaaagaaaaaaacatggatgtatatatcggatcgcgtcgaattacatcattctctcttgatggaatttcaagtatttacaaggaagctaaaaatgatggatgtttaaagcaagatgacggtgaataa

SEQ ID NO: 399841 - DNA, 1185 bp, Salmonella enterica; identical to SEQ ID NO: 25249

SEQ ID NO: 399842 - DNA, 3375 bp, Salmonella enterica
atggaaagaaaaaacgccaacattgacgatgttataaggacagttgaaaccgccagcgcaaaagagctggaagagcttgctggtatccgggaagctgttgaagatttgaaaggtgggcgagttgctactgttgatcctgtctctcgcagcgtgtcggcattaaatcacacaatcgaaaattcccggcctgactttgtggccaaagcgccatcagtagaccctattgttgacgcaatgaaacggcttaatttaggggacgtttctcgtgtagttcaggaagatgttgctcaacaggaacagcgggccaaatcaaccacaccaaatggtaaaaaacgacgcaggaaggctataccagaggatgtaaaggcgcaacggaccgaagcagccgaacacgctcgcgaaatgttcggtcaaaaaggcggtgcgcaaaaaagccaaaaccaacgcgatgcgcgtggtcgttttattggaaagtcagggagtaaggccgcagcggaagatgcccgtgctgaacgagcagaaaaggccaggcgaaaagaggatgatgagcgtctaaatgctgaatcaggtttattaaaaaaactgtcaaaagtagctgaaggcataggtaacccttcagagactcgtgccgtcgatgcgttaggttatgccgttgctggtccattgtgggccgcagggaaggagcttggcgggatatcaaaagaagttggtggatcgcttaatggtgccagaaagtctattgccgatgtgattcgtggcaatgacgataacagccgtagaaaaggtttttttaggcgtaaatcgcaaaatagtgccgatgtcgttcaggttaacacccaaaaacggacggttcaggaacttcaggatcagaccagcgaaattaaagagggcaatgacaagattctcagcgcccttgatcagatagccaaaaacaccgggaaaaagaagggcggcgtgctgtccaaattatttagcctgttagggaagggggccggtggcgtcgcgtcgttgttaatggggcgtggcatgctgaaaaaagctggagcactcgcttttggcgctctgggggcaaagaaacttgtaggaatgctacgcggtggtggcaagaagactctcgcccatgaaggcggagatttggctgcccgggcagcaggtaaacttggattaaaggcagttggtaaaggggcgttacgcgcaattcccctagtcggcacagtggctggaggtatttatgatgcggtaaccggttggaatgatacagaagcgcaacgtcgagcgtttgggcttaaatcaggacaagatccatcattccagcaaaaagccgcttatacgttagctaatgttcttgatatggggggactggtatctggtattagcagcgccattggtgaggttctcaaatcacttggatttgaggatatcggcaatatgttgcaatcattttcgacggaaagtattgccctggccattgatagtgggattaccaacttagaaacatatatttctaaccttggcgacaccatttctaccaagttcgatgattacacagcaaagattggtgatgctgtttcagcatggtttagcgatacatctaataagctgcttgaaaagctggatgccatcaaagacttctttactgtcgataacctgaaacaggttttcagtgatgcaattgatagtgcaattgatttcattaagaacccagggaaacacattaaagaggcggctggtaatatttgggatggggttaaaaatttaccaggtaaagcattagatgcagcggttgatgccgttaaaaatacccctgcggcaatgattgtatcaaaaatacccaatccgatcggcgaggctaatgcgaaagaaatcactccagagttaaaagctccggttaatagccaccaggggacatctgattctaaaactgaatccgatgccaaacagactaatattgctgcccgcgtgataaatgcggctctggatatggcgaaagatagcaataaaacagttaaagaaactgctaatcagattatcaatgcaaatgccgtagaaacaggaaataaagcagcacaaacaattgatgctgccttgggccagtctgctacaggcaaggaggaagcattaagtgcatatgagatagataaacgtcgatttaacaatggcaaggatgtttctttgccaaaattaaatgctgccggataccaatggatttctgacaatgccgattattttgatgagcttgaacgtaagtatggtcttgaaaaagggattctgtcagcagttgcatccgcagagtctagtgcaggccagagaactggaaatccagtagacaaaaacgggaacaaactttcatctgcccttggggcttttcagatcactaaaggtacaagggaggatcttggactcagcgatgctgatgccatggatacacgaaaagcagctgatggtgccgccagatacctaagtatgctgatgaaccgttataacggtgatcagggtcgtgcaatagctgcctatcatgctggtatggggcatgttgataaggggagagtagtcgcaggtaccggcgaatatgttactcgtgtcagagggtatcagcagatgctcaataatggtgccgtttatggctctaaggtagatcatagcgcaccagcaatttacgaaaagatacctgataacgctgttatcgatcagtctactggcctggcgtttacccctggtgatagcccgtttgagaaaggcggtctggtagacaaaattggcaatgctgttggcgttaacgatctggtcaacaaattcatgaatggccggggtatgcgtcgggaagtcgttcagggaacgctcgaagaacgtgcacgagggaaggggaccgcaacagcagctggcaatgtgtatgttgatactccgatgccagttgaagaggcgcgtccggtggccagcaactcaagttactttgaccaactcggcgcacaaatggggattgatggactatttgataaactccgcaactcgccggggatgcggaaaaataatgcgcctgaaccagcctccacgtcccaggtgacgactgccgccaacgatttgcagcaaccaaccggtcgtatgcagatagacggacaggttattagtgaccttggcggctccggtgccaagccgacaatgcagttggctgataataccgtttcacttgatggtgaaacgaagcggctgtttgcgcagatgacctcattgcttgccaggattgaagagcacactaaagactcggcgaaaggccagggaactgtcgtaaaggtcagcacgcctcaaccgggcgttatgcgcacggtgccactgtcaattgatgatccgttgatgaatgactacgcgagagttgattga

SEQ ID NO: 399843 - DNA, 144 bp, Salmonella enterica; identical to SEQ ID NO: 126359

SEQ ID NO: 399844 - DNA, 318 bp, Salmonella enterica; identical to SEQ ID NO: 376386

SEQ ID NO: 399845 - DNA, 1095 bp, Salmonella enterica
atgataagtttatcaccaccgactatttgcaacagtgcctcttggttggtcttcgacctggatcactccaacccgttaatttgggaggacgaaggactccccgctcccaatatcatcgtcagtaaccgcaagaatggtcatgcgcaccttttctacgccatcccccctgtttgcaccactgaaagcgcgagatcgaagcctatcgcctatatgaaggccgtctatgaggctatggctgcacgattaggcgcagatccctcttacagcggcccagtcgcaaaaacgcctgaccatccttggtggaatacctgggaaattcacaacgccgtctatgacttgggtgagttggctgattacgtagatttggccgtaaagccattgtggggcaccgggcctgatctggactcagtttcacattcacggcattgcctgctgtttgaggagttacgtttctacgcctattcaatcgtcaaccgtgagcgtgagcaagggagctttagttcgtttaaccggctgttggaagcctacgcctttaataagaacaatttcaggcttcgtggctttgacatgaatctaacagcagcacaggtcaaagccacggtcaaaagcgtcgccagatggacgtgggaccgctataccggctccagtcgatgccatcgggggatgatgcgacttgatagctccctgccgctgcgagaacgtcagagactgtcggccaagcgtactcatgaggctcgccagaagtccacggaatcacggatacgggctgcttgcaggctgttattgcaacagggcttaaagctaactcaaacatccatagcaaagctcgccaagctatccagacaaacggtggccaagtatctccatatctgcaacgaagtctccgaaagctcaacgaatgtcatcagcttagatgaggttgttatggcccccaaagctgttaagcatggtgtacatcagatacctgccccccgtaggggccgacaagaatcgtccctcctcggtggtgatttgaagtcagatgacgccaaaactagggatgttcattccgaagacctctcaaccaggcccgttgattggcctttaaaagaataa

SEQ ID NO: 399846 - DNA, 369 bp, Salmonella enterica; identical to SEQ ID NO: 296821

SEQ ID NO: 399847 - DNA, 1215 bp, Salmonella enterica; identical to SEQ ID NO: 296822

SEQ ID NO: 399848 - DNA, 255 bp, Salmonella enterica
atgaataaactccggcagctccgcagactttcgacaatgaagttatcgctggcagcgatagttttcgactcgattttcatggcggtatatgtgcttaatgaaacgtggccactggaaccgctattgtatgccgggcttcggctgtgcctgacatttttgagcatggctgcgagattgatgcagcagaaagaaaccgcttcagattgtccacgccgcgcggtgcgcaaatatatggcacgcaggcgaaagcgataa

SEQ ID NO: 399849 - DNA, 1305 bp, Salmonella enterica
atgagcgagtatatagaaattgcctatgcagcggctacacataggctgtgctttcttacaggcactggattttcaaaggctgtttctgatgataaagccccaagttggcaatctttattggagcaactgtgcggtttattgaaggatggtgactcactcaaagaggaattatttcctgatggaaaagcaaaagaccttagccttgaagaagctgctcaggttattgcactaaaatttatactttcggggaaaaatatttaccaagagattgagaaaatcatagcctcaatcgaacttgatccatcaattgaatatattcaagactttttcaaagaaaacacatttaaagtaattacgacaaattatgacaagttagcagaaaagctggctggagagaatcgaacgtgtacaatcacccccggcctgccaattccaaaatataattgtgaggttaaagtctaccatgttcacggttctatagactccccatcagacatggttgttactagcgaggattatttcagatttataaatggtaattcttacttttctaataaactaagcacagttctacatgaaaacactattgttatccttggctattctctaagtgacgcgaacctaaaggctattataaatgaatataaggtattttcacgggacaacgtaatgtcctccaatattttccttgtttcccgaggggaactattgcaacctattaaagattactatttttcctgctatggggttagggttatagataaaacagaggtatctgatttctttagaaaacttaacgataaaattccagaagcaaaaaaaataaaagacaaattgaggcactcaatcaaatcggtaataaaaaacggaagagagtataaaatagagttcttgaagctagaggattctttttatcatatcatttcctccatttcatcatctggatatagctggaataatgaaaatgtattaaatgttttttgtaatataatagataaaaaaatagaacttactaaaaagcctggcgcatgggagcagtatgaacacctggcaaaatggcttatttatttcggtagtttatttgaagtaaaaggaaccaattttgagaaaaaatacatacatgcggttgaacactcaatgacttatatgaataaaccttacgaaacaggctactcatggcgagcatatctagcctggaaaacaaaatggccttcactgacagcatctaaccgctctcttattaagaatgagatggaagatatcccgctacaacagattcacgatattgtatctaagtttatatag

SEQ ID NO: 399850 - DNA, 261 bp, Salmonella enterica
atgcatggagtaatatctgaagaggtgtctctgcaccatatctccggtcgtaccgcgccggattgtcacaaaaagcaattgcccctttgtagatggcaccaccagcatgcagcaccggctgaagtaagagaaaaatacccctggctggtccctgttcatgccgatggtgtggttggaggcaagaaagaattcaccctgctgaacaagtcagagatggagttactggctgacgcctatgagctggcaaacattatgcactaa

SEQ ID NO: 399851 - DNA, 294 bp, Salmonella enterica
atgaaaaaaatgttgttttctgccgctctggcaatgcttattacaggatgtgctcaacagacgtttactgttggaaacaaaccgacagcagtaacaccaaaggaaaccatcacccatcatttcttcgtttcgggaattggacaggagaaaactgttgatgcagccaaaatttgtggcggcgcagaaaatgtggttaaaacagaaacccagcaaacattcgtaaatggattgctcggttttattactttaggcatttatactccgctggaagcgcgggtgtattgctcacaataa

SEQ ID NO: 399852 - DNA, 462 bp, Salmonella enterica
atgagcagagtaaccgcgattatttccgctctggttatctgcatcatcgtttgcttgtcatgggctgttaatcattaccgcgataacgccattacctacaaagcccagcgcgacaaaaatgccagagaactgaagctggcgaactcgacaattactgacatgcagatgcgtcagcgtgatgttgctgcgctcgatgcaaaatacacgaaggagttagctgatgcgaaagctgaaaatgatgctctgcgtgatgatgttgccgctggtcgtcgtcggttgcacatcaaagcagtctgtcagtcagtgcgtgaagccaccaccgcctccggcgtggataatgcagcctccccccgactggcagacaccgctgaacgggattatttcaccctcagagagaggctgatcactatgcaaaaacaactggaaggaacccataagtatattaatgagcagtgcagatag

SEQ ID NO: 399853 - DNA, 1053 bp, Salmonella enterica
atgaaaaatactgtaaaaataaacagtgttgatttaatcaacgctgattgcctgcattttattcagtccttgcctgatgattccattgatctgattgttaccgatccgccgtacttcaaagtgaagcccaacggctgggacaatcagtggaaaggggacgaagattacctgaagtggctggactactgtctggcccagttctggcgggtactgaaaccagccggaagcctttacctgttctgtggacatcgcctcgcatctgatatcgagatcatgatgcgtgaacgtttcaacgtgcttaaccatatcatctgggcgaagccgtccggacgatggaacgggtgtaataaagaaagcctgcgggcatatttccccgctacagagcgcgttctgtttgctgaacattaccaggggccatatcgcggcaaaagtgacggctatgcggcaaaagaaagggaactcaaacagcacataatggcaccgctgatatcgtatttcagggatgctcgtgccgaactgggtataacggcaaaacaaattgccgaagccacaggtaagaaaaatatggtttcccactggtttggtgccagtcagtggcagttgccgaatgaggctgactaccggaagttacaggcactgttttcccgtatagcggcagagaagtttcaggaacagcaactggaacaaccacaccaccagctggtggcatcttatgattcactgaatcgcaaatattctgaattgctggatgagtttaaatctctccggcgctatttctccgtatcagtctccgtgccttataccgatgtctggacgcataagcccgttcagttctacccgggtaaacatccgtgcgagaaaccggcggatatgctccggcaaataatcaatgccagtagtcgacctggtgatctggttgctgatttctttatgggatccggttccacaataaaagcagcaatggcgctggggcgtcgggcgttaggtgttgaacttgagtcagagcggtttaatcagacggtgaaagaggtaagtgaactggtggggaaataa

SEQ ID NO: 399854 - DNA, 204 bp, Salmonella enterica; identical to SEQ ID NO: 4411

SEQ ID NO: 399855 - DNA, 606 bp, Salmonella enterica
atgaatacatattctgataaaatacacaaccttatagatatagccaaattagctgtggccatgagggaacataggtattttttcgcacttcgtcgaggaatagatgttaatttttgtgctgatttaaacgggagtggtacacaagggatattcataagaaaaaaaagttttaacgcgtatgagccaagttttattgaagtaatttttgaacccactcataaaaacgatgattcatttctatacgaagaggaccttactaccgatcaacgaaaagactacgaacctagtattaacagaggaaaacatcgattcgttgcccaacgtgctaaactaaatctcgactgggacagtaatgaaatccaacaatggcgtttggatattgagcgactttctaaaccacacaacactcttaatgactggttagaaaatgattctgagataatgataatacatctctgcggcggttataggttccgtgaaccagtgatactctctcaaagagacattaaaaaatatgtagcttcaggattgactctggaagacttaaaaaatcggctaaagtgctcaatatgtggtgagcgaaacgccaaaattaaagttttttga

SEQ ID NO: 399856 - DNA, 1695 bp, Salmonella enterica
atgcaagggatatccggcggtcttttcgagtcagcttccggcggtagttacaacggtgttgctccgtataccagcttgctattacatcgggcatccggcatcaaagacattattcatctgatcaggctgctatcccgcaccgacccccaggatgagcagcttgtacaagtgcttgcgcattttgtccgaatgcctgttgccgacgtaaaaaaatggtgccgattattcggtatcagcaattcgttacttcgcggattgttaaatcacgcatcctcccttgggcgcgacggctttgatgagatagcgcaggcgataaaaaacggagatatgccaccagctattgactggttttccattcgcccaaccagggtgaaagcattccttagcgcggcgcattcggcatcaccattggcagaaatggttcagaggttgtcgctcatattcacagaccataccgcgttgggtgatctgactctggacgagatgaaagaagcctccattcagtgggccgatcaacaaaatgaggttaactctgacttcttgccagcattcaggaaggccgttagtaaagcggatgatgcccgtggaattctgaaggcatttaaggcattgcaaagtcgtgttaataaacatgtcggtgatatcgatggggtaacggcggaaggccgggatatccttaaagagcacggtataacgccagagtttattgatgagatcaggactgatatgcagcgtgaggtcgtatcgtccctgcaaatcgtagccagagcgttggcggatgctaatccgaagagtgcggccattgttaaccgggttattggtgatattgaagcatcggagggcatgggggtactgaaactcttcctttcgcgagcgtttaatcctaacggcaatattctccctggcattattggtgaggctaaaaagtatgtcagtgaagaagaacttgagcagcttgaccaactacttaagcgattctcatataacccgcagacacgctggcaaatgaatcagcgaagtatgggttcggtccacgagaaagtgttatctgccatgaacagtgcgatcgcaaactcatacgtatctgaagaaaaagctcttgagtgggccgactcttttatcacagaagaagtggaagaagtccgcgctggacagaatggtgggatagacctgcgcaaggaacttgctgatatttatcgcctgaccggcgggaaaatatcgaccttatcaaaggtagttcaccaccagggaagggcatatgcaaatcttaatggtgttgttgctgtcaatttgaacgatgaaaatgcaagtgcactgtggcacgagctgggtcatcatcttgagtacagtaaccctggtttgttagagaaagcccggtcattcctgaaggccaatgttgaaggggataagccatctttcgtcaatatcggtgggcgtggcaagcctgaatggtgcttcagatctcgattgagtaatatttatatggcgaaggtatacccgccagcctcagtaagtaacaccgggaaaattcggcagaaatctccgactatttccaaaacgtcagcaacggaagtattctctatggctcttcagttgtatcatgacaaagaggccgctgccgcatcactgatgaatggtgacggattgctggaactgttattaggtgtggcaaaggagctaaataatgcagattaa

SEQ ID NO: 399857 - DNA, 285 bp, Salmonella enterica
atgcagattttgatttttttaatgtccattattagtggaacctatttatttcttactggagttaggcgtggagcttataagccatgttttttacattggcttgaagcatggctgcttgccataaaaggtggttttgttggtttttgtcttgcagaagttcagtggggaaactcatttttggatgtggttgcttttttgatatgtagttggaatagccattttgtattaagaataaccaaagtatgggtttttcacttgatttacgaatgtattggcaaattatga

SEQ ID NO: 399858 - DNA, 561 bp, Salmonella enterica
atgctgatcggctatgttcgtgtatcaacaaatgaacaaaacacggctttacaaagaaatgcccttgaaagcgcaggatgtgagctaatttttgaggacaaggcgagcggcaaaaagactgaacgccctgggttaaaaaaggttctccgtatgctttccagaggtgacaccctggtcgtatggaagttagatcgtcttgggcgcagcatgcgtcacttagttgtgctggtggaagagctgcgtgacagaggcattaacttccggagtctcactgactccatcgacaccagtacaccaatggggcgctttttctttcacgtaatgggggcgctggcagaaatggaacgtgaacttattgttgaacgtacacgcgctggacttgatgcagctcgcgcagaaggtcgaataggtgggcgtcggcctaaataccaggaagagacatggcagcaaatgcggcgattgctggagaagggcatctcccgtaagcaggttgcaatcatctatgatgtggctgtttccacgctttataaaaagtttccggcgtcatcatttcaatcctaa

SEQ ID NO: 399859 - DNA, 183 bp, Salmonella enterica
atgatcatgctgattctcgcgcctctggtgggcgtgctgggggcgcttttgctggcgtatggtgcctggctgatttatcccccggcggggtttgttgttgccggggcgttgtgcctgttctggtcgtggctggtggcgcgatatctcgaccgtacacagtcgtctgtcggcggaggtaaatag

SEQ ID NO: 399860 - DNA, 1242 bp, Salmonella enterica
gtgttcttttcgggattatttcaacgaaaaagtgacgcaccggtgaccacgccagcagagctggcggatgctatcgggttgtcctacgacacctataccggaaagcagatcagcagccagcgggccatgcgactgacggcggttttttcctgtgtcagggtgctggcggagtcggtcgggatgttgccctgcaatctgtatcacctgaacggcagccttaaacagagagccaccggcgaacgtctgcataagctgatctccacgcatcccaatggctatatgacgccgcaggagttctgggagctggtggtcacctgtctgtgcctgaggggaaacttttacgcctacaaagtgaaagcatttggcgaagtggctgaactgctgcccgtcgatcccggctgtgtggtaccgaagattaacagtagctgggagccggtctatcaggtcacattcccggatggctccacggatgtactgagccaggaggatatctggcatgtgcgcacgctgacgctggacggactggtggggctgaatcccatcgcctatgcccgcgaggcaatatcgctggcggcagcgaccgaagagcacggggccagactgttcagcaatggcgcggtgacgtcgggtgtgttgcgtacagagcagacgctgtcagatcaggcttatgagcgcctgaagaaagattttgaggagcgtcacaccgggcttggcaatgctcaccgcccgatgatccttgagatggggctggactggaagtcgatggcgctgaacgccgaggacagccagttcctggaaacccgcaagtttcagcttgaagaaatctgtcgtctgttccgtgtgccattgcacatggtgcagaacaccgatcgcgccaccttcaacaatatcgaagagctggggctgggatttatcaactattcactggtgccgtatctgacccgcattgagcagcggatcaacaccggactggtacgaaaaagtaagcagggcgtttattacgccaaatttaatgccggggcgttactgcgcggggatatgaagtcccgttttgaagcctacgccaccgggatcaactggggaatttactctcccaatgactgccgcgacctggaagatatgaatccgcgtcccggtggggatgtctatctcacaccgatgaatatgaccacgaaaccctccgatggcagtaaagccggtaagcagaaggataacgccaatgcagacgaaacaacgtcttga

SEQ ID NO: 399861 - DNA, 651 bp, Salmonella enterica
atgcagacgaaacaacgtcttgatgtaccgctgagtctgaaatctgtcagtgactccggtgagtttgaagggtatggctccgtctttggtgtaaaggacagccacgatgatgtggtgatgtccggggcatttgctgcttccctgcgggcgtggagtgacagaaaagcgttacctgcgctgctctggcagcaccgcatggatgaacccatcggtgtttacaccgaaatgaaggaagacgatgtcgggctttacgtcaggggacggttgcttattgatgatgatcccctcgcaaaacgcgcacatgcacacatgaaggccggttcgttaaccggcctttctattgggtacgtcctgaaagactgggaatatgaccggagcaaagaagcatttctgctgaaagaaatcgacctctgggaagtcagtctggtgacgttcccgtctaacgacgaagcgcggatcagcgacgtcaagaacgcactggcccgcggggaaatccccgaacagaaaaaaatcgaaagagtcctgcgtgatgtcggactctcccgttcccaggccaaagcattcatggccgggggctatggcgcactgtccctgcgcgacgctgaggatgtgggctctgcactgaatgcactgaaaaatctgaacttctaa

SEQ ID NO: 399862 - DNA, 1206 bp, Salmonella enterica
atggcggttgatattaaagatgtcgaacaggtcgcgcaggagctgcagcagaagtttgacgacttcaaagcaaagaacgacaagcgcgtggaggcgattgagcaggaaaaaggcaagcttgccgggcaggtggaaaccctgaacggaaaactcagcgagctggaaaacctcaaaagcgatcttgaaaaagagctgcttgagctgaaacgtccggcaggtggtgcgcaaaataaactgaccaccgagcataaagaagcgtttgtgggcttcctgcgtaaaggccgtgaagatggtctgcgcgatctggagcgcaaggcattacaggtgggcaccgatgaagacggcggctatgccgtgccggaagcgctggatcgcaacattctgaccttgctgaaagatgaagtggtgatgcgtcaggaagccacggtgatcaccattggtggttccgactacaaaaaactggtgaatctgggcggcacggcttccggatgggttggcgagactgacgcgcgctcccagactgccacctcaaaactgggcctgattgaacctttcatgggggaaatctacggtaacccgcaggccacccagaaaatgctggatgatgcctttttcaacgtggaagcatggatcaacagcgagctggcaaccgaatttgccgaacaggaagaaattgcctttacctcaggcgatggcaccaagaagccgaaagggttcctggcgtatgaatccactgatgaaaccgataaggtccgggcgttcggcaaacttcagcatattgtatccggcgaagcgacggcggtgaccgcagacgccattatcaaactgatttacacgctgcgtaaggcacaccgcactggcgcgaagttcatgatgaacaacaacagcctgtttgccatccgtctgctgaaagacagcgagggtaactatctgtggcgtccggggctggagctggggcagccgtcctctctggcgggttacggtatcgctgaaaacgaacagatgccggatatcgccgctgatgcgaaagccattgcatttggtaacttcaaacggggttacaccatcgttgaccgtatcggcacccgcattctgcgtgacccgtacaccaataaaccgtttgtcggtttttataccaccaagcgcaccggcgggatgctggtcgattcgcaggccatcaaactgctgaagattgcagcggcgtaa

SEQ ID NO: 399863 - DNA, 201 bp, Salmonella enterica
atgatcctgaaacaagatctgaaatggtcaccggacggtatgcgtgttgaggtcattcgggccggtgagtatgacgacggggcacttcctgcccgggtgcaggagattgcacttcaggccgggttagcagagcgcggaatcagtgcaaaaagcagtaaagcggcaaaagagaaaaaagccacgaccagtaaagagggctga

SEQ ID NO: 399864 - DNA, 324 bp, Salmonella enterica
atgcttctgacaatggaagagattaaagcccaactccggctggatgaggatttcgatgctgatgaccgccatctgcaactgctggcctgtgcggcacaaaagcggacggaaacgtatctgaaccggaagctctatgcaccggatgaaaccattccggacagcgacccggacgggctacacctgccggatgatattcgtctggggatgctgatgcttatcagccatttttacgaaaaccgctcgtcggttacagacgttgagaaaatggagttgccaatgagttttaactggttggttgttccttatcgccttataccactatga

SEQ ID NO: 399865 - DNA, 411 bp, Salmonella enterica
atgaaaattcgtcaggcgcagaccagcgcaacctacattctgccggaccccggcgaactgaataaacgcgtcctgatccgccagcgggtggatatgcccgcggataactttggcgtggagcctcaatacccggttgcgttccgggcatgggcgaaggttatccagaccagtgccaccacctggcaggaaaccgcgcagaccggagacgccatcacccattacatcaccattcgctaccgccgggggatcactgctgattatgaggtggtctgtgatgacagtgtgtaccgggtgaaacgtcagcgcgatctgaacggggcgcggcgctttctgctgctggagtgtacggaactgggcgaatttacgcagagtcacggaggcagcaatggcgactcccttttttcacgttga

SEQ ID NO: 399866 - DNA, 507 bp, Salmonella enterica
atggcgactcccttttttcacgttgatgttcagcagcccgcggagatgcgctttaaccgcgcccgtgtccggcgggcgtttgtcacgattgggcagcgtcatatgcgtgatgcccgtcggctggtgatgcgccgtgcgcggtcggcaccgggtgaaaaccccggttatcagaccggacgcctggctcgttcgattggttacatggtgccgagagccagtaaaaagcgagccggttttatgacacgcattgcccctaaccagcgcaacgggaaggggaaccggatgatctctggtgacttctatccggcgtttctgttttttggtgtccggggaggagcaaaacgtcgtcgtagtcatcatcgtggtgcatccggtggcagcggctggcggctggctccacgtaataactttatggtggaaacgcttgaaaagaaccgcagctggacacgctattttctggcgcgggaattgcgtaaatcactgaagccggagcgacgacacagatga

SEQ ID NO: 399867 - DNA, 561 bp, Salmonella enterica
atgaaactgacgcctgttattgctgcgctgcgtgcccgctgcccgtattttgaaaaccgggtggcaggcgcggcacagttcaaaaatctgccggaggtcggaaagctgagactcccggcggcgtatgtggtaccgggtgatgactctccgggagaaaacaaaagccagaccgactactggcaggagctgaaagagggcttctccgtggttgtcatactgagtaacgggcgtgatgagcgcggtcagtttgcctcgtatgatgtggtggacgatgtccggcagatgctctttaaggctctgctgggctggaacccggaagcgtgcggtaacccgattacctatgacggcggcacgctgctggatctgaatcgtcatgagctgatttatcagttcgatttttcggtcatcagcgagctgaccgaagacgatacccgccagcaggatgacctgaacagtctggatgaactgcgaacgctggcgattgatgttgattatctcgatcccggtaacgggcctgacggcgatatcgaacatcacaccgaaataacccttccttcctga

SEQ ID NO: 399868 - DNA, 168 bp, Salmonella enterica
atgtttgtgaaacctgttaaagggcggtcagttcctgaccctgcccgcggcgaccttttgcccgccgaggggcgaaatgttgatgagaacaactactggctgcgccgtgaagcagcgggtgatatccggcgcgtgaatgaaaaggtgaataccgatgacgagctttaa

SEQ ID NO: 399869 - DNA, 1494 bp, Salmonella enterica
atgacgagctttaacaccattccgtcgaatacgctggttccgattttttatgcggaaatggataactcggcggcgaatactgcacaggacagcggagcatcgctgctgattggtcatgccaataacggtgcagagattgttgccaacagtctggtgctgatgccatcggcagactatgcacgccagatttgtggtgcgggaagtcagctggcgcgtatggtcgaggcttatcgccagaccgacccgtttggtgaactgtatgtgattgccgttcctgaatccacgggcgcggcggcaacagttacgctgacggtgaccggcgcggcaaccgaaaccggcacggtgaatgtttatgtgggacgtacccgcgtgcaggcaccggtgaccaacggcgataacgtcgcgacgattgccagcagtatcaaagatgccatcaatgccgttccgaccctgccgtttactgcctcatcttcggcaggcgtggtcacactgaccgcgcgtcataaggggctttgcgggaatgaaattcctgtcagcctcaattactacggctttggtgggggcgaagtgctgccagcgggcgtacagattgccgtggcgacgggtaccgccggaacgggcgctcctgttctcaccggcgcggtggctgcaatggcggatgagccgtttgattatatcggtctgccgttcaacgacactgcctccgttaacacgctggtgaccgagatgaacgataccagcggtcgctggagctatgcgcgtcagctgtatggtcatgtgtatacggcaaagatcggcacgctgtcagaactggtgaccgcaggtgatcagtttaaccagcagcacattaccctggcggggtacgaaaaagagacccagacgcctgccgacgagctggcggcaagccgtaccgcccgcgcagcggtgtttattcgcaacgatccggcacgtcccacgcagaccggtgagctggtgggtatgctgcctgcgccgaaggggaaacggttcacgatgaccgaacaacagaccctgctgtctcatggcgtggcaacggcgtatgtcgaaagcggggtactacgcattcagcgtgatgtcaccacgtacaggaaaaacgcttacggtgttgcggataacagctacctcgacagcgagacgctgcataccagtgcgtatgtactgcgcaaactgaaatccgtcattaccagtaagtacgggcgtcacaagcttgccagcgacggtacccgctttggtcccggtcaggcgattgtcaccccggcggtgatcaaaggggaactgctggcaacctaccgtcagcttgagcgtgcggggatcgtggaaaactacgaactgtttaagcagtacctggttgtggagcgtgatgccagcgatccgaaccgcctgaacacgctgttcccgcctgactatgttaaccagttgcgtgtctttgccgtggttaaccagttccgtcttcagtattcagaggagtctgcataa

SEQ ID NO: 399870 - DNA, 192 bp, Salmonella enterica; identical to SEQ ID NO: 388571

SEQ ID NO: 399871 - DNA, 819 bp, Salmonella enterica
atgagtatggagctgatggttaaagcgatgaaaattcgagtgggtaatccattgcgaaaactggttctgatcaagctggctgataatgccagcgatcagggtgagtgctggcccagctatcagcatattgctgaccagtgcgagattagcaaacgttctgtgatgaatcatattgcggccctttgtgagtccgggctggtaaaaaaagtcacccggaaaggtgaaaaaggtaactcaagtaatatctatctccttcatctggatggtgcaggagattcactagggggtagtgcaaataattcactatctggtgcagcaaattcaccaggtagtgcaggagttgcaccagggggtagtgcaggagattcacccagaaccagtcactcttttgaaccagtcaaagaaccagtcaatgaaccaatagctgttggtgcatcagttgatgagtccgtgcgagttcgttcaaaccgaccggaatactctccggagtttgagcaggcatggctggtatatcccaaacgtgctggtggcaattcaaaatctgcagccttcaaagcctggaaagcccgtttgaatgagggggtaaaccccgaaaccatgctggaaggtgtgaaacgctacgcgggctgggtatctgcgatgggtaacagcggcacacaatttgtgaaacaggctgtcacgttctttggtccggatcgtcatttcgaagaatcctgggaagttcctgcggtatctgcagccagacgcgaggacccgtacttcaaagccagttacgacaacgtggattacagccagatcccggcaggattcagggggtga

SEQ ID NO: 399872 - DNA, 225 bp, Salmonella enterica
atgatccggaatattttcaaacgatttaccaatcagactttccgttgtcctcgccccggtcagtggtacaccacgcctgcagggcatgttctacgtgttagcctggttgaccgtgaatgtcagaaggtggtttgtgaaccgctgggccgtaattaccgcgtcagtatgccgcttatagcctttcgctccggaaaaaacatgaagcatctcggaggtgcagcatga

SEQ ID NO: 399873 - DNA, 1149 bp, Salmonella enterica
atgaacagtttaacggcaaataaccgtttgtcgcaacagctggtggtcagcgtcgctgaacacctgttgttacggcatgaatgcagattaccaaatcacctggctgtaagtaaccacagagaactttacctgactgtggggggcgagttgtgcaggaacttaaccgctggtttcgtgacggaagagggctttatgtccatgttattcgttgggagccagaaacacagcgcgttatctatcttcgcaaagactacccgcatgagtgctttagtcctttgtggaaattcaggcgtgattttgttgagtgtgaaggaccaccagcacattgattctgccattccgggacgttacactgttcaggcaccttataaagcgggtgccgggattggcgtcctggagaaggctaccgcgtacaaccgcgtagatgcggtttttttgtacgcattattttgtcacgcccaaattatggtggggcgtacaggggcatcgcaagatgcgccggtaagggtagccgccggtaacgccaactctgtacgtctcaccacctctatgattggcgtcttatgtggtgagttttttaagcttgctaccgaggctgccattatggctacgatcccaacctttgttcaccctgaaatcacgatcatcaatggtcgtgctgtcactacatctcttgcagttgctaactactttactaaacggcacgagcgggttttagatagaattcgaaaccttgaatgctccgctgaatttgctgaacacaattttgtgttaagtggttataccgacgcttcaggccgcaaactaccttgctatcaaataacccgcgatggctttgcgtttcttgctatgggtttcacgggtaaacgtgctgcccagttcaaagaggcatacatcaatgcctttaaccagatggagaaacagctttcaaagcccgctgtaccgagcgacgttgcacataacgccagcgttctctattcctacatttcatcaattcatcaggtctggttgcagcagctttatcccatgctggaaaaagctgaatcacctctggctgtaagtctgtatgaccgaattaacgatgcggcatttcttgcccgtcttattcattcgtcgctgaactcttcagaggtaagggggcgcaaatga

SEQ ID NO: 399874 - DNA, 552 bp, Salmonella enterica
gtgggtaagcatcactggaaagtagaaaaacagcctgagtggtacgtgaaagctgtcagaaaaactatcgcggcgttgccgggggggtacgctgaagctgctgagtggctagatgtaacagagaacgctttattcaaccgccttcgtgcagatggcgatcagattttcccgctgggatgggcaatgattttacagcgcgcggctggcactcactacattgcggatgctgtcgcacagtctgctggtggggtgtttgtatcgcttcctgaaattgaggaagtagagaacgccgatataaaccagcgcctgctggaagtcatcgaacagatcgggagttactcaaagcagattcgttcggcaatcgaagatggggtagtggagccacacgagcagacagcaattaatgatgagttgtatctgtcaatttcgaagctccaggagcatgcagcactggtctacaaaatcttttgcgctccagaaaagagtgacgcccgcgagtgtgcagctccgggcgtcgtggcgttttgtgtctgtggagaaactaacgcatga

SEQ ID NO: 399875 - DNA, 201 bp, Salmonella enterica
atgaaagcgtattgggactctttaaccaaagaacagcagggcgagttggccggaaaagttggctcaacaccaggctacttacggctagttttcaatggttataaaaaagccagttttgtgctggctaaaaaacttgagcaatgcacgtcaggtgcaattacgaaatctgacttaagaccggatatctatccgaaagattaa

SEQ ID NO: 399876 - DNA, 675 bp, Salmonella enterica
atgaaaacagtccatgacatccggcggtctaacgccagaaaactgagagatggtgttggcgggaattcttcctttgccaccatgattgatcgcgagccaacccagaccagcaggtttatgggagatggtgctactaaaaatatcggtgacagcatggcacggcacatcgaaaaatgtttcgacctgcctgtcggatggctcgatcaagaacaccagacaacgaacatcacaaaaaaacctgatgtttcaatcactaataaacaaatcacattagtccctgtcatatcatgggtacaggccggagcatggaaagaagttggatattctgaggttgatttgagcacagcagaaacgtatccctgccctgtaccctgtggggaaatgacttatatcttgcgggtgataggtgattcaatgattgatgagtaccgcccaggagacatgatttttgtagatcctgaagtccctgcctgccacggtgacgacgttattgcattgatgcacgatacaggtgaaaccaccttcaaaaggttgatagaagatgggacacagcgttatctcaaagcgttaaacccaaactggcctgagccttacattaagatcaacggtaattgctctataattggtacagtgattttctcaggaaaaccaagaagatacaaaatcaaagcctaa

SEQ ID NO: 399877 - DNA, 192 bp, Salmonella enterica
atgaccaaagaagaaaaaattctttatttattccaactatcggttaagacacacactgcatatcagactgctgccatgacatcagataaaaattacagtacgtcagaaaacccgatagacgacataagcaagctttacgataagttcgaagcactactcgataaaaagtttgctgaggctgggcttgagtga

SEQ ID NO: 399878 - DNA, 192 bp, Salmonella enterica; identical to SEQ ID NO: 5272

SEQ ID NO: 399879 - DNA, 630 bp, Salmonella enterica
atgaattccaattcaataaatgaattcattagtaagaaggctaccgccgtatgggtgtggttgaataaacttgccgcatatactatttcgatagtccttcctattattggtgctaatgttgaaaaatggcttaagcctttcttggataaaatttatgcccctgagttcctgaagacggatttcgctgtttatggttcagtgtttggggtatgtggcgttcttgcgacgattgctgtcaaaagacttgttgtcattgatgcaagatttaatagcgaagatgcttataaaataagagagctgaaaaaagaaaataaatcgcttaggttaaaaaacaaaaaattatacactgaaaaacaaaaagataaagaattgcatgaggctaagttgagtcagtcaatagcagagtgtgaaaataaaaataaacaagaaattgatagtttaaaaaagaaacacgaagaagtatttgctaggaaaatagacgatcatgagcgagaggtgaggcggttacaagaatatataaagcttcaggaggttgccatggatgccatgaaaaactacaagtcagtcgagcaagatatccgggagtataacgtttccggtaatactcggaaaattcacatagatgactaa

SEQ ID NO: 399880 - DNA, 513 bp, Salmonella enterica
atgttttatctttttattgcatggtgtaaaataacttatttctctatatgttgcaagggtgttaaattggaatactttactcttttagcaaaagaactttcaaagttagatagtgttagtaatattcaagaggaattgctaaagaaaggaggtaaaacaacaaaagcttataaaattgattttgattacgctaagtttcctcttacaggtcttgaggttacagatggggctgggttgagatttgtcaatcttagattaacaatttcataccctagggataaatattctgtagacttcgtattaagggttttaaatgacttcaattcgacgagcgtgtgtttaaaggctttctatgtcgatgatggtgataataataaagattttgatatagcatataatatagaggacgtttttttagcatctgagcatgatcttggtcctgctctcgagaaaaagatagagatgcttgttcgtggtccattgagtgttcataaggaaatggataaggaatga

SEQ ID NO: 399881 - DNA, 123 bp, Salmonella enterica; identical to SEQ ID NO: 234607

SEQ ID NO: 399882 - DNA, 276 bp, Salmonella enterica
atgaaagtccagattttaaacaatagtggtgaagtcgtttggtcatacgacatagccgctcctgtagatcagagcggcgatagctggaccaatgggaaacatcagattatggctggagttgtattctctttacgccgtgctttggaacaggctgaagtatttccatcagaccctgaatggaaatggcctttttctatttgtccaaattcggagagcacatttcagaaaattggtcagaaagtcgcactcgaagagcatcagccaactgtttcctga

SEQ ID NO: 399883 - DNA, 489 bp, Salmonella enterica
atgaagaaaatgtttatattgttgttggctgtaggactgccattaaactcctttgcgaagccagtaacggaaaagcagcttgctacatactttatagataacgttaaaacttcagcggataagaatatagatctagatgtagagggaataaatagactgtctgtaatatgcccagcaaagtcggcaagtggaactcttttaataaaaaaagcatcctacgagtttaataaaagcattggtgcttttgattttgaaaataactcacaatctgcaccattgacttttattgtaccaattagtgaggatgaaaataactttgactcggaaattattggtttctcttttgcatttaaaatgccaagagggcaattctttgttgatgttacgaaaacagggaaggtaaaggctggcgtaaatattagtggtgaaagcggaattacttattcatcatgtagaatagatactcataatgttgattatgatcgttaa

SEQ ID NO: 399884 - DNA, 1902 bp, Salmonella enterica
atggctgataattttcagcttaaagccatcatcaccgccgttgacaggctatccggcccgcttaaaggtatgcagcgtcagcttaaggggtttcagaaagaagtctccagccttgctctgggcgctgccggagcgggtactgcaataatgggggcactggcactccctgtaaaatcagccatcacccttgaatcgaagatggctgatgtccgcaaagtggtggacggtctggatacgccggatgcgtttaaggccatgacggagcaggtacgcgctttgtctactgagcttcccatgtctgcagacgggatcgcggaaattgtggcggctggcggtcaggccgggattgcacgtgatgaactgatgcagtttgccactgatgcggtgaagatgggcgtggcctttgataccacggctgaagagtccgggcagatgatggcccagtggcgtactgcgtttaatatgacgcaggatgaagtggccgggctggctgacaaaatcaactaccttggtaataccggcccggcgaatgcgaagaaaatctcagatattgttacgcgtattggtcctttaggtggtgttgcaggtgtggcttccggcgaaatcgcggcaatgggggcaaccattgccgggatgggcgtggagtcagaaattgccgccacagggatcaagaacttcatgctttccctgaccgcgggaaattccgcgacaaaatcgcagaaacaggcattacgttttctgcggatcaatccgaagaaattagctgctgatatgcagaaagatgcccggggaaccatgctgtctgtactggatgcgatggctaaagtgcctaaagaaaaacaggcagctgtgctgaatgccctgttcgggaaagagtctctgggcgcgatagcacctctgctgactaaccttgatttgttgcgtaccaacttcaggcgggttgcggattcccagcagtatggcagttcgatgcagaaggaatatgcttcgagggcagcgacgacggaaaaccagcttttacttctgcaaaatcaacttgatgccatttcttccactctgggggaaacgtttcttcctgaggttaatgatggtcttgaagcggtaaaaccgctccttgaggaagtgagaacgtttgtccgtgaaaacccggagctcgttaagaccattgctaaaatcggtctggctttactgacagtgggggccgctgcaggctctttgtccagaatcatgaaagttctcggcggtgtgatgaatatgacgcctgctaaggggctgattgctcttctggttggtggcgcttacctcattattgataattgggaaaccgtaggtcctgtcataaaaaaagtctggcacgtggtggatgaaacggcgcaggcgatggggggatgggaaactgttctgaaagcgattgccctgtttatggcaaccaaatgggttgctgacgttaccaaatccattaccgcagtgaccagagagatgcgtacgctggggaaggtatcggcagaaacgggattgatggggaaaggccgcggctttatcgggaaggccggggtatatggttttctgggaaccctgatgtatgagccggttaaagatactctggaaagtgttgttcctgaagatacggttaactggctggataataaagggctgtttctggcttcagactggacgcctttttttgatcgtaaagagtacgagcagtatcaggccagcctgagtcagtacaaacccaatgttccgctgttgaatccatcttcttccatgacacagcacagcgagctgaaagtcacgttcgagaatgctccgccaggtatgaagataattgatgtaccgggcaaagccgatcccctgatgaaaatcacgcacgatgtggggtattctccattcagacgataa

SEQ ID NO: 399885 - DNA, 324 bp, Salmonella enterica
gtgattgagcttgtacttaaaaaaccgatcatcgcccacaaagaaacactgcatgtgctggaaatacgtgagcctacgtatgacgagattgaggcgctggggttccctttctctgtttcgcctgatggtggtatgaaaatggacagtcaggtagcgctgaaatatatcccgcttctggccgggatcccgcgctcgtctgcagcgcagatgacgaagctggatatttttaaggcaggcatgattgtaatgcgtttttttaccggcttggagacggaagagacctccggaagcgattctacaatgtcgcgtggttctggaaattaa

SEQ ID NO: 399886 - DNA, 228 bp, Salmonella enterica
atgtgtctcagttttgtcacaccttgtattacgacttgcatagccaatgaagataaacgtgacgacaaacggcgcagcagtcttcttttccttcatactttccccacccagcatgcatacctttatgccataactgaagtttatgtctgttatgagcaagaagcggaagttggcagttttgtggactgtccccacaaaagtgactacagaaatagttgcaattcataa

SEQ ID NO: 399887 - DNA, 1242 bp, Salmonella enterica
gtggaaacacatgaatacccgaaccgcgacaagccctataccgaagatctgggaaaagtcactttccgcccgtccatcacagcttatgtggtgggagatgactgctttgaccagcgcgatcgcctgattgacgcgctgaataaacccggtcccggcacgcttgtccacccgacatatggtgagctgaaagtctgtgttgacggggaagttcgggtcagcacatcgaaaagtgaagggcgtattgtccgctttgacctgaagtttgtcgaagcaggagaactctcttaccccacatcaggtgcggcgacggcgcagacgctgatgtcatcctgttctgcactggatgactgcatcagtgacagcttcagcggtttcagtatcgatggtgtggcggatttcgtgcagaacgacgttatcggtaatgccagcataatgctggggtatgtttctgatgcgatgaaagtggtggattctgccgtatcggatgccgccaggctgttgcagggggatatctcggtacttctgccgccaccatcgtcaggcaaaaatttcgttgagcgggtgcagaaaatgtggcgtaccgggaaacgcctttatggtaacgccagcgacctggtcaccatgatcaaaacgctttccggtgtcagcctcggcagcgatctgcaaccgcgcggcgtctggaaaacggacagtaaaaccaccgccacggcgacacagcagcgtaacgtggttgccagcacccttcgtacgaccgcaatcagcgaagcggcgtatgccgtcacccgattgcctgcgccaacaacttccgcggtgatgcagaatgccgcagtggggcaggcaacaacacctgcgcagagcactggctggccttccgtcacgcatccggcactgaacaatgcaccggcggtgaaaaacacagttgacctgccgacgtgggaagaactgactgacattcgcgacacactgaatacggcaattgataaggagttgtcccgtacaaccagtgatgcgctgtttctggcgctgcgccgggtgaaagcagatctgaatgcggatatcaacacgcgccttgaacagtctgcacggatcattcagcgcacgccggatgaggttttacccgcgctggtgctggcggcgacctggtttgataacgcggcgcgtgacgcggacattatccggcgtaatgccattacacatcccggctttgtgccggtgatccctctgaaggtgccagtgcaatga

SEQ ID NO: 399888 - DNA, 150 bp, Salmonella enterica
atgtctcagaacttagacgcaaccgcaattaatcaaatccatgcccttatttctgctcagggtgttaatgaaattatcagtaatattggtgccgatgctgtggcattgcctgagaattttcgcattcatgatctggaaaatttaatttaa

SEQ ID NO: 399889 - DNA, 174 bp, Salmonella enterica
atgaagttcgggataataaagtctgaagatacttttatccctagaaaattcagcaatgcaacattaggaaaagagtactcaaccgttttaaatctgtatatttcagatgctttagaaaaactatcacctgtctcttatacacatctgacgctgccgacgatctactctgtgtag

SEQ ID NO: 399890 - DNA, 189 bp, Salmonella enterica; identical to SEQ ID NO: 376354

SEQ ID NO: 399891 - DNA, 327 bp, Salmonella enterica
atgcacgcggcggcgcagttcaacactttgcagccagtccaggatgaacagcgtgcgctcgatccggcccagctcgcgcagggccacggccagtccgttctggcgcgggtagctgccgagcttgcgcagcatcagcgaggcggtgacggtgccctgcttgatcgagctggccaggcgcaggatgtcgtcccagtgggcacgcacgtgcttgatgttcagggtgccgccgatcagcgggcgcaacgtcgggtaggcttgcacgccctgcggcacgtacagcttggtttcgccgaggtcgcggatgcgcggcgcgaagcggaagcctag

SEQ ID NO: 399892 - DNA, 225 bp, Salmonella enterica
atgccagtggcatttgaatttaaatgcgttccgtttgaaggtctgaaagaacgtccgtttaaattacgcctcagtattatcactggcgatcgtcctgtactggttctgcgcattattcagctggaggcggtgcaggaagaaatggctaacgaatttcgtgatctgcttgttgagaaattcaaggacagcaaagtagaaacctttattggtactttcaccgcctga

SEQ ID NO: 399893 - DNA, 1236 bp, Salmonella enterica; identical to SEQ ID NO: 376488

SEQ ID NO: 399894 - DNA, 855 bp, Salmonella enterica
gtggcttacgaaaaaaaagttgagggtagaaaaaacagaattacattcacacaattatggcgaaaatttcttgccagtgccgattatgctgatctggccccaagaacgcagaaagattatctggcacatgagaaatatatacttgccgtatttggtgatgccgaagctaaagcaataaagccagaacatatccggcgttatatggatgcccgtgggcaaaaaagccgtgtccaggcgaatcatgaacacagctctatgtcgcgcgtatttcgttggagttatcaacgtggttatgttcctggtaatccttgcgttggtgtggataagtttcctaagcctcaacgcgatcgatatattaccgatgaagagtacagagcgatatataataacgcaacgccagccgtcagggctgcaatggaaatagcttatttatgtgctgccagagtttctgatgtattgaaaatgaactggaatcaaatactggagaaaggaatttttattcagcaaggaaaaaccggagttaaacaaattaaatcctggacagatcgcttacgtgatgccgttgaaatatgtcgtgaatggggagaggaaggccctgttatcaggactatgtatggcgagcgttattcttataaaggatttaacgaggcgtggagaaaggcgcgaaaggctgcgggggatgatctgggacgtcctcttgactgcactttccacgatctaaaggcaaaggggatttcagactatgagggaacggcgaaagacaagcagaagtacagtggccacaaaaccgaatcccaggttcttgtttacgatcgcaaggtgaaaatgagcccaaccctggacaggaagcgttga

SEQ ID NO: 399895 - DNA, 228 bp, Salmonella enterica
atgagcgatcgcttcctgactgaggaggaactggaagatgctacaggagcaagccagaaatcactccagaaagaagtattaacgctgaacggtatttattttatagaacgccgggacggttcaatcagaacaacctggtatcatataaatcacccagtttcgcgccttcttccaccagcagggtatcagcctgtaccaggcatgaattttgacgctatagagagttaa

SEQ ID NO: 399896 - DNA, 570 bp, Salmonella enterica
atgaataacttgatgatcgaccttgaaactatgggtaaaaaacctaacgcgcctgttgtctccatcggtgctgtgttcttcgatccgcaaagtggtgaaattggacctgagttctataccgccgttagccttgaaagcgcaatggaacaaggtgccgttcctgatggcgataccattctatggtggttaagacaaagcccggaagcgcgagcggctatttgcgctgatgcagtatctgttacgaccgcgcttattgagttcaatgactttatcacctgtcacgccgacgatttgaaatacctgaaggtatggggtaacggtgccaatttcgataacgttatcctgcgtggcgctttcgaacgtgccagcctcccctgcctgtggaattaccggaacgatcatgacgtccgcacgatggttactttgggtcgtgcaatcggcttcgatcccaaacgtgacatgccgttcgaaggcgatatgcacaacgcgctggctgatgccaggcatcaggcgaaatacgtttcagctatctggcagaaactgatcccgcccaccagcaacaatatctga

SEQ ID NO: 399897 - DNA, 582 bp, Salmonella enterica; identical to SEQ ID NO: 376100

SEQ ID NO: 399898 - DNA, 258 bp, Salmonella enterica; identical to SEQ ID NO: 376099

SEQ ID NO: 399899 - DNA, 534 bp, Salmonella enterica; identical to SEQ ID NO: 376098

SEQ ID NO: 399900 - DNA, 540 bp, Salmonella enterica
atgagttttattcaaacactttcaggtaaacaatttgattatctcagcgcaactattgacgacattgatattgaagatatcgccgtggcgctttccaatatttgccgcttctccggacatctccctgaattttatagcgtggcgcagcattccgtactgtgcagccagcttgtatcaccggagtttgcctttgaagccctgatgcacgacgcagccgaagcgtattgccaggatatccctgccccattaaaagcgttactgcctgattatcgcgagattgagaaacgtaccgatcaactgatccgctttaagtttggcttgccactggaagaagccagcgtagtgaagtatgcagatcttaccatgctggcaactgaacgccgcgatctggatattgatgacagtattccctgggtaatactggaaggtatccccccgacagatttattcgaaatctacccccttcgccccggtcaggctttcggcctgtttatggcccgctttaatgaactgatggagctacgccaatgtgctgcataa

SEQ ID NO: 399901 - DNA, 828 bp, Salmonella enterica
atgtctcagttagacagcggcacttttcagcaggtaaaagacctggtcctttctggctatcacctgaacgatattcaggggctggcttgcccgacagcattattacctgccggaacaggtgttgaaagcctcgaacgctttgctctggagcgtttccgcttccgcggcaccatgactaccaccagcattgaagactttgtccgttattcaaagggctatgccagtgcaaccgaaaaagcacgctgctttattgatgctgaccatatgacagctcgctcagttttcaatattggtacgctggataaccccggtcatgcagacaacgctgcttctatcacgctgaaacagactgcaccattccgcgccctgctacagatcaacggggaacgcctgaaacaaaaacagatcgccgaatggcttgaagactggagcgattatctcctggcgttcgattctgacggtaacacaatgcagatttcacaggctgcccaggctgttcgccgcattacgatccaacaggcaacccagcaggatcatgaagatggcgatttcagcggtaagaaatcccttatgcaaagcattgaggccagcagcaaagatgttatgccggtggcttttgagttcaaatgtgttccgtatgagggtctcggcgaacgtgcgttcagcctccgcaacagcctgctgaccggtgatgaacctcgctttgttctgcgtatcgtacaactggaagcgcaggaagaagcgatcgccaatgaattccgcgacatgctgatcaacaaattcgacggtgaatcagtagaaacgttcatcggtaactttaaagcgtaa

SEQ ID NO: 399902 - DNA, 534 bp, Salmonella enterica
gtgttctgccgtgacgccgacctttttacacaacagaaaagtgcatctccgcgcgacgggctcattaccccatccacccggaaagctgttacagcaggtgctcttttctgttttgtggagaaaccaactggcggtggcaaccgccatcttgaggggttaacgatgaatgatgaccgcatgaccgtagtgcccgactttctgggcgaactggatgccggcgtgttcatgaacaaaatcgcggcagcgctgaatactgtcggattaggcgttctgaataacggcaataaaggcaaggtagtcctcacctttgattttgagcgcatgggaaattcagtcgaagagaagcgcgtcaaaattaaacacaagctgcagtacagtactccgacgccgcgcggtaaagcgtcagaagaggacacaacagaaaccccaatgtgggttaacaagggcggaaagctcaccatactgcaggaagatcagggtcaactgctcagtattaaaggcactactgacggaaagcttaaagcggctcagtga

SEQ ID NO: 399903 - DNA, 225 bp, Salmonella enterica; identical to SEQ ID NO: 376097

SEQ ID NO: 399904 - DNA, 339 bp, Salmonella enterica; identical to SEQ ID NO: 376096

SEQ ID NO: 399905 - DNA, 696 bp, Salmonella enterica
atgaatataggaaaccgtgtcagacaacttcgccgcgcgaagaacatgaaaattgctgagctagcagaagccatcggcgtggatgccgcaaacatctctcgtctggagactggcaagcaaaagcaatttaccgaacaaacactttctaggctggctgactgcttaggtgttgatatagcagaactctttacctcagacccaaaaggtaatactgtatgtaaacacagtgatatgaggaaggattcagctaacgtgaaggatttgttccgtatcgagatactggatgtcagtgcaagcgccggtaatggactcattcagggcggtgatgttatcgatgtaatccatgctatcgaatataacaaggacaaagcattagctatgtttggcgggcgccctgccgctgagcttaaagtgattaacgtgcgcggtgacagcatggcgccaacaattgaaccgggagatcttatttttgtcgatataagcatcaaccagttcgatggtgatggcatctatgtctttggctttgatgataaaatatacgtaaaaaggctgcagatgatccccgataaattattggtgatatctgataacactaactacagggaatggagtattaccaaagacaacgagtgcaggttcggcgtttttggcaaggttctgataagccagacgcagtcactcaaacgacacaattaa

SEQ ID NO: 399906 - DNA, 225 bp, Salmonella enterica; identical to SEQ ID NO: 371888

SEQ ID NO: 399907 - DNA, 555 bp, Salmonella enterica; identical to SEQ ID NO: 376637

SEQ ID NO: 399908 - DNA, 495 bp, Salmonella enterica; identical to SEQ ID NO: 376080

SEQ ID NO: 399909 - DNA, 1011 bp, Salmonella enterica; identical to SEQ ID NO: 372344

SEQ ID NO: 399910 - DNA, 138 bp, Salmonella enterica; identical to SEQ ID NO: 372345

SEQ ID NO: 399911 - DNA, 825 bp, Salmonella enterica; identical to SEQ ID NO: 376363

SEQ ID NO: 399912 - DNA, 495 bp, Salmonella enterica
atgcaggggcagtccttcgataaatctgcttacccgttactggctatagcgtatccgtccggcgttatccctgacatgagaggctggacaataaagggtaagcccatcagtggacgtgccgtattgtcgcaagaaatggacggcaataaatcgcactcgcacaccgcgcgggcgcaggatactgacttagggacaaaatctacctcatcttttgattacggcacgaaatcgaccaataccacgggcaaccatactcaccagttcggcggttatatcaattcatactggggagactccaatcacacctcatttcagcctggaggtggtgcatggacacaggccgctggcgaccatgcgcatacagtttatatcggaggacacgagcacaccatgtatatcggtccacacggtcacgtcgttattgtggacgcagacggtaatgcggaaaccacggttaaaaatattgcatttaactacatagtgaggctggcatga

SEQ ID NO: 399913 - DNA, 255 bp, Salmonella enterica
atggatactgcaagatatgattatggtttgaatagtcaggcaggagcagaattgtttgctgcatcgttgatgggcggcgattcatcgcgctctggagaactaagagaaaatctcagagaagaggttggtgataacgtattggcagataaaatggctgcgattattgaaagttctgcgggggcaggtaaagaccaagcgggcggatatttagcgcctgtatcaaggtatttgtccgtagccaaaggaggccgttaa

SEQ ID NO: 399914 - DNA, 2319 bp, Salmonella enterica
atgaaaattagcgacggaaactggctgatccagcctggccttaatttgattcacccggttcaggtgttcgacgttgaacagcaggggaatgagatggtggtctatgccgcgccgcgcgatgtccgcgaacgaacctggcaactggataccccgttgtttaccttgcgctttttctcgccgcaggaaggagtgataggtgtacggatggaacacttccagggcgctttggataacggcccacattatccactcaatgtcttgcaagatatcaacgtagagatgcagaacaacgccgaatttgccgaactcaagagcggcagcctgagcgtgcgcgtcaccaaaggcgagatctggtcactggattttctgcgcaacggtgtacgtatcaccggtagccagttgaaaaataacggctatgtacgggacaccaacagcgggcgcaactacatgttcgagcgtctggatctcggcgtgggcgaaaccgtctacgggctgggcgagcgctttaccgcgctggtgcgtaacggtcagacggtggagacctggaaccgcgacggcggcaccagcaccgagcagtcttacaagaacatcccgttctatatcaccaaccgtggctacggtgtgctggtaaaccatccgcagtgcgtgtcgtttgaaattggctccgagaaagtctccaaagtccagttcagcgttgagagcgagtatctggaatacttcgtcattgacggcccgaccccgaaagacgtgctgaaccgctatacccaatttacgggtcgtccggcgctgccgcccgcctggtcgtttggcctgtggctgaccacctcatttaccaccaactacgacgaagcgaccgttaacagctttatcgacggtatggccgagcgcaatctgccgctgcacgtcttccacttcgactgtttctggatgaaagcttttcagtggtgcgattttgaatgggacccggtgactttccccgatccgaaagggatgattcgccgcctgaaagcgaaagggctgaaagtctgcgtgtggattaacccctacatcggccagaaatccccggtcttccaggagctaaaagagaaaggatatttgctaaaacgcccggacggctccttgtggcagtgggataaatggcagccgggactggcgatttacgacttcaccaacccgcaagcctgcgaatggtatgccgacaagctgaagggcctggtggagatgggagtggactgcttcaaaactgacttcggcgaacgcattccaacggatgtgcagtggtttgatggttcagatccacagaaaatgcataaccattatgcctatatctacaacgaactggtgtggaacgtgctgaaagagaccgtcggcgttgaagaggcggtgctgttcgcccgttccgcctcggtgggcgcgcaacagttcccggtgcactggggcggcgactgttacgccaactacgaatcgatggcggaaagcctgcgcggcgggctgtccattggcctgtcaggatttggcttctggagccatgatattggcggattcgagaataccgcgccggcgcatgtctacaagcgttggtgcgcattcggcttgctctccagccacagccgcctgcacggtagcaaatcctaccgggttccgtgggcctatgacgacgagtcctgtgacgtggtgcgcttcttcaccgaacagaagtgccggatgatgccgtatctgtatcgggaagcggcgcgcgccaacgaagccggtacgccaatgatgcgggcgatgatgctggagttcccggacgatccggcgtgtgattatcttgatcgccagtacatgctgggagatgcggtcatggtagcgccggtatttagtgaagcgggcgacgtggagttctacctgccagaaggccgctggacgcacctgtggcgcaacgatgaagtgcagggcagtcgctggcataaacagcagcatggcttcctgagcctgccagtgtacgtgcgtgacaatacactactggcgctgggcaacaatagccagaagcccgattacgcctggcatgagggtacggccttccagttattccatctggatgacggctgcgaagcggtctgcgaagtccctgctacggatggttcgacaatctttacgctgcaggcgaaacgcacaggcaataccattacggtgagcggcgaaggcgaggcgcgcaactggacgctgtgtctgcgtaatattacgcagattagcggtaccaaatgcggctcatatgcgggaagtgaactgggcgtagtgatcaccccgcagggaaatgaagtggtgattacgctttaa

SEQ ID NO: 399915 - DNA, 378 bp, Salmonella enterica; identical to SEQ ID NO: 374161

SEQ ID NO: 399916 - DNA, 255 bp, Salmonella enterica; identical to SEQ ID NO: 28072

SEQ ID NO: 399917 - DNA, 255 bp, Salmonella enterica; identical to SEQ ID NO: 28072

SEQ ID NO: 399918 - DNA, 255 bp, Salmonella enterica; identical to SEQ ID NO: 28072

SEQ ID NO: 399919 - DNA, 255 bp, Salmonella enterica; identical to SEQ ID NO: 28072

SEQ ID NO: 399920 - DNA, 255 bp, Salmonella enterica; identical to SEQ ID NO: 28072

SEQ ID NO: 399921 - DNA, 255 bp, Salmonella enterica; identical to SEQ ID NO: 28072

SEQ ID NO: 399922 - DNA, 165 bp, Salmonella enterica
atggtaaataatataaatgcggcctgtagtatagaattaaaagttaatgaaccttcgatattgaaatttaatgtgatagagaggaataataaaattaaacaaggaattattatcagtaatgctgtgcttataaatagttttattgttttaaataattttttataa

SEQ ID NO: 399923 - DNA, 363 bp, Salmonella enterica; identical to SEQ ID NO: 399762

SEQ ID NO: 399924 - DNA, 309 bp, Salmonella enterica
atgaataccatgtcaagaacccatgcgcagaaattgcgccaaataaggaaagctgaagggctaacacaatccaactttgcggagatggttggcattgctttaagtacggttaaaaactatgaaagcggacaaagagaggtcggattagcaattattgatactgtgttgaaacactctcgcttcgaaaaatacaccctctggttaatgacggacaaaacagcaccagcggcggggcaggtagctccgcctctctcccctgatgggcaagacgacaaaaaatcatcccacttcagccggaaggttggctaa

SEQ ID NO: 399925 - DNA, 561 bp, Salmonella enterica
atgaaacatttaatgattgatattgaagcaatggatgataagtcaaccgcagcaattacggctattgctgcaattttctttaatcctgaaactggtgaaataggtgaaacattttaccgtcgtatcagtcttgatgatgcgatgagtaacggcggtacagtaagtgcagaagcaatcgagtggtggttacgtcaaccctcagaagtccgttgtcagctgctcgatgatgattgccaggatatagagttagccatctgtgatttttacgcattcattaatgagaatgctgatcccgcgagtgtgaagttatggaacgggtgtccatcacttcacagttctgtgttgcgccatgctttgaataagtttgcaggacagtgttttacccacggcaatgagcagtctgttattacaatggttgaacttgcttcgacgctggggcttaatatggacagtattattccatatagcttcactcgcaatgcatataaccatgcaatccacaacataaagattgtgtcctatatctggatgtatcttgtcaaaatagccagtgtgaaataa

SEQ ID NO: 399926 - DNA, 2163 bp, Salmonella enterica
atgtcacagacagctattacgctggcgtttgaacactggaaagcgcagcagggcgcgaccggcgagccggtgttactggatgaatttgtgtttgcgaatgtgccagggctgaacccggatattcccgttgaccggaatgaagcactgccgcctgtggagcagattgtgcaccggcaacctgttacccgcactggcgtggtgaatgaaaacggtgtggtgtattccgccgttctgggtgctgatgtgggcgacttcagcttcaactggatcggtctggtgagtaaggccagcggtaccctggccatgattgttcatgcgcctgtgcagcaaaagctgaaaacagcggaagggaagcaggggaacgtgcttacccgttcgtttctgatggagtacaacggcgcacagaccgaaaccgggattactacaccggctgagacctggcagattgacttcacggcgcgtatggccgggatggatgagcgtcagcgcctggaaaatgcggatatttacggcgctgcggcattctttggcgatggttatctggttggtaaaacgggcaatcagttctttgtcaccaaaggcaccggctatgtggcgggactgcgtacgtcactggctgacaatcagaatatcaccgtgacaacaaagccggtcaaagtctggctggatgtgtgctggacgggatcgctgaccagtgtctggaacgcgcagtgcaaaatcaccgtggcggaaaacctggcagattacgtgcagaacggcgttcagcattatgtgtttgccgtggccagcattgatgtgaatggcaatatcacggatttaaggccaaaaggaacgctgaacgaacaacaggccagcgacgcactgaaaaagcacgagcagtcccgaaatcatcctgatgccacgaccagcgcgaaggggttcacccagttaagcaacgcgacagacagcaccagtgaagaacaggccgctacgccgaaagcagtcaagatcgctatggataatgccgccgcacgactggcgaaagacaggaacggatctgatattcctaataaacctctgtttgttcaaaatattggactgggaaatgtgcttttcaaaggtgatggacggttccttgcgggaacgtttgtcagtgacgcaattgaccgaacatcaatcggcgcacgcgccgctacaggctgtcagtttatgcgtgcacatcaggctcccgatgcgccagatcaggccaattactggcaaattatcagcctaaatgaggttatgagtccgaattccgtggtggatgtgctggccatcagtggcaataacgtattgtttggtcatggcaccggtgcgggtattacctcatggcgtaatgtggcgatgctggaaggtgctgcctttacaggggatatttccgcttccaatgtacgcggcagcacttctgtcacagttggggatggcacaggaggactgactaaaggtggcgctgatggggctgggtttgacggtaacaacctgaatatcaagtcctggaatggtattggctttcagtgctcttcagatgacgttatccgggcttatatcagcacaaaactagggattatcgcggccagtgaatctgtgtatgcaggtagcgctaatctgtataaaaacggtgatgtctatggtgacaaatggagcaccggaaatggagcaaactggctgagtctgtatcttgagcaacttgactcacaaatcagaaacaacctcacttcgtggacatctaataactttccaacaaaggcagatgtttcagttgctctgtctggtaagcctgggcgtcagtatatcaaagaggtcggcgtatatcagaatgacaaaacaaagccatttatgcttcatgatgataacagtggaatattcctggcaactatgtcctcagtacacctcgatgcaaatggttggcatagggatgcctccacaggactgattactcagtggggttctggcagtgtcgctggcggtcaacagcaacgagttaacttcccaatgacatttcccaatacctgtgtgactgttgttgccaatgatataggaagtggcacgctagccctatcaactatatcaaaggatactggcggttttactgttaagggttcttcaacaatattcggcttcaactggttatcaatgggatactga

SEQ ID NO: 399927 - DNA, 468 bp, Salmonella enterica
atgacccctgacgcggatcaaaaagcaaaagagatttacgaacacattcttcaacaaaccagtgcccagcgtgatgaacatgatagaaagcagtttcgccgtttacagttagtgactcctcaattattcgctgaatttctggcagaaaaaggggttactggtcattgtctagcatgtggccacaaagagctttcaacaccagaaaccatgagtctggattcatcccgtaatccgttcccagataaaaaaccgtcagaacttacggaagaagaatctcaacaatacgttgatgcaacggcagttcactatgtaaccccatccctgattgatgagtcgaaaataccattagtctcaaatcatcaataccggctcatctgtcaaaactgtggattcatcagctatttccgagcggctaacgtcgtttattgggtagaagaccgtattaacgcaccaggggatcagccataa

SEQ ID NO: 399928 - DNA, 300 bp, Salmonella enterica
atgcaatcatcggttacgcccgcggtacagactgtcaaattcggggatggctatgaacaacgaaggcctgccggactcaatttcatattaaaaaattttaaacctgtgttcagagttacgtcggaggaagagcgtcaggcgctggaagattttctttttgatcacgctggcgttaaggcatttttatggcgcccaccaaaacataatcggacaatcaaaatcgtctgcagggaatggtctgttacggattatgcctgttatacagattttaattgtacgtttgagcaggttgttatttag

SEQ ID NO: 399929 - DNA, 291 bp, Salmonella enterica
atggcaggtaagacaccaaaaaccgcagttaaaaatgaaggtactgcggatacagaccaaaccagtacctatgaagatgggaccgcggtcccaacggaagttaacgtagaacgtaaggctgtaacatttctgggaccatatcatcgctattcccgcggtgatgtagcctgtttcgatgttcagtatgcggaagcattggttgagcgacgaattgccgtctggccagaagatgcgaaaaaagtattaagtccccagtcgggagccagtgatcatgatactgacattggatga

SEQ ID NO: 399930 - DNA, 249 bp, Salmonella enterica
atgctgggaatgccatcgggccaagacagccagagagagactgaactgatggcgtatatccactgcacatattgtggttcaaaactgcatacagtcgctaactgcccgaaaacgtggggtggttcctcccgccgcgctaacctacgctgtggctactgcgggcagtctggacataactctaatgcctgcccacacaatgcgagcagcggtcgtcggcgcagcctgaatgatgacttccatcttgattga

SEQ ID NO: 399931 - DNA, 705 bp, Salmonella enterica
atgacgaacggcacctgtggccagtatttttcaagctcgtcaacgagtgccgccctccagttatttttggtgagcaggtttcgagcaaggacggacttgagtggttcgccactgtacaagctgatttggaaaatgcgggatatgccgtcgcagcgtttgatacatgcgcagcgggcgtcggtgctccgcatatcaggcaacgactttattggatggcctacgaccacagcaagcaatacaaagactgcgatcaaggacgtaaagaaaatcatggccagaaaagctgccgggcgccaatcgaatttgcaggacgtcgccgttctggccggatggaatactccgacagccagcgacagcaaaggtggatacataggcggaagaataaggaatgggaagctgtcaacagatcgactggatgtcacatcacaactggcgggttggcctacaacgatgacaagcaacgaccgtacagcttcgttacaggtggccctggaaacttacagagcgaatggaacgaagatgcagacgcgtcttcaggatatagccgcgctttgtggtccatgccgtttgacctcttctggcgagatgctgactggctcttctgccaggatggaaagtggaggccagttgaacccgaatcattcccgttggctgatgggattgccaatagagtgggaaaactgcgcgcctacgggaacgcgatag

SEQ ID NO: 399932 - DNA, 309 bp, Salmonella enterica
atgaaaatttatatggccgggccaatgacaggcagagagaaatttaatcgagatgctttcaataaagaagcagatcgtttaatgaaacatggccacacggttctgaatccagccagcctgccagatggactggcacagcgtgaatatatggatatttgctttgctatgctccgttgcgcagatgcaatcctgatgctacctggctggcagacatccagtggcgctacggctgagtatcactacgcgtacaaaatggagttgccagtttatacaacaatgcattatccgccagttgtacctgtccaatga

SEQ ID NO: 399933 - DNA, 219 bp, Salmonella enterica
atgcgcgtaataatccagctgattatctgcgtcgttttggccgggtgcgcgaggtcaataccagtggtgacaacactgagtccggaaccttgcgcagcggaaaaaccgacgattaatgttgtccatattaacgggcattttgtcattacagacggcgatatgggaaaactaactggctatattgctgcattagaggcgggttgtaccgcgccaagatag

SEQ ID NO: 399934 - DNA, 234 bp, Salmonella enterica
atggtaagtttacttatcatttttcgcatgaaaacgaaagatgtcttgtcggttgttggtggagtagggaggttgtgccgcctccttaactgcactcgtagtgcggtgtatcaatggggagaagaagtcccggaaaaccgccagtacgagctggaagttaagaccgaccaaaaactgaaatcggattacacactgcacagaaagaaggatgcatcagaacgtggagataaataa

SEQ ID NO: 399935 - DNA, 381 bp, Salmonella enterica
atggatattagcgttaacaagttaaatgactacgagctggacgagcttaagcgagatattgagaacgaaattaagcgccgcgccagcggccctacgcgcgttgtttatgtcgtcactgagtggggagatcaccgggcctttgctgattttcggtgtgctgcgatttgtttttcagacatagctcaatccgttctggaagatgcggggaccaaagaaggaacggaaaggtttgatatgaataaaggcaccctgctttacggtatcagacctgtagaaatgacgctgaatgactttgagttgaaagtcgagcagaagtatttcgacgatgtgtgctacgaaaagcggctacaggaaatgtttccagaaacggggttggaatga

SEQ ID NO: 399936 - DNA, 1182 bp, Salmonella enterica
atgctgtacgctgtccgggtccggctgtatccgaacgccgcgcagcgcgagttttttgcgcggacgtttggctgctgtcgctgggtgtataacaatgcgctggcgtactgtcaggcaatgtatgaggcgggttcgccacgcccgtctgcatacgacctgatgaaacgtctgcctgcactgaaagccgaacatccctggctgggcgaggctgacagccaggcgctgaaacaggcctgcgcggacctggacagcgcctacaggaattttttccgccgggtaaaaaacggcgaaacgccgggcttcccccggttcaaatcgaaacatcgtggcgatgccacctatactgcgacggctgcggccagtattgcgctggagccacgccagataaagctgccgaaagcgggctgggtgcgctgccgtggtgtcagggagtgggatgggcggattaaacgcgccactatccgacagacgccgaccgggaaatattacgccacggtgctgattgataacgggcgggaactgcctgcgcagccaacgataaacctgaatccgctgggtattgacgtcggctgcaaaacagaaggattcacgcaccagtttgcggccctgtcgaccggagagatagttaccgcgccagcagaatataaacgccagatgaagcgactgcgccgggcacagcgtcggctggccagaaaacagaagggcagcgccagccggatgaagcagaagcgccgtgtggcgcagctgcatgagcgaatcagcgcggtgcgccgtgacttcctgcataaactgacccaccacctgacctgcgagaaccaagcactggcagtggaagatctgaatgtgcggggaattatggcagcgccaaaaccgaagccagacgcggataaccccggtgcgttcctgccgaacggcgccagccgcaagcgtgggctgaaccgttcgctggccagcgccagcctgggtgagtttttccggcaacttgagtacaaatgtgcatggcgcggcgtcgcgctgctgaaagttggccgctgggagccgtccagcaagcgctgcagcagctgtggcgagattaatgaatatttgacactggcagaccgctggtggcagtgcccggtgtgcggcgcagaacatcaccgtgacattaatgccgcggtgaatattgctgccagggcagtgtaa

SEQ ID NO: 399937 - DNA, 228 bp, Salmonella enterica
atgaatcaggtgcaactaaacgaatttggactggctgaatcactggaatccgcgctggcgcagattaatgcgctggccagcgtggcccagcacactatttccagtgccggcggctccgcttatctcaatgaagcggcacaactcctgctgacaattaaaaatttgtccgccgatgcggagcggtatcgggctgaatgggaagaccttatccccagggtacgccgctga

SEQ ID NO: 399938 - DNA, 165 bp, Salmonella enterica
atgtaccagttcaagttcgcggctatctgccgtactgaccgtaaaaatcacattcaccacctgtcgactgtcgctgattgtgagcgcgctgcgcgccgccagctttccggtaaattcattctgttttttcaggcccgtctgccggtagcgggaggtgctgtatga

SEQ ID NO: 399939 - DNA, 1170 bp, Salmonella enterica
atgaacctaaaagaacgtctggacgagctgatcgcccgcggtcacacgatgacaaagatgatcgcgcaggcccagtttggcgatgacagtccggaagcgcggaccatcacccgtcgctgggggattaccgaagcggctgaactcattggcgttacaccgcagactatccgcaacgcggaggaaagcggaaaactgcctccggcagataccgtagttcgtggccgggttccgcagcgagctggctacactatcgggcaaattaacgatatgcgagaccatttcggtactcgcccgtcccgtcctgatggccagtctcctgccgtactggctatcgcagcacacaaaggcggcgcgtttaaaacatccacatcggtgcatatggcgcagtgggcagcattgcagggattgcgagttctgcttattgatgcgaccgacccccaggccacggccagcctgtatcacggatatgttcccgacctgcatatccatgctgaggatacattactgccgtattacctcggtgaacgtgataacgccgaatatgcaattaaaccaacctgctggccaaaccttgacattatcccgtcatgcctggccattcaccgtattgaatcagagatcgaagttctggaagccgctggcaaactacctgtgccatcacatctgctgctgcgcgctgctatcgaatcagtctgggacagctacgacctgatcgtgatcgacagcgctccgaacctcggcatcggtacaataaacgtggtctgcgccgctgatgttatcgtcgttccgacgccagcagaattgtatgactacgtgtcgtccctgcaatttttcaccatgttgcgcgacctgattgcaaacgtggatcttggtggtttcgaacctgacgtccgcgttctggtaacaaaatacagcagcgctgtgggcaatcagtctgcctggatggacgagcagatccgtaacgcctggggcggcatggtcttgaaagaagtcgttcgcctgactgatgaagtcgggaaggggcaggtgcgtatgagaactgtatttgagcaggccgctaaccagcgcagtaccccaacagcatggcgtaacgcggtagcaatctgggaacccgtatgccgggaaatttatgaacgactgattaaaactcgctgggagaacaataaatga

SEQ ID NO: 399940 - DNA, 1182 bp, Salmonella enterica
atgaaacgcgcgccggtgatgaaaaacgcccctaaaattaattttgattcagcgccaacggcaacgatcacagcatctgacaataaacctaccgccccggctgtcgccaatttgagcgaacgagtgcgaaatatggtcgggaaccatgtcaccctgccagtctgtggtcgtgacgtcacattcactctggaaaccgtagctgcggaaatggttgaacgggccactatggtctggtctggcaacgaacgtgaccaggcgctgctgacgcaggcggctcttgatgaccttattccttcatttctgacgtccggacaacaaaatccggcatttggccgcaaaatttccggcattatcgaggtagctgacggtagtcgccgccgccagactgcgatttatacgcacagcgaataccgcgttctggtcggggatctggacgacgagcagatggcctggttatccacgatcggcaacagctatcgacagaccagcgcctatgaacgcggaaaacgctatgcccgccgcctgaaaaatgagtttggtgacaacgtcagtaagctggccgaggcggaaaatatctcacggaaaatcatcatgcgctgcatcaaaacagccgaactgccgcgtgaaattatcgcattattcagcaatcctaatgaactgagtgctcgtgccggtgaatccctggcgaaggtgtacgcgggaaatgaggatgccgtactggcgtttgcccagcaccttgccaaacgtcagaaaggcggtgagtcattagaaactgatgagatcctgaaacagttacatgacgtagccgaaaaaccaacaaaaactgcaacgcgtgagcgcctgtttggtaagggaatcaaggcaaaatacaaaggggattcggtttcattccagctgaacaacgtttctccggtagtgatccagaaaattgaaacattactgaaagagtaccaggaagagcagcaaaagctggtcagcgaagcggtcgatgatgcgttcgtcgaaattgatacagtgacaaattttatccgggctgcagctgctggtattaattacgatattccagcaaacgagctgcagactatgattccatactcacgaactgtgctgaaggaacacacaaacgaggctgatcgaattaaacgaatcgctgatgaaataaccaggcgttatattatataa

SEQ ID NO: 399941 - DNA, 309 bp, Salmonella enterica
atgggctttccgtctcctgcaagtgactacgtcgagccccgcctgactgtagatattttgtgtggtatcaacgctaatagtcggatagtcaatacatcagatggttatgccgtcgttgacgtttcactgattcagcggcagggagatacagtattgatacgttctgacggggcattacgttttgcaaaaataatggggcaggcgttaattattgatgacggtgaagcgattgaaggcgaggcgctggatggtgtagttgttataggaaaagttacgtattttattaaccggataaatttttctggctga

SEQ ID NO: 399942 - DNA, 240 bp, Salmonella enterica
atgccccgtcgctatgaagtagaaatagcctggcgtaaagccataatccttgaaccgagtggtagaaaaacagttacaacagggagatttgttcaggaactggagaaagtaaaccatcactggagcctgcgcgaggcaaacaggtggatcgaatggcatgtgactacgttcagagatatatcgacgcaggaaggagaaaaccgcacattccagttatttaaccctaacggagggctttaa

SEQ ID NO: 399943 - DNA, 681 bp, Salmonella enterica
atggtttctcgtaaaccaacgtttctgaaaatgcagaaatatagtgtagatggcatgatctcggccttttgcggggtgcttatcatgcaaattggctatgtgcgggtgtcaacaaatgaccagaacaccgatttacagcgaaacgcgctgaattgcgcaggatgtgaactgatttttgaagacaaaataagcgggaccaaatcagaaaggccggggctaaaaaaactgctccggacattaactgcaggagacacactggtcgtatggaagctcgatcgtctgggtcgcagtatgcgtcatctggtcgttctggtagaggagctacgggagcgtggcgttaatttccgcagcctgaccgactccatcgataccagtacaccaatggggagattcttctttcatgtcatgggcgcactcgctgaaatggagagagagctgattgtggaaagaacccgcgccggactggaagcggcaagggcgcaggggcgtattggtggtcgacgaccgaaactaacatcggaacaatgggcgcaggccgggcgcctgattagggtaggagtaccgcgacagcaggtagcaattatttatgatgtggggctgtcgacgctgtacagaaaattccctgctaataaatcagttagttatacaggcgtgaaaattgatagttatcgaccgtcttga

SEQ ID NO: 399944 - DNA, 399 bp, Salmonella enterica
atgaaactggtgaagagagctaattttcgaaatgcactctacactatgatggcgaggtcatttttagaaagtcacttagttttaaataatgataatgaaaatccggcaatccctacaattctcgaaggtctgaactttctcaatgaaaacaactacatggatgtaaggcttccttcagatgaagaaatacaaagtcaaaaagattttattgttctagatgagtcggtttcaatttctcagatggttaaaagttattgcgcagacaagaagtctacacctcgactaatagcaaaaataactgatcgagtcgaaaggataattgcggaagatgatgatgctgacggggaatacattaaaggcttgattgaaatagaatatgaaaggaacaaaaaactatga

SEQ ID NO: 399945 - DNA, 438 bp, Salmonella enterica
gtggtagttctcgtctttgttgacgaaaatccagaaaaactggtccagcgccgcagtttcgcagtacatggccgcgctcaggtgatagtcccgatcgatgatttcccggtgcaacttcgcacgcaggccttcctgcttgatgttccacatgctaatagttttcaggtcggcgccaatgcgcaggccgcccatatcgagctcaaggtcagggcgtacccgaacttccaacccggtttcctcatcaatcccaaaatagctaacctcgacagcgcggcttgggtgagtcagcaatttgccggcggtcgggtgccccagcagggctttttgaatgttcagcgcggtgctgagctgttggcgggtgaccagtactttcccttcggggttctcccgccacgtatccagcaattcgtcggcgaataccgctgccggatttactga

SEQ ID NO: 399946 - DNA, 438 bp, Salmonella enterica
gtggtagttctcgtctttgttgacgaatatccagaagaactgatccagtgcggcggtttcgcagtacatagccgcgctcaggtgatagtccctgtcgatgatttccctgtgcaacttcgcacgcaggccttcctgtttgatgttccacatgctgatagttttcaggtcggcgccaatgcgcaggccgcccatatcgatctcaaggtcagggcgtacccggacttccaacccggtttcctcatcaatcccaaagtagctcacctcgacagcgcggcttgggtgagtcagcaatttgccggcggtcgggtgccccagcagggctttttgaatgttcagcgcggtgctgagctgttggcgggtgaccagtactttcccttcggggttctcccgccacgtatccagcaattcgtcggcgaataccgctgccggatttactga

SEQ ID NO: 399947 - DNA, 510 bp, Salmonella enterica
gtgcctgcgctgccggttccctccagagtgggggtattgtcgttcgtaaactggttattgctcagcgtgccggtgaggggagcggcatcatcgatagcggcggtgataatcggtgtatcggggagaggaatgttgggcgcatcaatggttgcggatgggccggtattgccggcatcgtcagtcgcggtcacggtaagttgttcgccgctaatctgtggcgctgttagatcaatactaaatttaccgtcgctatccgctttgccctcgccaacgacgttacctgaaggatctttgatggtaatggtactgcccgcttcggcctcgccgctcaccgtttttccgtccgctgaaatcagcaacttgccgggagcgagaggcggggtagtatctacaggattactgctacctggagtattgccgttagggttactgccgccgggattgctgttatcagggggattaccgtcaggattggtgttatcggggggcggattatcgccatccgaatga

SEQ ID NO: 399948 - DNA, 690 bp, Salmonella enterica
  misc_feature (598)..(607): n is a, c, g, or t
gtgtcctgtgcggtaatctgctgctatcgagaacgacagacatcgctaacagtatatatggaaacatcaaaagagaagacgataacaagccctgggccatacatagttcgattacttaacagctcactgaacggctgtgagtttccattgctgacaggccgaacactctttgtggtaggtcagagtgatgcgctcactgcttcaggccaactccctgatatacctgccgatagcttttttatcccgctggaccatggcggagtaaattttgaaatccaggtggatacggatacgaccgaaattatactccatgagctgaaagaaggaaattctgaatctcgttcggtgcaattaaatacgccaatacaggtcggtgaattgcttatcctgattcgcccggaaagcgagccgtgggtgcccgagcagcctgagaagttagaaacgtctgcaaaaaagaacgagccgcgttttaaaaacggaattgtagcagcactggccgggttttttatattgggaattgggactgtggggacgttatggatacttaactcgccgcagcggcaggccgcagagctcgattcgttattggggcaggagnnnnnnnnnntcaggtgttgccaggccgggacaaaatgctctatgtcgctgcgcaaaatgaaagagatacgctgtgggctcgtcaggttttag

SEQ ID NO: 399949 - DNA, 174 bp, Salmonella enterica
atgaaatacaccagtatcaaaatatcgttgaaactcttctcgcggggtataattatgggagtgtcttaccaccgcttcagcgcagtaggcgaccttataacccgcctgaatcatcttagccaccacaaaccgctgctatcaatggatctgaaaaataataaaccaaatttttaa

SEQ ID NO: 399950 - DNA, 564 bp, Salmonella enterica
atgctaagtcctacgactcgtaatatgggggcgagtttatcgcctcagcctgacgtcagcggggagctaaacaccgaagcattgacctgtattgttgagcgtctggaaagtgaaattatagatggcagctggattcatatcagttacgaggaaaccgatctcgaaatgatgccttttcttgttgcacaggccaataagaagtatccagagttaaatcttaaatttgttatgtcagtccatgagcttgtttcctctataaaggagaccagaatggaaggcgttgaatctgcccgatttctcgtaaatatgggaagttcaggtatccatatttcagtcgtcgattttagagttatggacggaaagacatcggtgattttgttcgaaccagcagcgtgtagcgcttttggacctgctttactggcgttgaggaccaaagcagttcttgaacgtgaacaactgcctgattgttattttgctatggtcgagctggacattcaacgaagctcttctgaatgcggtatttttagcctggcgctcgccaaaaaacttcgcttgaatttatga

SEQ ID NO: 399951 - DNA, 756 bp, Salmonella enterica
atgagaaatgtaattatatacggtattaactggactaattgttatgccctacagtctatttttaagcaaaaatatccggaaaagtgcgttaaaacgtgtaactcattaactgcacttttgcattccctatccgatatgccggacgccgggctgattttagctttgaacccgcatgagcatgtttatctttttcatgcgttgctgacgcggttgcagaaccgtaaagttttggtagtggcagatcgcttgtattatatcgatcgctgtgtgctgcaatattttggcgttatggattatgttttaaaagacgaactatcctgcgctatccgctcggagcgagagaagctccgtcttccggaagcctggctgcgtttctgccacaggccacaaaagaaaaccgtggctgctacgtatgcttttaatgccggcgagacgccggaagaggtattgtttaatatcaatcaatacgcctggtggaatctacctcccggtgtcacgcaggcgaaatatgcgctgctgatattattatcctccggacatccggcaattgaactggcgaaaaaatttggtctgggaacaaaaaccgtcagtatttatcgtaagaaggttatgtatcgtttggggatggactcttcaccgctatcgctgttccggggactgaaactagacgcgcatttacagcgcactgcttttgcacataaccctggtgtacctgacgataattgcgcgttaccgattgcggtaggaatgaattaa

SEQ ID NO: 399952 - DNA, 147 bp, Salmonella enterica
atggatactgtcgaaaagggctcagacctgctgtcaaaacgtatctgtgctatgagtggtcttattctggctctggcaagtgtcgggcttcacgcctatcttgttattcctgtaagcatcgctctggttttcatgctacgtaagtga

SEQ ID NO: 399953 - DNA, 786 bp, Salmonella enterica
atgagttcgaagtacgaggagttaaaaaaagaagtttcagaattggcagatgaaggaagaaatttatatctttccatgttaaatgagcatcataagtttgacgatgaattgctaaaagacctacatgaaaaaggcagcaaaatagtcgatgtaggtggtaactatcaatcctggtatagcaaagcatgtcgtgtaatagaacaaaccctgccagaaagacttgatgagttcgtaaaactttataaaggggatgaaaaaagaaaagaaatatccccgcttaactattccatcagtgactatttagttggtattcaatcaactcgcgggtcgagcattattgcaagccgcaaagatgccattcctaaaatggaaacacaatatcgaattttgtcttctgccgcagagaaatttgaaagttctatttttgatataaaagaggttttacaggccgatttattcgacactgagcttgacacagctaaagaacttaataaaaaaggatttgttagagcagctggagcagttgcaggagtagttctagaaaaacacttatcccatgtctgcaatcaacacaaattaaaattaagaaaagcacacccaacaatctctgattattatcaaactctaaaagattcagatatcatagacactccaacctggcgtttcatccagcatttaggtgacattcgaaatctttgtgaccataacaaagacagagagccaacaaaagttgatgtttcagagttaataactggtattgaaaaagtcataaaaactgtattttaa

SEQ ID NO: 399954 - DNA, 192 bp, Salmonella enterica
atgcctacaggaaaccgtaacgggaagtcagtcaaactgtgcgcacgtgtcccgcttgaactggcaaaggacgttgaagaactggcggagaacggcgagagtgtgacggcgtttcttatccaggcattacagaccgaagcagaacgccggaaggaaattaaaaggcgaactggcgtgagtgggtggacctga

SEQ ID NO: 399955 - DNA, 225 bp, Salmonella enterica
atgagattgcgtattttacatgacaatgaagttgcgcttgaggtgaaaaacggcgcggtggtgtgcagtatcagcgagatttcacggcttttgcaggttgaccgggaaacagtgagaaaaaccattagaaaacatagcattgaacccgccggactgaggaaaaaacaccccatttacaccctgtcagtggtcgccagaaaggtaatcaacaatcatttttggtga

SEQ ID NO: 399956 - DNA, 1956 bp, Salmonella enterica
atgaaaagctggtacaccatcaatgcccgggctggtggcgtggctactgtcacgctgtatgacgaaatcggcgcatttggcattactgcccgcgattttgccgaagaactgtcaacgctcgggcgcgtcagtcagatagatttgcacatccactcaccgggcggggatgtgttcgaagggctggcaatctacaacctgttaaagaaccaccaggcgcgaattgtcgtcactgtcgatggtgtcgccgcatcaatggcgtctgtgattgctatggctggcgaccgggtacggatgcccgagaacgccatgatgatgatccaccgcccgcgtggtattgctggcggtgagtcttctgatattcgtcggtatgcagacctgatggacaaactcgaagaaacgcttatccccgcctatacagcgaaaaccggaaaaacgagcgaggaaatcgccgcgatgctggaggcggaaacgtggatggatggtaaagagtgtcttgcacacggctttgctgatgaactgctggcgccagttaaggcaatggcaaaactggactcacaacgaattgaggggatgaatatgccgcaggaaattaaaaatatgattctggcgccgcaggccagtgcaggaacactacagggtagcgtgccgcagggaagcgaggaacaaagccgcatcaacgaaatcagatcggtgtttgggatgtttggcaatcgccaccaggacgtaatgcaggcgtgtctctctgatgtgggctgttcggtagatgttgccagaaacaaactgctggaagcgctgggaagggatgccacacctaccaatacgctcggcggctcgcagaatacacaaaacccgatgctgtcacacatttacgccggaaacggcaacattacgggcgatgccatgcgtcagggtcttaatgcccgtctcggctatgagaaagcggagaaggggaacccctacgccatgatgagcctgtttgatatggctaaggcgtctttgactgagcgtaatatcagtatcagcgggtttggcaaccgctcgcaaatcgtcaatctggctatcactcactcttccagcgatttctctcatattctcgctggtggcgctgaaatgtccctgctgcatggctggcagaacagcggcgagacgttccagcaatggacgaagaaagggacgctttctaacttccgtgaagcaaagcgcgtcgggcttaatggcttctcccgcctggctaacgtgccggaaggtggggaatataaatacattaccacttcagatcgtggcgctccgattgcgctggccacgtacggcaatatcttttcgataacccgtcaggccattatcaatgatgaccttacccagctttcaactattccggtcgctatgggccgtgcagcggcgcgaacggtaggtaatctggtctatctcgaactggtatcgaacgggaaatttacggatggcaagccactgtttgatcaggcgcacaacaacctgattgcttctgcgatggatatgtcagggctgagtgccgcgcgtaaggctatgcgtctgcagacagatgccaatggcgacccgctcaatattaccccggcgtttatcattgtgccggcagagcttgaggatgctgctaaccgcgctttgctctcgtcttcttctctgttccagattgacggtagcggcgcgatgaaccagaaccccggcattatcaacgtggttaaagatatgggacagattatcgttgagcctcgtctggataaagcgaacaacaaagaatggtatgttgccgcggcacaggggatggacactatcgaggtggcttaccttgatggcgttgatacaccttacctggagcaacaagagggctttgaggttgacggcatggcctggaaagtgcgcatcgatgcgggcgtggctgcgctggactggcgcggtctggttaagtcgagtggcgtgtga

SEQ ID NO: 399957 - DNA, 195 bp, Salmonella enterica
atggcagaacggaacaataagcagcacgataaaggcggtacggttcatatcgatgctgaaactatgaagaaaatcgaagagtaccaggcattcattcgcaaaaatcacccggaaatgccagtccccactaaaggacagattgtgcgtagcagcgtgaactactggcatcaccagacgctgggagcatggctatga

SEQ ID NO: 399958 - DNA, 354 bp, Salmonella enterica
atgcagcggctaatggaaataaaaaatcggctggaggtaatcgaggaagcgcttaacgaacagtatccgcgctttaaagcagatccagacattaccgggcagataacagacctgaaggactatgtccaggaggaacgtaagagcattcagaaacagaaggcgcggggagaattgtcagagtttgaatcagccttcattgagccagctattaacgatgtttatctgtcatcgctcgacaaaatcagaagaggttcaaaaccaagcagtagcgttaacggctacatttgcgatacctcatccacactaagttactggctcttccagattagagattatgagggtaaggaagagtag

SEQ ID NO: 399959 - DNA, 1800 bp, Salmonella enterica
atgaaaaatgcacctaacctcaaatatctgccaaaggaaaaatttaccgaggcgataatttttgccgggactgatgcctacgctcatgcaaagggatgggaagaggggctgggcaaacaaattgccgaagatacaacgccacctatctaccttgggccaaagcaactggcggaactggataacctgcaaatagttgataaagatcgccgtagtgcccgtgtatatattgccggagatatcgagccgatactgattaacgccattggtgagaagctggcgcgggctggagtgcaggatgccaaactgtataaaggcattcccgatcgccagccagaggactggcatgattatctggagaggatcagggcggatagtgttgttgtcgatctcccggtcacgaaacgcgaaccagcccatagcggagtagcaccggcattgaatcagatgggggccagccagcgcggagaagtgttactggctcattatgacggagatctggcaatccatgccgactcggacacggtgcaccactataacggcgtggtgtggaacccgctcccggacaaagaactgcaacgggaaatggcgcaaatctacattgatgcagaagtggcctattcgcagaacgccattaaatcggcggtggaaaccatgaaactgagccttccggtcatgggtgttacagcccgtaacctgattggctttagtaatggggtatttgataccagaacggggcaattcaggcagcacagtaaaacagactggttactgatcgccagtgaattaccattcagcccaccagcagaaggcgagacgctggtaagccacgcgccgaacttctggaaatggctccgccgttccgtggccaacaacgaccgcaagacagatcgtgtactggcagcgctgtttatggtgctggcgaacaggtacgactggcagctttttcttgaggtcacggggccgggtggtagtggtaaaagcgttatggcggaaatctgcacgatgctggcaggtaaggcgaacaccgtatcagccagcatgaaagcgctggaggatgcaagggacagggcgctggtggtgggttactcgttgatcattatgcctgatatgacccggtacgctggcgatggtgccgggataaaggctattaccggcggtgataaggtttctatcgacccaaaacacaaagcgccgtattcgacccggatacaggctgttgtgctggccgtcaataacaacgctatgacattcagcgaccgtagcggggggatttcgcggcgccgggttattttcaatttctcggaggttgtaccagaaaacgagcgagactcgatgctggcagagaaaatagaaggggaactggcagtagttatccgccatctgcttacacgttttgcagaccaggacgaagccaggcggttattgtatgagcagcagaaatcagaggaggctctggcgatcaaacgtgaaggtgattcgctggtggacttctgcggctacctgatggcgtcggtagtgtgtgacgggatgtttatcggtaatgccgagatagtgccattcagcccgcgcaagtacctgtatcacgcctatctggcatacatgagagccaatggcctgagtaagcctgtctcactgatgcggttcggtacagatatgcctggcgcaatggctgagtatgggaaggaataccagaagcggaaaactaaacatggaatacgctctaacgtaaccctgcatgatgattctggcgactggatgccatcatgtgcaaccactactgagaatgaaggggtagagtaa

SEQ ID NO: 399960 - DNA, 369 bp, Salmonella enterica
atgatcagtaacgtaaaatttaacgatctggaaaagcgcctcgatttgctggtggataaggtactgaacctcgagctgcagatcaaatcactcacagatagccagggtggtgaaatccccccgggtatgagtccggttactacgctggcggcggagtttggcatttccaccaagaaggccgaagaactggcgaaaaacacaggggtaatgctggtacggttaaaatcaggcggttttgtggctcctgatgagaaattcagagaggcggcgcggctggtgctgcgtagtgcaaaacgtaaatacggctcggcgtactggtatcacccgctgataggtaaattccagatgagcggggggatccctgaatga

SEQ ID NO: 399961 - DNA, 309 bp, Salmonella enterica
atgtgtgatatctaccatcatcttgtaaagaacgcgccagatttcagaagacattctgatgatgatttatctgaggtttctgacgtctgtggcgaggcagcacgcgctgtcagcaatacccttaccctgattggaaacctgatgcttgaggcgtcgctgagtgaggaatacagcaacgaaaacgcacgccgagacatgatgttgctgggtgatacgctgcgaaatcttccccgattagctgaggctctggagcagaatagttgcaccgccaatttcgtgctcaggcagcgtcagggggtgttcaaatga

SEQ ID NO: 399962 - DNA, 192 bp, Salmonella enterica
atgcctaatctgagcatgcttgatatgggtgacaaatttcgctcgctggaagtcctgttagctgctgcgctggaaatgaactggagtaaagacgatgagagtgatatcgccgttgagttgattgatatggctctccagcgttgccgtgacttgcgtcagcaggtggatttaccgggggtgaaaaatgtgtga

SEQ ID NO: 399963 - DNA, 864 bp, Salmonella enterica
atggcgcagttaatgcggaataaccaatcttccgagttttcgggagcgaccatctcaaagatagtcggttgtattctcatcaccagccaatcagggtgtactgcattgcagcatacccaatacttcccccaatggggggagtgtgagccggtagcgggtacattgattttgcgcccctcattaggaggtgtacaaatccttcctttgtgctcccccgttctggggcgctcaaatacttggtactgggcctacacaaaaaatgtaggtcaaactccagatctggtgtttgctcaggcttttggttcgattccttgccgacgcaattcagccctagctaattccttcaaccagttccctaaacttacgccttcccgttctgctgcatcgtttagttgctggcgtagctccgggtttattcttatctggaaagttggagaccaaccctcacctttaggcgttttatctcgctttatagttgacacgtacgtacgtaacctcttaacatggattttattatgtacgtacgttaacacgtcgggcatagaaaagacaacgccccagcactgctacaacagtctggggcgtctaaccaaaccgttaattggagtaacagttatggctgataaacagcatacccaaactcaccccaaatttacatggcttttcctcggtataccgaaggggcaggcctgtacacctgtagtaatccgcattgccgccgacacggaaaaagaagcccgcgaatggtattcccgctgggatttaacctttgccgcgaagatccgctctgaatgtcctctctatcagcatatcaatggtgcttatgaactgactattacagggctggaggtgcgccatgcctaa

SEQ ID NO: 399964 - DNA, 684 bp, Salmonella enterica
atgtcgggaattagggctgaattttctattagtgatgaagattataatgatctcgatgctttggttgataggattagaagtggggtatcgtcattattccaagaaagaagtatgtgtgaaatgttaggtatatattttgataaatccgctaatggcttagatcctgcgacaaaactttctcttctaaattatattaatgagctgaaatttggttctcaatttgaaaatgaaactgttcatcctggtgatcctgtgttgttacagactgaggaatcaagtgaattaattaaagcttcatgcatatttgaagtgcttggttttgaacaattggctaaaaatatgcgccgtttttattctgaaactctgattgaaacaatgatgaaagaagtcagagaagaggctaaagctaaaaaaatcataagcgctgatagaagcaaggctaaaaaagggaagactaataggcatcaatctgtagccttagaaattgccactcgaacgtgggaaaaatatccaaatgcaagcttggcgggattgtctcaggaaatatacacacaccttcgaattaaatggaatgatgttcctgtcgtcggaactatcgagaagtggctgaaggagtcagggcgaaatcctgatgtgaaacctaaaaatagagcattcaaaatcgttaccccagagggggagtaa

SEQ ID NO: 399965 - DNA, 264 bp, Salmonella enterica; identical to SEQ ID NO: 390900

SEQ ID NO: 399966 - DNA, 435 bp, Salmonella enterica
atgaagaaaacaatattgtcttttgttctgtgcttttttgtgaatttttgttttgctgatatgaagatattaaaaataaatcagtctcattatatgagtccttataataaaaatccttgggatagaaacttatgcaataaatgggttttaaatgcaagtcagatagaaaaaatatttttattaagtgataaatataaggaaatggggggtacaatgactggattttggctctggtttccttgtgaaataacgggtgagttgatttataataagaaaaagtggcatttttctattaatgctgctgccacggcagaatggtccaatggtaaggaaacgatatactggggatgttcccgggaaaaatgtgatgatatgtttatacttccatatccaggccggaattatataggtggcggtggcaaattgatctggtga

SEQ ID NO: 399967 - DNA, 426 bp, Salmonella enterica
atgattaatattaaagagaacatcgaccacattagagtgtattattatagtaatgagcatcttttcaaaagtgaattaatcaaacttggtagttatgaattctatgataaatacctatgtaatctaacaccaagagaatatcttgatttctcacaacttctaattgatgatataagtgagcgaaaaacgataataccagatgaaacaacctctttaattagttatatgctcggcaaagaaattttaacaaaacaggaagataattcatttgctatatctaaaaatatattctcagaaaactatcaagatctgacaaaaaaattcattacattaaataacatacacactgctaaaagagaaaaaaatttaatcgaatccaaaattcataataaaaaagttctaaacaaaactaaaaagaggctatag

SEQ ID NO: 399968 - DNA, 234 bp, Salmonella enterica
atgagaattgagcttgttatcagccggacaaaacagcttccggaaggggcagttcctgcactggaaaaagaattaattacccgtctccagaatcagtatgaaaactgcaacttaaccatccgtcgcggtagtcaggatgggctgagtatcgtcggtgctgctgatggcgataaaaaacgtatacagagcattctgcaggaaacgtgggaaagcgctgacgactggttttattaa

SEQ ID NO: 399969 - DNA, 1068 bp, Salmonella enterica
gtgaacgcctctggttatgatctagatcccgctctcatccctgatatcatttcaactatcaaaaaactatcgacaccaccttacaagatagagatacagggtggagagccactcttgcgcttcgatttaattcaatctatctatgagcaatgtgctgaaacgctgggaagcaccgattttgagatggttgtagcatcaagcctgtctgtcttgaatgaggatatgcttgaatggacgagagataggaacataacgctttctgtttcgcttgatggtgaggaagttgttcacaacagtaatcgaattcttggtcatgggcttgcttacagtagaacagtgtcaggggtagaggctatcaaacggtctttaggcgctggtcgcgttgcaacggttactacagttactaaagatctcattaggcatcctgaatcaattgtccaggctcacttgtctcttggcctcaaggacatgtttatccgacctgttagtccctatgggtttgcacaaaaagcatcgttcacattttctatggaggaatacttcagtttctatgcctcgttgatagaagaaatccttaagatgaataatgaagggataagggttgtggaacattcggcctccatacatctgaaaaggatcttcaatcccggctttagtggttatgcggatttaaagtcgccaagcggggtcgtgcttaacagtattcttttcaattatgacggtcgagtatatggtagcgatgagagccgtatgttgcagaaggtgaaccctgaaacggagttcagtgcgggtgaggttaaaacgctatcattttctaagagtccttactataacgcagtgttgagttcatcgttcaattttgctctgccaggttgtgatacatgtgcatatcaaccattttgcggtgcagatccatgccagaacataagtgtacagggtgagcctgttggtgataggagtcgttcaacgttttgtcagtatcacaaggggatgttcaggtatctgatgaactgcatctcagaaggtggtccgaaggctgagatgctaaaaggatgggcatatgtctga

SEQ ID NO: 399970 - DNA, 1113 bp, Salmonella enterica
atgtctgaggttattaggaacgatatctttcattttgcttcaaaaaagaatgtgcccacggggttctatcggttatgcaaacaaaaaccaatgaaccctttattctttttgcccaatttactggtagttgctgaaggcaataatgatgccattcaaccatactttgatttctctgttattagcactgaattatatgagtcaattgaagatggagatattgggataatcaacaatggcaatatgatacgcgtaattctgtcccgcagagccaatcataatactgtcttagtaacggaacgctgcaataacttgtgtctgttttgttcgcagccaccaaagaaatcaaatgatgactggctacttacccaatcagctcttgctatagcttcatttggtttggatggagttgttggggtcagtggcggagaacctttgctgtatggagatgatttccttcacttcattgattttatcatcgagaattcaccagatactgctttgcatgttttaacaaacggacgcaaatttgctgatatcaactttactcaggaaatggcaaagcgaagcaaaaagatcaaaatcacctttggtatcccgctctactcatcaagaccacttgtgcatgatcatctggtagggagtgatggcgcatttaatgaaacggttaaggggttaatcaatgcaggaaactcagggattaatatcgaacttagagttattccgacactggctaactatacagaattggatgatattgtagagttcgttggccgagtgttctccaacattaatcagatttcccttatggggctggaatctatcggttgggcacgaaagaactggtcaacaatcttcattgagcacagcagttatagtgagaaaataacctccgccatagacgctgcacacaggtcaggcatacctctaacaatttttaattatcctttgtgtcatcttcctgaaagagcttgggagcttgctgctcagtcgatctctgattggaaaaattactatccgaaagaatgtgatgaatgcactcagaagtcttcctgtgctggttatttcagttcctcaacaggccgttttcatcaaccaccgagaccaattttatga

SEQ ID NO: 399971 - DNA, 744 bp, Salmonella enterica; identical to SEQ ID NO: 227685

SEQ ID NO: 399972 - DNA, 162 bp, Salmonella enterica
atggcaaaaatcgctaaaaagctcactgacactgaaatcaaaagcaccaaacctgccgagaaagaggttaacctttttgacggcgatggtttgctcctgcgaatcgccccctggcgaagggaggaaagaaaaattggtatttcagatatgcagtgcctgtga

SEQ ID NO: 399973 - DNA, 1071 bp, Salmonella enterica
gtgaccaaaaagcgaactaaggtgagcttaggaacctatcctcaccttacacttgcgaaggcacgagctttacgtgatgagtacttgtcgttgcttgcaaatggtatagacccacaagttcataacacccacaaagccaatgcccttaaggatgccacggaacatacatttcaagcagtagccaagaagtggcttgatgagaaagtcaaaacgtcaggcatctcccaggatcatgctaacgacatctggcgaagcctagagagaaatatctttccaacgttgggtgatacccccattaaggagattcgccctaaaatgcttaaacagcatttagaacccatagaaaaacgaggtgtccttgaaacacttcgccgcatcatatcccgcctgaatgaaattttccgctatgcagcaacagaagaactcatagaattcaatccggctgacaacctggggcaacggttcagcaagccaaaaaaacagaatatgccagcattacccccttccgaactcccccgcttcctggttgctctaaacaatgcttctgtccgtttagaaacaaggctactgattgagtggcaacttctcacatgggttcgccctggtgaagctgttcgcacaagatggtcagatattgatatagaaaccggcatgtggaacatcccagcggagtttatgaaaatgaagaaacctcacaaagttccactgagcaaagaagctttgcgagtcttggattcaatgaaagccatcagcgggcatagagagtgggtttttcccagtatcaaagctccactcaatcacatgcatgaacaaacagctaatgcggctataatccgtatgggcttcggaggtgagcttgtagctcatggtatgcgatcaatcgccagaacggctgctgaggagtgtggtaagtttagaactgatgtcttagaagccgcccttgcccactcgaaaaaagatgaaataattgcagcctacaatcgtgcagagtatctcacagaacgtgtggttctcatgcaatggtggagtgactatgtttcgtctcaaaaatacaaagttattgccgcataa

SEQ ID NO: 399974 - DNA, 948 bp, Salmonella enterica
  misc_feature (924)..(933): n is a, c, g, or t
atggctagcgaaaatgacaaaaatcatagagttagggtcgcacagtacttgaggatgtctaccgaccatcagcaatattctttacataatcagtccgaatttatcaaagattatgctgaaaagaacaatatggaaatcgcttatacctacgatgatgcaggtaagagcggagtcagtatcgtaggcaggcattctttgcagcagttacttagcgatgtagaacaaaagaaaatagatatacaggctgtattattttatgatgtgagccgttttggtcgttttcaaaatagtgatgaagctgcatattattcctttctatttgagagaaatggtgtagatcttatatattgttccgaacctatacccactaaagatttccctttagagtcctctgttatactgaatataaaaagatctagtgctgcatatcacagcaggaatttatctgaaaaggtatttatagggcaagtaaatttaataaagcttggttatcatcaaggcggtatggctggttatgggctaagacgtcttttagtagacgaaaatggcatagctaaagaaatattgagtttccgcaaaagaaagagtattcaaacagatagggtaatattaattccgggaccaaaaaatgaaataaaaattgtaaatagaatctatgatctctttatagagaataacgttccagaatttattattgctgagagattaaatgaacagaacatacctgcagaaaatggaacattatggactcgtgcaaaaatacatcaaattttgacaaatgaaaaatatattggaaacaacatatataacaaaacctcatctaaactaaaaagtaggcttgtaaaaaaccccaaacatgaatgggttagatgtgacaaggcatataaacctattatttcaaagaaaaaatataataaagctcannnnnnnnnnaagctcaagaaataa

SEQ ID NO: 399975 - DNA, 897 bp, Salmonella enterica
atgctgcctgaaaaaaatgaattcccaataattcaaattgagattgcaaaaataaaatttcttaacccacgaacaagaaataaggtagtgcatgaagaaataaaggaaagcataaaaaaaagaggattaagcaagcctataagcgtaagagctattgatgaagacgatttcaaatatgctttaatttgtggtcaagggagaatagaggctctcgttgcattaggtgaaactattattccagcaattgtaagagatgtatcagaagaagatgcttacgttatgagtttagttgaaaacattgcaaggagaagaccacgttctaatgagttattacaggtgattaaagacatgaaaatcagaggactttcagactccgaaataagtgagattactggatattcatcgaactgggtgagcagtattaatatgctacttgataagggagagcataaacttctctcagcagtcgaacggggtaatttgcctctgtatctcgcagtgcaatttgcaagatgtgaaactgaggaagcacaagatattcttaccgaagcatatgataaaaaattaataaaaagtcgggacattataaagataaaacacattctaaatcaaagaacagttgggaataaaggtgcaaaagcagccggattttattatcacaaaccatcaaaaaggatgactgcagaggagttgattgagctttatgaaaatagtatcgctgaacataaatctgtttataacaactcaaaattcataaaaaccaatctactaatagtaaatgagatttttaacatcataatgatgaataaaagttttcaacatatacttgaacaagagaatctttcagaactaccatctcagatattgaacccagtaaacaaagaggtatcaaaatga

SEQ ID NO: 399976 - DNA, 3063 bp, Salmonella enterica
atggaccagatagcgaacctggtcattgatttaagtatcgacagcgcagagttccgaaacgaagttccgcgcattaaaaaattgctgaacgatgcggctggtgactcagaacgttcagcggcccggatgcagcgttttctggataagcagacggaggcgacgcgccggacgtccgccagtctggagcaagtgactgccagcagtaccgcgtacagttcctctgtggagaaaagcgcagcggccagtacgcgtctggcggcggatgtggatcagacgcgacagcgggtggaggcactgggaaggaaactgcgtgaggaacaggcgcagtcagcggctgtggcggcagcacaggacaggacaagtgctgctttttaccgccagattgacagtgtaaaacagttaagcggtggtctgcaggagctgcagcgtatccaggcgcaggtacgacaggcgaaaggacgcggagatatctcacagggcgattatctggcgctggtgtctgaaaccgccaggaagacccgtgagcttaccgatgccgaagcgctggccacgcagaaaaaagcacagtttatacgccgcctgaaagagcagacgacggtacagggcctctcccgtactgagctgctgcgggtgaaggcggctgaactgggtgtcagcagcgccgcagatatttatatccgtaaactggagcgtaccggaactgccacccatacgctaggactgaaaagcgctgctgcccgtcgtgaactgggcgtgctggctggtgagctggcccgtgggaatttcggggcactgcggggaagtggtatcacgctcgctaaccgcgccgggtggatcgagcaactgatgtctccgaagggcatgatgctcggcgggctggctggcggcgtggctgctgctgtttacgggctgggcaaggcctactatgaaggagctaaggaaagcgagacgttcaataaacagcttattctgaccgggagttatgccggaaaaaccacaggccagcttaatgcgatggcgaagtcgctcgccggaaatggcgtcacgcagcacgacgctgcaggcgtgctggcacaggtggtcggtagcggagcgtttaccgggcaggcagtggcaatggtatcccgtaccgcgaccagaatgcaggaaaacgtgggacaatcagtggatgaaaccatccgccagtttaaacgcctgcgggatgatccggtgaatgcggcgaaagaactggacaggacactgcattttctgaccgccacccagcttgaacaaatcagggtactgggcgagcagggaagagtggctgatgccgcgaaaattgccatgtccgcgtattcggaagaaatgaataagcggatgggggacgtacacgacaatctgggctggattgaaagagcatggaatgctgtcggtgatgcggcgaagtgggcatgggatcggatgctggatatcgggcgggaagacacgctcgatgaaaagatcgcgacactgcaggaaaaaatcgcgcgcggcagaaaaacgccctggacggtgtcttcctcccagactgaatacgatcagcagcagctgaacgaacttcaggaacagaaacgccagaaggacctgctggatgcgaaggcgcaggcagagcgtaattatcaggaaacgcagaaacgccggaacgagcagaacgccgcgctgaaccgggataatgaaactgaatccctgcggcaccaacgggaggtggcgcgcattaccgccatgcagtatgccgatgctgctgtacgcaatgccgcactggagcgcgaaaatgaacgtcataaaaaggcgttgtcacaacaggcgaaaaagccaaagacttaccacaacgacgaggccaggcgactgcttttgcagtacagccagcaacaggcgcagactgaagggcagcttgccgccgcgaagctttccacgaccgaaaaaatgacggaagcgcataagcagcttttgtcatttcagcagcgcatcgctgatttgtccggtaaaaaactgacggcggatgaacaaagcgtactggcacataaggatgaaattgcgcttgcgctacagaagctggatatctcacaacaggatttacaacaccagaatgcccttaatgaactgaagaaaaagacgctcacattaaccagccagctcgctgacgaagaatcccgcgtcaggcagcagcacgcaacggcgctggccacaatgggtatgggcgatcagcaacgaggccggtatgaagagcgtctgaaaattcagcagcgctaccaggaacaactggagcagcttaagcgcgacagtaaggcaaaggggacatacggttctgacgaatatcgtcaggctgagcaggcgctgcagggcagtctcaatcgccggctggctgagtgggcggattacaattcgaaagtggacgctgcgcagggagactggactctgggggcgtcgcgtgcgctggataactttatggcgcagggcagcaacgtggcgggcgcaacggagcaaatgttcacatcggcattcaacagtatgggcgacgggctggcgacgttcgttaccactggaaaactaaactttaaatctttcaccgcatccatcgtgtcagatctggcaaaaatttcagcacgtatggcaatgatgcaggctgtaaagggaatcggatctgctctgggatttggtgtgacagccaatgcgactggtggagtttatcagtcttctgaactgagccgatacagcggcagcattgttaatcgcccgacattttttgcttttgccaaaggtgccggggtgatgggcgaggcaggaccggaggcaatattaccacttcgtcgtggtgctgacggtaagctgggtgtcgtggcagccggttcaggagggatggcgatgtttgcgcctgagtacaacattgaaatccacaacgacgccggcaacggacagattggtccgcaggcattacaggccgtatataacattggaaaaaaagccgccattgatttctggcaacagcagtcgcgtgacgggggtattgctggaggagggcgataccctgacaaccagcctgcatga

SEQ ID NO: 399977 - DNA, 495 bp, Salmonella enterica
atggacggattagttacaaagcttgccaaagacctgcggaatgtctttgaagaaaatttcgattattttgatgagtcgggtgtgccattcttcggcatgtttcctgaaaattgttgccaaggtgcatctgtatttctggggatgcttcttagccacttttttacccgcgatatcataaaagtagtacatggctctactcgtaataggctatatcatcatttttgggtagaggttgattcaaagatctatgatcttaccttggaccaattctataaaaatatgggggataagtatactgggatcgaatttccagtatatggcgaagataaacatccactaagacaatattttttctataaagaaaaaatgagtgcggttctggctttttcaatcttcgtacaaaaacatgcgaatctggaagagatactacctgcataccaattcatttgtagagaactcgaagttatgggatggaaaatcccatccccagaataa

SEQ ID NO: 399978 - DNA, 1224 bp, Salmonella enterica
atgagccgaggcatcgctgaatttcaaccggataggttagtgcaagtactagccgcccggcggctatcccaaactcaattagctacgatggttggcgtatcgccagctaccatcagtaaatggcgttctggccagcaggctccagaatccgaggccttagaacgcttggctacagtcgtaaatgttactcctgaatggtttacgcgccctctgttgccgggtatgtcaaagcccctgttcagaagtaatgcatcagctcatgtagcagcacgagcaatgttagaaactcgaatccattgggctaatgagttggttactaagctgactgagtttgtagatctgccggagctaaaattaccgcaccgtagttttacaaacatcgatgaaattagtgatgcagatatcgaagatgccgctagtgagtgccgtgccctttggaatcttggtacaaaggaaataccggaccttactttagccgcagagagtaacggtattatcgttgtcagagaggaaacaggtgtcgcgcagattgaagggctttccgcttggagtgagactctaagtgttccttttgttctcctctcttcggataaaggtaatgcttttcgcagcagatttgaccttgctcacgaaattggacatctaatccttcaccgctacgttggcaacgagctcgaagctgaacgttataagctgaaggaaagccaggctcataaatttgcgggggcgctgctgcttcctgccgagacgtttgccgaagaaattagaaccccggtcacattagatagcttgcttttaattaaacaacgctacggtatttctgttgcggcaagcatcatgcgtttgcatgtgctgaatattattactgaagaagagaaacaaaatctttataaacgccgttcagcacgttggggagtgaaatcagagccgggagatgattatcgtgagcctgaaaaaccacgtttgttgaaacgtactattgaattgttggcgtcttctggaattattccagttgaacggcttgctgcctttgcgggattgtctgctatcgatgtcgaaatgatggttggtttaccagagggctatctgaccggcaagaaagctgctgttgtgcatctggcaaaattaaaatctatgctggccgagcggcgtgaagagcaggctaacgagcataaaggagctttggtacaatttacgagaccacctaagcactctaattcttaa

SEQ ID NO: 399979 - DNA, 645 bp, Salmonella enterica
gtgaaaaaaaaatcaaaagtggcagatctcattgttcagcatgttcaaaaacaactcttcatggccctttctgacgcgatttacgcggcatcaaagcgttcttacgattatgcgcaaaagaagaagctagaccacagagcgaccgcgcttggttatgatcgtcatttaaacctgaatgaaactatttatgaggtgtttgaggccaacggttgtaatcccggcaagctgcgtggtaaccgtattgtagaaggccatagcggtattttcacgatagttcgtgaaagctacaatgataaccagtggaagagactatttcgcagcaaacgtaagcaagagctcattgccgaaaacgtttctgtggaaaaagtggtgcaaccggatttattctccgatggttctgatgtaccgaaagctacactgttcgtagtatgccgtttttccggttcattgcagaatcaacccgaagccccgatgtctatagagcttgtcgttccaagttctgacgggaagagctgggttttccatgagccacttgaactttttttaacccgatatgatgtagttccattccaagaagataatgcattctctgcactcaaaaagggcattatcaaaaaagatggaaccgaggaagatgatgtatga

SEQ ID NO: 399980 - DNA, 303 bp, Salmonella enterica
atgagtgctctagaaaacctgttggaatactatcctctgtctcttgcggctcaactgctcaactgcaatgagtttgcttttcttcctcagtttgtcgatcccaccccggatcctgtctggctgcactttcttgtcttgggcagtatccagaagctggctggaattgtttccctgaggtcagtcgtgaaggcatcaggaacatttgaaaactggctaggtaaacacccaggcgttgtcatgataagcctcggtatccgcatgttgtttagcgggtctggtgtcgtatcgatatctgccagttaa

SEQ ID NO: 399981 - DNA, 276 bp, Salmonella enterica
atgaataattcaatcagagttccggaagataaagattttgtatgtgcgtttgtaacttcaccggatagtttttatgaggctattgaaagttatcgtaattatgtggatccagtcggagagatagagtttcatcgtgtccttatctttatgctgtatgctatacttgaagtaggtggcgctgaggtttccattaatgacgaagtgcagaaatgtattgagcacattattaatgaaaaaaatattatcagaaaaaataatgcatgtaataattcgtga

SEQ ID NO: 399982 - DNA, 588 bp, Salmonella enterica
atggacttagttacgtcattattacaaagggggttattagaaagggcattagaccttaccatttctgaatcattcttcaattcaagatcacctgatgatataaagcatgctttaaaagctgggtatgatattaatgctgttaacagtaacggcaacaatgccatttttggctgtagaacccttgaagcactggattttctgctcagccatgaaattaatgcacaccatattaacgagcagggacaaaatgctgtcttccatcaaaaaaatccagaaatactaaagaagctgattgaactaggtttagacacctcgcatacagatgctaaaggctatacctgtatttttgaacattacagggatgctgaaggactacaagtattacttaatgcaggttgtgacataaatcatgtcgataacagaggaagaaatattctcttccttcccctctcccctgatgttttatccatagcaatagatgccggatgcaatgtcaaccatattaatcatgcaggaaaagggttcatcgaagaagagtatgatgatgaactacacaagatcattctccgccataattatagaaattaa

SEQ ID NO: 399983 - DNA, 822 bp, Salmonella enterica
atgaatgctataaaagcaatgattgaagtaggcatagaggtaaatcatacagactatgatggtaataatgcattgtttagtaatcacaattcacaagtgcttgaattactgatccattcaggcgttaatattcagcataaaaataataaaggccagtcctgtcttcactggcagcgctacgacatagattgtgcggaactgctcattaacgcgggcgttgatatccacagcactgataacgaaggacaaacgcttctttacaacctccacgatcataacatctttgattactgggtaaataaagggtgtgacataaaccacagagattataatggcaaagcggtgctggagcttccgactgacgacgagtggtggatatatgatttcagtattaatgctctcaaacgccatgttgatagaatagacagcacgccagttttatttaaacatatttcacctgcggcgttgcctctgattgctttgcttcatgaaaaaaggcgtaatatccttatcgctgaacactgtacctttgcattatatgtcaaaaacatgaggtccttctttacctcactgaaaaaacataccgatattagtcatgttcagttttataattgttatcatgacagacatattggtgcgtatactggtattgagacagtaaaatggcttattcgaaatggtatccgagtggaagacgatatattgagacagcgtgctgactctgataaagtttttgactatataaccggaagagagaaaaaagattttctcaatatcatgaaaccagaaatcatccatgcaccaaagagaaaaagaatgtga

SEQ ID NO: 399984 - DNA, 414 bp, Salmonella enterica
atgaatgatagcaatcatacttttaataagttcaagccattcagaagttgtagctatgaaaatattacttctgctaaaacaccctcccagcagacacgttctcattgtattagcatcagattaaatgatgccgagttatattacgttgatggtttacgcgaagatctcaaccgtgctgtttggatacgtatgtcagcattgaatcatctccctcccaaaattcctgaaataaatctaactgtctggaaagaccttgccaaagcatctcaggatctgaacaatctcgttcagcatctcaacactaaatcacacgatagtccttttactatcaccgaaatttatacggtgcaaaaaacaataaaagcactaagagatgcccttctgtcagcaaatcgatctgtcagtgataaataa

SEQ ID NO: 399985 - DNA, 708 bp, Salmonella enterica
atgtctgaaaaaagtctaagggagtttgtgaagcaagactcaatcaaaaacatccaaaaaaacatattaaaaatagacgcgaattacaaaaggcttattcagttttgctcaggttctcaaaatattgaaagaactaataaaaatgtagcgctaactaatattgcaaaaggaactcaccgctctttaagcttgttggctaaaaacttgtcagatgactatgacataacattagtagcattatgtacgaggaatctttttgagcttaacatcagattaaggtcaataattaaacatgaaaactcactcaacacatggatgagtgagatggttatggatgaaaatcagattttagacgccatttcaacgattgctaatgataaccatgccgctgaactggagttgttcgaaaataaaaagaaactaaataactccattttagataaacataacttaaaaagcgttaagagtcctgaaactgtcaaaaatattgctaaagatgctggtgatctggaagagtacactgcgctattcaaactattttcaaaattgttgcatccttcctcatatctaattaactcatataattcagcaggttgcattgataactttaacatactaattgtttctgcacaaaaatatgcatttgatctatttgagaggttacggagtgaattgaatgtaccagaaggtgtattaaaagagtggtga

SEQ ID NO: 399986 - DNA, 579 bp, Salmonella enterica
atgacttttaaaatgagcgagcaggcgcagacaattaaaattttcaatctgcgttcagatactaacgaatttattggggcaggtgatgcgtatattccgccgcacactggattaccggcaaactgtactgatatagcccctcctgatattcccgccagtcatattgcgatatttgacgctgaaaccgaaacgtggagtctacatgaggaccatcgcggcgaaacagtgtacgacacaacaaccggcaacccgatttatatttcagaaccaggcccgttgcccgaaaatgtcacatcagtttcaccaggcggtgaataccagaaatgggatggtaaagcgtgggtgaaggatgaagctgcggaaacagcggccagacttcgtgaagctgaagggactaaaagccgtcttttgcaaatggcatcggggaaaatcgcgccgcttcaggatgcggttgatcttggaatcgcaacagatgatgagaaagcccgactcgacgagtggaaaaagtatcgcgttcgggtaaaccgtgtggatacctcaaatcctgcctggccggagaaaccagccagtagtttataa

SEQ ID NO: 399987 - DNA, 636 bp, Salmonella enterica
ttgttaactgataattatgagggtgaacctgtttatgaataccattatcaacgtatcgaaaaaactagtgagtatgttttcactccagacagaaggcattataaagaacgtaatgtgattttaagtggtttgggaattacggatgaacgaatccaagcagcgtatgaaaaacagaaagataaaaataacaaaaaaacattagaagaaatagaattcgacataatcacgcaagaaacggagaaacagaaaaacaaggttgacttcgaatccgacattaataactttgtcaactattgcgctcaaaaaacacttttaagtaatgaattcgattttaaatccctgatgaattttaaaaaaaacttttcgttgtttagtaggttcgcagaaaacagttatgatgatgaaattttcgacatatcaagttatcgccgttactatatagataacgacagatttatagattatccagaagccttaatgctaatgcgagcgagtaatgatccagcattgaaaactcatagtttttacagatttacacagctcgaaaattatagtcagaataaagggttaagagaaaaaacaaggcaggctaaaagccttcttgaaaaatcaaaaatggagagccgttctgaatga

SEQ ID NO: 399988 - DNA, 252 bp, Salmonella enterica
  misc_feature (194)..(203): n is a, c, g, or t
gtggtggatcttaacgagtttgattcacttagtagtggtgcagtacttgtatcaaaacatggctactgcaagcactcatatgcgtttaagccgtgtgaacattatccgattgagaattctggtttagataacgaaacgatttcaaacattcacgataaaattttaaaaagaacactgtatgataaaaatgatgnnnnnnnnnntgctgatagatggtatgaatttcataagagaataaaaaaaggagaataa

SEQ ID NO: 399989 - DNA, 363 bp, Salmonella enterica
gtggtgaatgaacactgggcggttgtgtccggcctgaatctgccgggttggcccgatgcgttcgataatttgctggtactgctccagatcccaccagtgcgagaaaaacaccagtatgttgccgccatcctgcatattcaggccgtggcctgcgcttgccgggtgcgcgaacaggaccggtatctttccggcgttccagtcgcgaagggtctgtggaccctggtcgaggtggcggccgcgagggaatgctttaagcaaacgttcaaggtcgtgtttctagtggtaggccaccagcaccggcgcaccagctgcttccgtcagtatgctgtccagcgcctgcagcttcgcgtcatgcagttctga

SEQ ID NO: 399990 - DNA, 303 bp, Salmonella enterica; identical to SEQ ID NO: 389069

SEQ ID NO: 399991 - DNA, 774 bp, Salmonella enterica; identical to SEQ ID NO: 379582

SEQ ID NO: 399992 - DNA, 1206 bp, Salmonella enterica
atgtctcttcgtttcagacaaacctttactctgtttcctggcgttaggctcaacattggcaagcgtggaataagcgcaagcattggcgtgcctggcgcaactgtcaatgttgggaaaaaaggagtcagagcgaccgtcggactaccgggcacaggcttatcttatactacacctaccctgccctatgatgatgggcgctcagttaccaatccattaaatccggcctctacagaacctcatttgggaatgcccgaggcatccccaagtaacacaccatcgaacgctaaaatatatatgccaatggctggcatgaatgaaatatccagcgcttcggtagaagtcctgacaagtacctcccttttacctttacgagatttgattgctaaagcgcgagaacaaagggcagagataaaagcagatctacaagaggctcttgctgaagaatcaaaacaaaagagcgagctggttcgacgcaaatcaagtctattccgttggttttacaaacgacgtatcgcagaacttgagacagtactccccctaacccaagctgagatatctcgcttggtatcctgggaagacaacaccaaaatagccataacattcgagagcagtgatacatcacagcgcgcatatgcagcgatggtccgtgcatttgatatgttaaaatcgagtgtcaaaaaatgggatattactgcagataaagctacagaccagtttgccgaaagaacattagcaacccgttctgttaatcgtcaccctgttacctttgatttcagttcaacggatctcattcaattcacagggcgcgcgatgcggtttgaaaatgtgaatggcgacgatattttgctttatcctggagttgcagtcataccacgagctgatggggcgttcgctctgattgatttacgcgaattacaaatcagttcagaatatcgaagattccatgaggaagaaggcgttcccagtgactcaagcatagatgggtatacctgggcgaaaacgaataagaatggttcgccagaccgtcgatttaaagacaactaccaaatccctatttgcatttatggaaatattactttccattctcaaacaggggtaactgaagaatatatggtatcaaatgcagatgccgcgcaagcctttgctaaggcagtaaaacactatcaaacctcactcacagaaactgaagcgttggtacaggcctaa

SEQ ID NO: 399993 - DNA, 585 bp, Salmonella enterica
atgaacacccactataattcccgctatattttttccattaccttagtcgcaacattaggagggttattattcggctatgacactgccgtcatatccggaacggtagaatccttaaataccgtgtttgtcgctccgcaacatttaagtgaatccgccgccaactcgctattgggcttctgcgtcgccagtgcgttgattggctgcatcatcggcggtgcgctgggcggttattgcagtaaccgctttggtcgtcgggactcgctgaaaatcgccgctctgctgttctttatttccggtattggctccgcatggccagaattaggatttaccacgattaacccagataatgccgtacctgtttatttggccggatatgtccccgaatttgttatttatcgcatcattggtggtattggcgttggtttagcctcaatgctctcaccgatgtatattgctgaactggctccagcgcatattcgtgggaaactggtttcttttaaccagttcgccattatttttggtcaactgttggtgtattgcgttaactatatttcattgcccgctctggtgacgctaactggctga

SEQ ID NO: 399994 - DNA, 771 bp, Salmonella enterica
atgttgcctcagataccttctgaaacggtcgtaaaaatctatgaagatttgttccaacctgccttgcgtcagtttggagctgcaggggagagagtcgcgcaaacagtatgcttattaagcttaccgtttgtatatggtgcagcaaaatacgaacagctattggtaagaatacaaaaatcgtttcataaggttccagagagtgaattgactccaccgcctgcaaatgctgtatatcaaatagctgaaaagttaatgtctatgcctgaagatgatgctatttctgaaatgtatattgagttgctctcttcatgtattagcaaaagtaatattaattctgtccatcccgcctttgtgaatttaataagccagatatcaggcgatgaagcattattcatcgattgtttagcactgcgcgaacggtcaatctatttgaaaagaactgattcttgggtagcaccaactcataaagaaattgagcatgtcctccttccgtggtctggaattttaatggatggcaagcctatcgaagaatctgtttttaatcctgatattttaaatgttcctgattatttctttacgtatttggaacatctaaactcgttaggttttgttgagtatgtacacggtccagattatcttttagaaaaagattttattgatagcgtaaaaggatatgattattggtttatatcgcttacaaaatttggacgtttgttttataatgtctgtataaaaaatttaaatatggatggttcaggaaataaattctaa

SEQ ID NO: 399995 - DNA, 315 bp, Salmonella enterica
atgacgttccagctcaagctgtcccggattcgccaccagatccagtttcagggcaacgccacatctggtgtaattctccagcccagtaatctggataagcccacgcccacgatacttccagccatctccggcgtctttgttacccatgcggccgccataaaccagattggctatttgtggctggtgggcaacctggcgaccatcaatacgccccagcatttcgcactgataagtcgtcaggcgtttaccaaacgtctttttcagcgcctccaccgaataattgaagctttccttcagaacagtaaatcctgctga

SEQ ID NO: 399996 - DNA, 996 bp, Salmonella enterica
atgacggggaataaatatggctctgcagcggcagtacgccgggaggttgctgaatatctcaggcccccacgcagaatgccggtagcggaaggaataaaacaatttatgtttgttccccgcggcgccaatacggcggttccctgggatgacacgttaacgccctacatgaatgaagcgataaatacgctgtcaaaacgggaatatgacgcagtgatctttgccgggcctgcgcgaacaggtaaaaccctcgggctgattgacgggtggattgtttacggtattgtctgcgatccggcggatatgctggtggtccagatgaccgaaaccaaagcccgcgagcactccaaaacccgtctggcgcgtacttttcaccacagccctgaagtcagaaagcggctcagtccttcacgaaatgacaacaacgtccacgataaaatgtttcgtgatggttcattcctgaaaattggctggccgtccataaccgttttttcttcgtcggattacaagcgggtggcgctgaccgactatgaccgttttcctgaagatatcgatggcgagggagatggtttttccctggcatccaaacgtaccaccacctttatgtctgcggggatgacactggcagagagttcgcctggtcgggaaatcaccgatgtgaaatggcgccgttcctcgccgcatgaggccccgcccacgaccggcattctttctttatataaccgcggtgatcgccggcggtggtactggccctgcccgcactgcggcgactggttccagcccgcgatggaaaacatggtgggttaccgcagggcttccggccatgtatcagaccgttgtcttttcggtctacaccacttcacctgtcgtggatatcagcgtttctctgagggttcgtgggcagtacaccacgtctgcttccgtctggccgctggtgatggtttctcggtcggggaacaacttcacaaactgaccggatttccggtctctttcgtttaa

SEQ ID NO: 399997 - DNA, 492 bp, Salmonella enterica
atggacggcgaactgaagaacctcaaatgcaatatcagtcagcttgccgctattacggggttacatcgccagacggttgtcagtcgtctctcgggcgttcccctggcaccgggaagcaatgaaaaaaataagctgtatctcctgaccgatgtgatccgtgtactgatggaagcgcccgtttctcaggctgctgaacatcaggatccgaacaagatgaccccgaaagaacgtaaggactggtttgactccgaaaaggggcgtctctggctggaaaaagagatgaagcaggttgtcccgctgacggaagtccgtcaacaaatggcggcgatcgtcaaggccattacacaggtacttgaagtctggccggacaaactggaaagggataagggatggtctgcggagcagctaaacgaggcccaggatgtggtggatgaggtcagaatactgttagttaaggcaatgcaggagaccgcagacgatgacggggaataa

SEQ ID NO: 399998 - DNA, 402 bp, Salmonella enterica
atgaaattcaagagtatcgctaaaactgtttttctttttgcactgctaacctcagctggctttgcgactggtaaaaacgtgaatgtcgaattcgataaaggacaaaatagcgcccgctattccggcgtaataaagggatacgattacgatacatataacttccaggccagaaaggggcagaaagtacatgtaagtatttcgaatgaaggcgcagatacctacctgttcgggccaggaattagcgattccgttgacctgtccagatattcatctgaactggatgacaatggccagtacacgctaccggcgtccggaaaatacgaactgagagtacttcagacacgtaatgaagcccgtaaaaacaaagcgaaaaaatacagcgtcaatattcagataaaataa

SEQ ID NO: 399999 - DNA, 678 bp, Salmonella enterica
atgaacactcaatacctccagtatgtacgtgagcagctaatggtagcgacagccgatttaagcggggagactaaagggcagctttcggcctggctggagaacgcgcaattcgacacgaaaaactatccccgaaaaaaacagcgtatctgggacgaggaaacagaaagctggataacgttaaataacccgccaatccccggcaagcagtcgctggcgaaaggaagcgctatcccgctggtgaagcctgtggaatattccactgcctcatggcgccgggcggttctttcactcgatgaacactacaaggcgtggttgttgtggaattacagtgagaatacctgctgggaacaccaggtcgagataacacagtggggctggagtgtgtttgcggcgcaactcgacggaaagaagatggccggtaaaacacaggaacgactccgggcattaatctggctggcggcacaggatgtcaaatctgaattagccgggcgtgaggtttatcaatataaagagttagcgggactggtaggcgttagcgaaaagaactggtcagaaaccttcaccagacactggctgaccatgcgcgcgatatttctgcgtcttgatcaggcgtctcttttgagtgtatcggagtcgcgttcggaacaggtggctttcaacctatacgcacttaattga

SEQ ID NO: 400000 - DNA, 372 bp, Salmonella enterica
atgaaagttttattatccattaaaccggagttcgctgaaaaaatactagatgggtcgaagcgatttgagtttcgtaaagggatcttcaaaaacagaagcattaacacagttgttatctatgccaccatgcctcttgggaaggtggtggggcaatttagcattgagtctattctgtcagatgcaccagaagatttatggattaaaacccaaaaatacgctggaatttcaaaaacttttttcgacaactactactctggaagaagcacagcctacgcaattaaggtaggtgatgtcgaacgttttgaaaccccgctcccattatcagcgcttggcgatggaattaaagctccacagtcttacttatacctttga

SEQ ID NO: 400001 - DNA, 1062 bp, Salmonella enterica
atggatagcttaaggtatgaaactttctctcaatttgatcataacgaccccttttttgattcactgaagagtgactacaaggagtttcctgattggcttaagaaaaaagctgatgctaatgaatctgcctacattctctacgatgaaaatcacaaaattgaaggattcatgtacctcaaagaaaatgatgatgccggagatatttcacctcagctgcctaatggaaatcacttgaagatcggaacatttaaatttgaatcaaaaggcacacttaggggacaaagatttctaaagaaagcgttcgatcgtgcatttggctcaggttctgatgatatttatgttacagttttcgagaagcacgctcaccttgttaaacttttccaagcgtatggattctatatccatggagaaaaggaaactcaaaacgggaaagaatttgtatatgcaaggagtttaaatgatgttaatggtgatgtacttcttgattatcctttagtcttaccaacagaaaagaaaaaatttattctcgcaatcaagcccgagtaccacacaaggcttttccccgactcaaaattggtcaatgaatcacctgatatcgttcaggatgtatcgcacacgaacagcatacataagatttatatctgtggaatggactctgtccagttgatgcacaggggagatgtcatcgtaatatatcgcatgacagatgggaaaggcctagcgaaatatcgctcagtagctacctcaatatgcgtggtggaatcagtgcgccatataacaagctttaacgatgaagattcatttgtaaaatactgctataaatttagcgtgttttccgaaaaagaattaaggaatttttatcgtacaaaacgcagcccttatatcgtaagatttacatacaacatcgccttgcaaaaaagaccgactcgtgagatgcttatcgatcaagtgggactgcgtggagaccgtactgggcggtggggtaatttcgagattaccgatcagcagtttaatgaaatattaagattgggttgtgtcaatgaaagttttattatccattaa

SEQ ID NO: 400002 - DNA, 171 bp, Salmonella enterica
atgctggagtcgctgtgcattgacgaacttcaacgccgcggtgccagcaaacaggcgataagccgggcatttgatgacgatgtcgagttccaggagcgcgcgtcggagtttgtgcggtacatggccgagacgttttcccggcatcaaattgatattgaatcagaggaataa

SEQ ID NO: 400003 - DNA, 321 bp, Salmonella enterica
atgaaaaagccattaccgcccgtattacgcgccgcgctgtatcgtcgcgccgtggcctgtgcatggctgaccctgtgcgaacgccagcaccgctacccgcacctcaccctcgacgcgctggaaagcgccattgccgccgagctggagggcttctacctgcgccagcacggcgaggaaaaaggccgtcagattgcctgtgcactgctggaagatttaatggaagccggacccctcaaggccgcgccgtcgctgtcctttctcgggctggccgtaatggatgaactctgcgcccgtcatatcaccgcaccggtactgcgctga

SEQ ID NO: 400004 - DNA, 228 bp, Salmonella enterica
atgagacacaccaccattaccgcccgtgacctcgaatgtctggagcatatgcgcaatgtcggccagctcgtcggcgatctgatgcaggtgcaggactgcgccaccgttcgtcgtgaccctgagcagcagttacagctcacctccgtgatttacctcatgaccgcccagctcgacggtgtggtcgaacgctgcaatcagcagtggctgaccggggagggcaacgtatga

SEQ ID NO: 400005 - DNA, 201 bp, Salmonella enterica
atgagacacaccactattaccgcccgtgacctcgaatgtctggagcatatgcgcaacgtcggccagctcgtcggcgacctgatgcaggtgcaggactgcgccaccgttcgtcgtgaccctgagcagcagttacagctcacctccgtgatttacctcatgaccgcccagctcgacggtgtggtcgaacgctgcaatcagtag

SEQ ID NO: 400006 - DNA, 195 bp, Salmonella enterica; identical to SEQ ID NO: 399657

SEQ ID NO: 400007 - DNA, 195 bp, Salmonella enterica; identical to SEQ ID NO: 399657

SEQ ID NO: 400008 - DNA, 321 bp, Salmonella enterica
atgaaaaagccattaccacccgtattacgcgccgcgctgtatcgtcgcgccgtggcctgtgcatggctgaccctgtgcgaacgccagcaccgctacccgcaactcaccctcgacgcgctggaaagcgccattgccgccgagctggagggcttctacctgcgccagcacggcgaggaaaaaggccgtcagattgcctgtgcactgctggaagatttaatggaagccggaccactcaaggccgcgccgtcgctgtcctttctcgggctggccgtaatggatgaactctgcgcccgtcatatcaccgcaccggtactgcactga

SEQ ID NO: 400009 - DNA, 195 bp, Salmonella enterica; identical to SEQ ID NO: 384575

SEQ ID NO: 400010 - DNA, 228 bp, Salmonella enterica
atgagacacaccaccattaccgcccgtgacctcgaatgtctggagcatatgcgcaatgtcggccagctcgtcggcgatctgatgcaggtgcaggactgcgccaccgttcgtcgtgaccctgagcagcagttacagctcacctccgtgatttacctcatgaccgcccagctcgacggtgtggtcgaacgctgcaatcagcagtggctgaccggggagggtaacgtatga

SEQ ID NO: 400011 - DNA, 267 bp, Salmonella enterica
atgcacaccgctttttcttccccgtcttccgcccctgccgcgccgttgatgcaggtttctgataccgttcacgagcgctttatccgtctgcccgaagtgatgcatctgtgcggcctgtcccgctcgaccatttacgacctcatcagccgggaagccttcccgaaacaaatctccctcggcggaaaaaacgtggcgtgggcgcagtctgaaatcactgcatggatggcggatcgcattgccgaacgcaaccggggctatgacgcatga

SEQ ID NO: 400012 - DNA, 360 bp, Salmonella enterica
atgagaatgaccagccgcaaaaaagagatactcagttactttgagccggataacctcgaatgggtgacgggtgagattggtgcgccgccgttcgatgtgtcgggtgtggcctacctgcttcatggcatggtgtcgttcgataagcgccaccagctcgaatctacacggcgcacgctcgaaagcatggttgccggggggctactggaacgtgtgacagtgtatgaatcgcggcaggtaaagcgcggcggtgaaaccaacgcaacggtcgtgcgttacggtttacccggtcagtgcgatgttatgcgcgatactggcggcgctgataacgcaatatcaggcgaatatatgcgggtcagttaa

SEQ ID NO: 400013 - DNA, 543 bp, Salmonella enterica
atgtaccagctaaagataaccatccgagacagcaaaccaccaatatggcggcgtgtgctggttccagagcaaatcccctttagtgaacttcacgcggtgatccagttggcttttggctggaatgacgaacatctgtatatgttcgagaaaggccgtaaaggtgatctaggtagcgagtatcgcgtatggggtgagggtgaaagcatgggtaatgcggcaatcacgccactatgggcggcgatccagaatgagggtgacaagctggtttacacgtatgactttggcgactggtgggattgtcttattgtgctggagaagcaaacccatgataccagtatccagcctgttagctgtttgcgtgggagggggactaccccggcggaaaattcggggggattgcatggttacaatgaattgctcttacaggccagagaatctgataatcctcaacaggccgagatccacaatttcctgatgctggatattgagcgccgggtttacgacctgagcagcatcaacgatagattgcaggctcttaactga

SEQ ID NO: 400014 - DNA, 651 bp, Salmonella enterica
gtgagagacagaacacgcagctataccaccgacctgccccgcatagggttgccattccttacgaacatgcgtcgcaggctgacggacgccgaaccgggtacacagctttatacccagaccgaaagcggaacgttgtataccttccggcaagccgacagctacgccatgacaatcaacggcatcacacgggctattcgcaccacaaccacacaggccggatatggggtgcgggaatggtacgtttgcccccactgtatgaaacgggctgcaaagctgtatatcggcaagaaagacattggctgccgggcgtgctggaaacttcactataaaagccagagtgccgacagactggacaggatgcgcatgaagatacgccagcagcgacacgcgatatggggcaataatgaccttgccaaaaacctgtttaatgacattcgcatgttcccgaaaccaaaggggatgcgctgggctacgtttgacaggaagcgggcagaattatcagttatggagatggcttactggcaggcattcagcccggtagtggacagaatcacgggcgtgattgagcgtaaaacgagaaacgcagccagaggcattggcctgactttgtcaaagcaaaacgcccgcacggggcgtcaaggaacgggatag

SEQ ID NO: 400015 - DNA, 1140 bp, Salmonella enterica
atgaaaagaacaattttagcgtgcgttattgctgccactcttctgtccgggtgtggcccaaaggaattaactcctgagcaaaagcaggaagtgagcaatctcaagagcgagctttcgcagacggaaaaagaaatagccgcagcaacagagcagcaggggcagttcacgggtggattaatcaaaaatcttacgacggccaggcttgaagtgctgggaacgaataaagcccttttagaacaacgtatcaatgctatcgagtcgggcgctaagattgatttagccattagcggtgttaaaccagatccagaggcggcggcggctttaaaaactgaaattgataagcttgctctccaaatcagcgatgcaaaaaaggaagcaagccaatacagcggtggtctcgtccaggtgctgaaactgtcgactgttgcgactcaggaacagacaatggcgatgctacaacagcggtacctttcggcgatgtatggattggccgaggttaaagtctccactgagcaggctaatacggttactgctgcaaaacaaacaccacaaccatcgccagcagccactaactcaccattattacccccgggcgaaggaccgtttggtttagatgttggtttatctaaaaagaatattgaggatatgaccggcgaagatcttaaacctgtggcaaatagtgctgacctttacacatctgcatcgttgccgaaaaaaaatgctgactttgaggcttatgggcttttaatctccccagatgctggcctatgtcaaataagggctgtgggtaaaagcattgatactgatagttttggcattgctttaaaatccaaatatgaggaacttagcgactcactatcctctatctatggtaaagctgataaaaatgatttcttgatatcaggttcaatctggaaagagcctaaatactggatgatgtccttggataaaaaggaacggtttctgtcagcggaatggaaaggaactaaagataaaccactgaaaaataacctgctctccgtatctatcgaagctagagcggacggttccgacaaggggtatatttttcttcaatataacttcactaataacgatatttgcaaagccgagattgaaggcgcgaaaaaaagttccctttag

SEQ ID NO: 400016 - DNA, 3003 bp, Salmonella enterica
atggacgccggatcagttgtatacatcatcaaagccgaaacagaccaactgcttaaggccaataagcaggtcgataaattcctttcacaactacagtcatcttttgacggcgcggacaaagcagcggataaccttggcgatacgctcaagcaggctggatcggctattgatgataccagtagcgccgctggtggtatggctaagaatgttgccgccgtagagggtgccattggcaagctaaataccaatatcaactcactgacgcgggctatccttgagtctcgttctggcgtcagtggggccagttctgaatttagccgggcggagtccataattgaatcgctgggtaatcaactggcaattctggaagaacaacaggaaggtagcgccagaggtgctgctattcttgccgcccagcttcgtgccggttccaacgctacggaagcagagaaaaagaccatagccgatctgactgggcggctgtacgacatgaagaacggcgcggaagcgggagcaaagggaactaaaaactggaaatccaccatgcagcaggcgggttatcaggtaaatgacttcatcgtacaggttcagggcggacagtcggcattgttagcgtttagtcagcagggttctcaactggccggcgcatttggtccgggcggtgctgtactgggtgctgtgttggccttaagcactgtagtagctggcacgtttattacttctttgaagggtgggaaaaactcagttgatgccctcaaggatgctatatcggccacggataaggttattgcaacgtctcagaatggcgttagtgcgctatccgatgacttcgccgctcttgcaagaaacaatataaaagctgctacgctcatgcgtaaattagctgaattagaagtacagtcggctttgtcggaggtctcaaaggaagtacaaaaaacatcaaaggacatcatatcttttggtgactctctggtttcctctttaggcgggggctacgcaagcgtcaagctgtttagcggctacctttccacgctaaatataacgacaaatgattttagcgaagccatgaagcaagcggccgcttcgggggaaggcgggaagactgcaatgaattccatgattgcgacagtaggcgctcttgccaataaattcgacattagcgatcagcaggcctatgagtttgccaagcagttgtccgacatcgccaacaatcccactgatgaaaaacttaatcggcttattgccacgctcgtgagggtggggcaaggtcattctgaaggggctaaggctgccagggtgcaggcaaaatctcttcttgagatagtagagtcagcctcaaacgctactgatagactaaagagactaaaagagattacggacagcctgacctccagccaggatagagcgctacagctggcaaggcaggagctgtttattgccaagcagaccggtgacgaaaagctcaaagctcaggcttggcgtgacgccgaaacacaggggcttaaagctggcacccaggcatttcgcgattattacaatgttaggctgcaaacctatcagcagcagaaagctaatgccgagtctgcaaaaaatgaacgaaaagagcagagtgcgtctctatctgctgctaaaaaggccgagtctcaggcggaacgcaatgcaagagtgcttaatgaatatcgacagaaagcagatatatcggcagattcaaccagcgatctatccagagaacaggcgattcttgctgctcgccagaagttagctaaccccacccctcagcaaattgcccaggtagaaaaggatgccgccgcagcatgggataaagccgcagctcttaaagctcagaacgctatccctgagcttaaagagaacgccagttataatgcccagcgaaacgctctggatagtctcaaagaccagagggacgcaaacggacagctcatcctttctcagcagcaatataaccaggcgagtgagcagcttgagcagcagcaccagactaatttagccagaatcagagcagagcaggcatccgttaaccccattgccgaggcgagagggcaggttgacccggttcaacaactggctaatgagaacactcaaaaactgaagctcatgcagcagtaccagcagcaggagcaggcagttcttagccagtcgtataaaaatgggcagatgtcttatgcggagtatatcgccgccaaacagacaacagacgctcagtacctcgcgctcagaaccgcccaggaaacacagtacgaacagcagcgcattgaagcgcagtgggaaatcttccgcaaccagagtcaggctaacgagttgctggcatcgtcgctggatggcctgcagaacagcacttcaagcgctctcactggcttgataaatggcactcaaagcctgcaggaatcattcgcaaatattggttcgacaatactcaacagcgttgtaagcgccattgtggatatgggtgttcagtatgttaagagcctgattgtgggtaaggccatgtcatctgccgcaactgccgcacagattgcagaagccggctctcttgccactgcatgggctcctgcagctatggcggcatctattgcgacccagggaaaagcatctgctatcggtttggctgcctatagttcttccatggcggcagggcaggcgctttctattgctggcgcccgctataacggagggcccgttgctgctagctcaatgtatcgtgtaggtgagcacggaaagcctgagatattccaggcggccaatggcaaccagtacatgatacccggggacaacggccgggtgatcagcaaccgggatatgcagggcggcggtggcgcagtcattcaccagcagatgaatgtgaccatccacacgacaaatggcatttcagaggaaaatttacggcagattgaatcccgcatgtataaagttgggagaaaagcggccctggatgagatgtttaaccaacagaggccgaaagggatattgcccccaaggagataa

SEQ ID NO: 400017 - DNA, 321 bp, Salmonella enterica
atggaacagttaacgcgactggcggatacaattgcagaaacgtatacccgtgatttgaagcgagagactggcggcaataccgttgaatataacggtgtatcggggcaggtagtaccacaccgtctgtcatccgggctggtggacaatgttatctctgctgtgcgtgatgacgccgacaaagaggcagcggcttataaattgctgctacgactaattgatattaccggacgtgaatatcgcttgacggagcgtggtgttctggtgatggaaagtatgatcaggaatggcctgatgggtagcaataaacgtgtggttcactaa

SEQ ID NO: 400018 - DNA, 171 bp, Salmonella enterica
atggcaacaccatcagtaaaaccagtattgctcagtcgtgaccagattgaacaacttcgagcgctgcaggagcaggagcgtaaaaaatcccctctgggcctcgctccaacaattcatgtcatcgcacgtcagattatggatcgcgccctgaatatgccgaaggaggcttaa

SEQ ID NO: 400019 - DNA, 474 bp, Salmonella enterica; identical to SEQ ID NO: 265179

SEQ ID NO: 400020 - DNA, 276 bp, Salmonella enterica
atggtcaacgatagtaaagcagaggctctggaagcgaaggggctgtatcgtagggctgcgacgcgctggcaggaagtcatgatgctttgtgctgaggacgatgatcgggaatgggtaaagcagcgccgtgatacgtgtctgacgaacgtgaagcgcccgccagtgaaaaccgatgattacggcgatctgcataaagcagtcactgagacacaacaccgcatgggaattgccagaccgaacggcgaagcattcaggctgaagggcaaggctgtttag

SEQ ID NO: 400021 - DNA, 447 bp, Salmonella enterica
atgacagcacaaatttcagcctacgggaggctggtggcagctccccagacccgcaccacggcaaacggtaaaacaatggcaatggcacggcttgcgatttcactaccctgccataccgggcagaacggagaggcaacttactggctgggcgtcgttgcctttggtactcaggccgaaacgctggcaaagcaccagaaaggcgacctgataagtgttgcaggtaacatgcagcttaatcagtggaaagcgcaggacggcacccagaacgaatccccgcaggtgatagcagacagcattattagtgcgagaacggcacgaccgagcggcagtaagaccagccaggataaggccactccaccagcagcgggcaacggtgaaacgccaccacctcacgggcagagtgaatacgaccagcgtccacccttcgacgatgaagcgccattctga

SEQ ID NO: 400022 - DNA, 2757 bp, Salmonella enterica
atgcgtaatatcgaccttatccgcgaagtgaccaccgccgccgctggtaactggccttatgtgctggctggcctgtctatcgacgtgcctgattcatcacgccgtcatgccccctgccctgcatgtggcggtacggatcgcttccggttcgatgataacgggcgcggcagctttatctgcaaccagtgtggcgctggcgacggcttagatctgattaagaaagtgaacaactgcgatactacggaggcggcaaaaatggcggctgaggtgctgggtattgattaccgggcagcagaaacagacccggcagcagcaagccagagaagggagcaactggaagctgaccgccagcagcgcgagcaggaacgacagaaacaggccgtaggggacgcggagcagcgaaggacaacgtttacccgtctgtatgccggaatgcgccagaacgtcacacagggcgaatctgattacctgcaatcaaaagggctgaccgggtttaactatccggttatgccggatggttcgttattgctggagctggtggacgaatccggcgcagtagtagcggcgcagaccataacgccgcaggggggtaagcgacttctgacaggttcagcgaagcgcggggcatattacggcgtaaacgcgctggaacggcctcaaagcgtcgtgattgccgaggggctggctaccgctctaacgtgtcacttaattcgcacagacgcgctgacagtggcagcaatcgacgctggcaacctgctacccgttgccgaagtgatgcgccggaagtacccacaggcacaaatcatcattgccgcagataacgaccaccacgaaggacaggcgaacacgggcaaagatgccgcagagaaagccgccttatccgtggctggctggatatcactaccaccgacagaccataaagccgactgggacgactaccgccagcaaaacgggctgaaagccgctacagccgcatttaacgattcgatgtaccagccgcagggggaatgcgtgaaaccacaactacaggccattgagggcggtaaaactgaccagccagaggaagacccgctaaaaccgcgcattgagagccgcaaagatggcgtttactggatcacgcctaaagtggacaaggaaagcggcgagattatcaacaatgaaagctggctggcctcaccgatggacgttattggcaccgggcgggacgataaggatcagtatctgatactgcgctggctggcctttggcgcaggcataccgacaacagcggctatccccctggctgatatcggagagcgcgaaggctggcgcaccctgaaagcgggcggggttaatgtcaccacgaaaagcagcttacgggcgattctggccgactggctacagcgtagcggatcccgtgaattgtggcgtgttgctcacgctactggctggcagtgcggggcatacatcatgccggatggggagataatcggcgcacctgcgcaacccgttttattcagtggccgcagttctgccgctgccgggtacaccgtggcgggaacctcagagagctggcgtaacagtgttgcgcgtctggcatacggtaactacgcgatgatgacgggcattgccgccgcactggcagcaccgttaatcgggctggctggcgctgacggattcggcattcacttctatgagcaatcgagcgcgggtaaaaccaccacggcgaacgtggcgagcagcttatacggcaatccggacttactacgcctgacgtggtacggcacggcgctggggctggcgaacgaagccgcagcacacaatgacgggctgatgccactggatgaggtcggacaaggggcagacccggtaagcgtgtcacagtctgcttacgcgctgtttaacggcgtggggaaattgcagggggcgaaggaaggcggcaaccgtgatttaaagcgctggcgcaccgtggcgatcagtaccggggaaatggacttagaaaccttcatagccacagccggacgcaagaccaaagccgggcaactggtgcgcctgctgaatatcccgctgagtaaggcggtgctctttcacgatcaccaaaacggcaaacaacatgccgacgcactgaaagacgcatatcagcaccaccacggcgcagcggggcgggagtggatcaagtggctggctaaccaccagcaacaggccattgataccgtgcgggagtgtgaagcccgctggcgcagcctgatacctgccgactatggcgaacaggttcaccgtgtaggggcgcggtttgccattctggaagccgcattgatattgggcagcgttgtgaccggatgggacgtgcaggcctgccgtgatgcgatacagcacagctacaacgcatgggtacgcgagttcggcacgggaaacaaagagcaccagcagatcgttgaacagtgcgaggcgtttctgaatgcgcatggcctgagcagatacgcgcctttcccttacgaccagtcagatttgcctattcgagaccttgccggataccgggcaaagggaaatcatgatgctgatccaatgattttctacactttcccggctgcgtttgagggtgagatagccagggggtttaatgcaaaacagtttgccgagacgataaagaatgccggaatgctgacgcctccagccagtggcagaggctaccagcgtaaatcccctcgtatcaatgggcggcaattcaatgtctacgtgatccactacatgccggagagttgccagccagaagagtaa

SEQ ID NO: 400023 - DNA, 348 bp, Salmonella enterica; identical to SEQ ID NO: 77412

SEQ ID NO: 400024 - DNA, 627 bp, Salmonella enterica
atgagcaacgaactgacctttaaatctggaaatcgcgacttattccacgccgaagccacaccggacggcgtcaatatcatgacccgcaatgatgcagggatgtatgagcatgttgctcttatcacctacgaaaaagtcgtagtaggtctggatgcgggcgagtatgacaataagcccgatgaaggatttgccttgcattttgcagtggctgacggcggggcgcgtggctggttcgacttcacttcacagcatgaagtaactatgtggcgctggttgattgctgcgacgttcgtttctgaaatgaagcgcgagaacggcacaaccactgttactgaacctgacggcacatcatcgcaggtagcgatttactccaatggtaattcgggaatggtgatttacccgtttgctgaacggctggcaatggcgaacaacatcgagggagccatgattgagcgctacggcactgagcagggcacagagagcgccattgcgttctatcgcgccatgctggatgtggattacggcgagcttacagctttcggacgcgaaacgctggccgaactacacgatcactttattgccgatctggaagaaaacggctggcctgaaatgccagcggcgcactga

SEQ ID NO: 400025 - DNA, 201 bp, Salmonella enterica
atgagtaattttcgcgtgattgcctcctgttttgatggcgctgatgcgccgatcccggtcacatggtacggaaatgccgctagttccaatgatgctgtattgcaaatgacccacgaagcacagcgcaacggctggagcgtcggggtaattatttgcgtacagcagagaaaaatcagcaagggcatagaggtggcagcatga

SEQ ID NO: 400026 - DNA, 264 bp, Salmonella enterica
atgaacattaacgctttataccgccatccgtccgagcttgaagccgaagcgatgttatcccgcgagcaggcttacccggatgattttacgcttgcagaccgtacagcagaacggatgacccgcgcccgcgatggactggctcacgttatgaccgatttagtcactcaactcgacgatgaacaagccgctatcgtgtattgctggctgagtaaagtcctgacgattgtcgatatagccagaattgatgcggaggccagcgcatga

SEQ ID NO: 400027 - DNA, 789 bp, Salmonella enterica
atgcccgccgtccagaaaagagcctttcccctggctggcctgatgtatgcaaatgttaacgtctggagcaaagtagcccgccgccagattgcgacaaatagcgacgtttggaacctgtcaaaacctgacatttgccaccgccagatctttacaaatcttggtgttttctggagaagtacgcacgcgcatgaatgcgaagctggcataacagcgccagctaatgccagcccctcattttatcgtcgtggtgacgaggagttttcggagaagtatcgacgcgcacgcgaaggtgagtttctggagtccataaaaaagagcttgccgactatcgccaacccggtttatggttatagcgcaccagcaaaatctggtgccgggattggcgtcccgataacctgtatagtgccgacacgcactaagcgtgtttttttgtcggcaaaattcctgcgcacccaaattatggtgggctggatgaggcttccgaaaggaaggccggtgtctatacaggccggttacgccaaccttgttcagctcaccaccagtctgagattggcgtctcttggtggtgaattcaaaattcactgtatagaggctgccatcatggctactacccctacccaaaatccgcaatttatctggttaatcgctgccgttcgccgcgacatgccgacaattacccccaaaatccatcatattgctgccgaaagcgaacacgaagcccgccgaacgctggcgcgagatcatgtctgtttctttgcaggccgtatccgtctggaggtggccgcatga

SEQ ID NO: 400028 - DNA, 588 bp, Salmonella enterica
atgactatcgaaaaaagccgattcaattcggaggccgccccacaatcctgcgttacccagaaaattattcctcaagcggtcgagggcgatatttctgttatccggtttggtggcatcaaagttcgcatcgtcaatatgggcggtgatccgtggtttattgccaaggatgtttgtgcggcactggaaattgtggatcacaaagtgcctatgcgccgactgaacgacaacgaaaaggaggggtattcaatacccacccttggtggcattcagacaatgacaattgtctctgagtctggtttctacaaactgatcgcccgcagccgtaaagcgtcaatccccggaacggctgccaaccgattcagcgagtgggtatttggtgaggttatcccgtctattcgtaaaactggctcctatggtgtgccgttcgccttcctgaacgaccacagcaaacgcaaagcagcttacgacaagaaggccagcaagcgcggtaaagacctgcaagcctgcaaaggtgagaagtcccgcctgttcgccgaagaagcggagctatggcgcaaatatcagcctcaattgccggaggttcactaa

SEQ ID NO: 400029 - DNA, 435 bp, Salmonella enterica
atggaaaagaaaaaccgccccggacagcaggcggctaacatagatattcgcggatctgatgttacgccaccagcgcccaccacacaagcgccacgccgcacaccgaagaagcaccgcgcccgcgtctacatgctacgcactggcgtagagggatggacagaaaacgacattcttcgctattgccgcctttcgtctggaaggaactacgccagcgagttagagcgcaggcttgatattcagcttgagcgtatcgacgaaaagaatcccgacgggatcgggtcacatttacgctatcgctttaccgggcgcggtgacgttctaaaagttattcggcttgtgaaccataacgccgacgctgggggctatcagggactttctcagcctgaaattgccgacattctcaatctatacccggacaatctcaccgccgcataa

SEQ ID NO: 400030 - DNA, 198 bp, Salmonella enterica
atgtctcagtcattaattcgattctctgaagtacaaaaacgaactggttacagtaaggcgtggttatatcgcctgatgagtcagcagcgtttccccgcagcaattaaaattggttcccgctctatcgcttttattgaaagtgaaattgacgagtggattaatcagcgcatcgctgagtcgcgtggcgaggtggcgtaa

SEQ ID NO: 400031 - DNA, 459 bp, Salmonella enterica; identical to SEQ ID NO: 165223

SEQ ID NO: 400032 - DNA, 318 bp, Salmonella enterica
atgttagacatcgctgaagtgctcaaagcacgagaaaatgagtttattagtttaagagaattgattactcgtatcagactacagcaaccacatgtcagtgaatccgatatcgcaagttttctttacattgaaaatagtaatagagagctccctgagtgggtgaagcaaggtattgcaagcacgattgaagggaccgatggtggataccaggattcagaattggtaactctcctgaaggttattcatgaggaagggcatatgcctgaggtgactccaccatctgagcctcctatggacttcgatgatattccattctag

SEQ ID NO: 400033 - DNA, 1227 bp, Salmonella enterica
atgccacttacagaccttgaaatcaggcgctctaagccacgcgagaagccctatacactcaatgatggtagcggcctgtctctactcattgagccgaacggatcgaagggatggcgtttccggtaccgtttcgacggaaagcccaaaatgctgtcgcttggcacatatccgctcgtatcccttactgatgctaggcaaaagcgtgatgaagcaaaaaagctggtggcctcgggcattaaccccagcgacgtgcgcaagagggataagcaggagcgacagaacgagattggcaatacttttgaggccatcgcccgcgaatggtacgaaaagcgcactgatcgctggtctgctggttatgccgaagaaatgatgaagacgtttgagactgacgtattcccgtttattggcgggcgccctatcgctgaaattaagccgatggaacttatgggcgtcctttcccggctggacgagcgcggggcgaccgagaagctacgtaaagttcggcaacgctgcggcgaggtgtggcgttatgccatcgttactggcagggctgagtataatcccgcacctgatctcgttagtgcttttgtcccgcataagaaagagcattacgcatttttgaaacacgaagagttgccagaattttttagaacgttgaatacctatagcggcagcattgtggttaagttggcaatgcgcttgcaggtgcttactggtttgcgacccggtgaactacggcaaggggagtgggctgaaattgattttgaaaagcgcttatgggaagtaccaccttccagaatgaaaaagcgccgtcctcactgcgtaccattatccgctcaggctattgccattctggaacagctaaagccaattaccgggcattatcagtttattttccctggcagaattcatcacagtaagccgatgagcgaaatggctatgaatgttctcatacgccgcatcgggtatgcggggagagtaacaggccacggattccgccacactatgagcactattctccacgaacagggctataacactgcatggattgaaacgcagctcgcccacgtcgataaaaactctattcgcggcacctacaaccatgctcagtatctggatgggcgccgggaaatgcttcaatggtatgccgactatatggacgtgttggagcatggtgaaaacgtggttcacgggcgctttggtcaatcctcatccataactggatga

SEQ ID NO: 400034 - DNA, 153 bp, Salmonella enterica
atgcgcaatgaaatagccattaatcaccagatgcttcgtgcagcacaaaacaaagcagtaatagccagatttattggtgattcaaaaatgtggcttgaagcaaataaagcgatgaaatcagctatcaaccttccgtggtatcgcaggaaatga

SEQ ID NO: 400035 - DNA, 135 bp, Salmonella enterica
atgatgcactttcagctcgcgggtagcggcgtcatgtccgctttctacccgcacgaatctgaattatcacgccgagttaaacaattaatcagagcagcaaagaaacaactggaggcgttatgcgcaatgaaatag

SEQ ID NO: 400036 - DNA, 291 bp, Salmonella enterica
atggaatttaaaggtactgaaggtaagtgggaaataatgatggatggcgatgagattaaaatcatccaggcagactcacttgaaaatggcgcatgctggcgttcgtatattgcaatctgtgaggaagttcaatgcattgaagatgccaatctaatagcggcagcaccagaccttttaaatgccctgcaagcaatgctaaacaaggcatacaagcaaaactggaatgaccattatcctgatgaagtatcgaaagcacagtcagcaatcagcaaagctcttggggatgagtaa

SEQ ID NO: 400037 - DNA, 207 bp, Salmonella enterica
atgacataccaagaagtacgcagaattgtagttgctgcgcagagtgacgttgtgagacttaatgatcgcctgtgcaacatgcatcgtcactggattgataatggcctttgcgattcagtaaattcattaattaagcagcacgaagctgctgttgcaaaatggaatgaagcaaagttagttatgaactcactttcttctcagaaatag

SEQ ID NO: 400038 - DNA, 279 bp, Salmonella enterica
atgaacgatagctaccgacaattcgaagagtggtggtcaaaatacaaaagcccgttcacggaagacgacgggttaaaagagtttgcctgggtgatatggcaggcatcaagggcagctattgaactggatatcgactggcccgaatcgaatgacgacttttggaaagatggtgaagaaggtgcttatgcgatgggttatgaggatgggcgtgacaaaacggtaattgcagtaatgaaagctatcagagccgctggaattaaagagaagaattttcgatga

SEQ ID NO: 400039 - DNA, 270 bp, Salmonella enterica
atgaaaataccattggtcggtggtccttatgatgagcaggtttacgattgcggtgtagatactaatggaatgcctgaacttgatattctgtatatgccgaatcggtcgacgattgaaggtgggcgtgtggaacttctatctgaagccccgatgtctccagtgaaggatttacgctaccgattagtccgggttaatgtgaaagaattggttagtgggcgtctttgcgattctccaacaaaatggcgttgggagtatcactatgaatgctga

SEQ ID NO: 400040 - DNA, 210 bp, Salmonella enterica
atgaatgctgatgattggattagtgttgatgtcagtttgccagaaagcaaagaagggatgtggtctaaagaggttatagctcttactgatactggtgacgtgttcaaactatcatgtatgggctcttactggcagagaaccaaggcattcatcgattcaggagcaagcaaggttacacactggatgccgcttaattacccagatgattaa

SEQ ID NO: 400041 - DNA, 390 bp, Salmonella enterica
gtgctcagttgggttggcggaaaaacggatgttgttaaatatgcccgtgccgaacgcgtggccggtgattcgaaattcaacggctggaaattatggaatctggcactcgaagggattaccagcttctcaaccttccctctccgcatctggacgtatatcgggttagctgtcgcaggtgttgcatttctgtatggtgcctggatgatattcgacactctggcgttcggtaacgccgtgcggggatacccgtcacttctggtgtcgatactgtttcttggtggcatccagctaatcggcatcggtgtactcggcgagtatatcggaaggatttacattgaaaccaaagcaagacctaaatatatcattaagaaagttggtcaaataaaatga

SEQ ID NO: 400042 - DNA, 1251 bp, Salmonella enterica
atgactagaccgattgctgttgatttatttgctggagcgggtgggctgagtctcggtttcgagcaagctggctttgatataatggcatcagttgaaatagatccaatacattgctctgctcacaaatataactttcctatgtgcaaaacgatatgtagaagtgttgttgatgttaccggagaatacgttagggaagtttcaggtattggtgagaaagagattgatgtagtgatcggaggcgctccctgccaaggcttttcattaataggaaaacgcgcgcttgatgatgataggaacaaactggtctatcactatgtacggctggttcttgagctaaagcctaaatactttatttttgaaaatgtaaaagggttgacggttggtaagcataagcagtttttagtagagataatggatgcatttaaagatggcgggtacgacgttgtaagcgattataaagtgctaaacgcagctgattatggagttcctcaagatcgccgtcgtcttttcttaatggggggaaggaaaggaattgctctgccatcataccctgagccattatccattagaacaacggttggggacgctattggggatattcctgatgcggaaaaatatcctgagctatgggatagagattgggtttatgctaaatttggtgagcaatcactatactcatcctatttgcatggcgtagaaaaagatcctagtgattttagctacccaaggatttttaataaagacaaattaacgtgttctttactgacagatcactctgacatttctagagggcggtttgttgaaactttgcctgacacggtagaaccaatcagcaggtttaaaaagctctcgatgaatgggctatgtaatactttaagggcaggaacagcaagtgacagaggtgcttttacatctcctcgtcctatacatccgatctatcctagggtcatcacggtcagagaggcagcaagactgcattcatatcctgattggttcagatttcatgtgactaagtggcatggatttagacaggtcggtaatagtgttcctcctatgctagctagaagtgttggcttgcagattatgaaggttcttggtgttacgccaaaaaaaccaacgaagaaaatcaaactcggtgatgaaagtttggttgctatttctatgtccgatgctgcatctatgtttggtgtgtcatcaaatgtaattgctaagagaataaaaaatagtaacaaggaggttgtttgtgagtaa

SEQ ID NO: 400043 - DNA, 810 bp, Salmonella enterica; identical to SEQ ID NO: 144902

SEQ ID NO: 400044 - DNA, 696 bp, Salmonella enterica
gtgggtttgtttgatatttttagtaaattgaagggaaataaaaatgttgaagatgctcaaaaaactaagagattagcgaagtggggggctgctgcggtaacgatattgcctgggttgtatgcattagtgactgttgattccgagtcgattttaaaaaactatgaccttgcaaaagaatggtacttatcaactcctgctatgacagggtcttggtcatcgaggtatcccggagatactgattatgtgatttcagataatgcttggttagagtcagagcagcaaacttcaatggaactagaggtttatgatggaaagtttgacggagttatctctactccacagataagagcttttattcttaaaacacctcaattaacagactattttttgctcgaaggggaaaaagatagcttttggcgatcaggaaccggatacgtctatgaagttattgggggtaagaagtatttatttggtgtcgttaatataagccttgaagatgggcatttggtgcttaccgataaaactcctggcgggagtgagttgattcccaataaaaccactctcacaaaaagagaagatgcagcgtttggtgaacgatttcaaacacatagtaatagtgcggtaacaggcatgttggaaaagtttaaagagttgaatgaacaacggtcaaggaaagaaattttttccagtgagtaa

SEQ ID NO: 400045 - DNA, 498 bp, Salmonella enterica
atggctatcactaaatgcaaagaatgtaaaaaagaagtatccacttctgcaaagacttgcccacactgtggcgtaaaagatccgggctttggtgctaagcagaaacttagcggctgtctgatactgattatcattgtgggaataatcatgtacttcgttggtagtggtgacgatgaaaaagcagctgaaactccaaaggtatgttctaacactgacacccagtgcaactttgataagaacttggtagatgctgtgacgaaatgcaagccattagttgagcgttccgcgaagtatgaatttgagtggactgacggaatgttagacccaatgttttctcatggccgaattgatagcaagaaaaaccagttaactttcatcggtgataaggtcaaattcacaaacggcttcaatgcaaaaatgaacatgacctatgcctgtacgcttgatctgaaaactaaagaagtcgtggacttcaagatttcagaagggaaactgtaa

SEQ ID NO: 400046 - DNA, 897 bp, Salmonella enterica
atgtcagacaagaaaaataaatcagaaacagtgaatattgaaacagataatgataaaacatgtttcattattatgccaatagctgatcatcctgactatgaagcagggcattttaaccgtgtatatgagtatctaattaaaccagcctgcattaaggcaggttaccatccctacagagcagatgatagcaaagcatcacacatgattatgtttgatattctcaaaaaaatcatggattgcgatatggccatttgtgatttgagttcaaaaaatgcaaatgttttttatgaacttggtttacgtcaagcattcaataaaaaaactatccttattactgatggcagagaaaaacctccattcgatatttcaggcttcagatatgtaccttatacaccgtcattacgggttgaccgtgtaaaaagtgagatcatgttaatttctgaaatgcttcacgaaactgaaaatgctcccgaagatgatgtaaactctattgttaaattattacaaattcagcctgcaagcgttgaaaaaataaatttaaataaagaagaaagtgtcatttacgatatgttcctcagtttacagaagcaaatttcagacataaatagaaactcaaaaacctttgatattgagagtataggacgtgagttgggtgcaagttatgccaaatccaagtgggaaaatcaaatagtagctaaaatatattctggattatcattttcagacattgcgagaaaacattcggatataatgtatagtgtgccatttatgtatgacggtaaatacattggtagattatcctcaatagataatgaactggttcactttaccaatgaggatgacaaaaccacttttccaaatgatgtcagaattcttgataatatagttgtgaaataa

SEQ ID NO: 400047 - DNA, 1038 bp, Salmonella enterica
atgagcattgttagaaaaaatggtaaatggttgctggacttttatccggaagggaaaccccagggtaaagccagcaaacgcatccgaaagacgttctccactaaaggcgaggcgatagcctatcagacttacataatggaaaacgtccacgtaagaccctggctcgatggaaaagaggatcgccgcaaacttcttgacttagtgaaccagtggttcgatgaacacggcataacactagatgatggggaaaagagaaaatcagcgatggtatttgcttgcgaaagcatgggtgatccccttgcgcatgagtttgatgcctccttgttttcccagtatcgcaagaaacgcttatctggagagatatcccgaacaactcgtgtaaaacaggtttctcctagaacaatgaatcttgaattggcctacttccgcgccgtattcaatgaactaaagcgactcggtcactggaaggttgataacccattaaccaatgttcgcccgttcaaatccgaggaagccgaactggcatacctggggcatgaagaaataaccagacttctggcagaatgccttaatagccggaatgatagcgtttattgggtggcttgcttatgccttttaaccggcgcacggtgggatgaggctgaatctttaacaaccaaacaaatcaaaaatctgaaagttagctttttcaagacaaaaggcaacagaaacagaacggtgccaatcagccaagatttttttgaagcgctgccaaaaccagagaaacccggccgctacttcaaatcatgttattcagcatttcgcaaagccgtcgaacgtgccgaactgaatttaccagatggccaactttcacatgttctacgccacacttttgccagccattttatgatgaatggagggaatatcttggtactaaaagatattctgggacatactgatataaaaatgactatgcgttatgcacatttctcccctaaccatcttgaagatgcggtgaggctaaaccctttaggaacaaaaaatgaattcaaaaattaa

SEQ ID NO: 400048 - DNA, 711 bp, Salmonella enterica
atgaattcaaaaattaaaaaatacttattctattttatacttataatcttaactttatttgctgcttatccagcttataaattttatgacacatttcacgagtatggtttttcaacaaaaaaccaagactgggccaatgcaggttctttttttggtggaatatatagtgcaatatttacctttatcagcctaattgttttatcagcaactctaatactcacaaagaaatataacaaccaacaacttgaaatattactaacttctcaaagaagaacaatattttgttcgttgtttgataaactaacacaaaaaatggattcaatagaatactataaaatgggattgaataacgaagaacattttttttcaatgtgtgaaacagaactttttaacgacttacacagcatcaaagaggatggggaatgggatgctggcgatgtgatagatttaagcgtcaatttacttcaaggcgactggtttaatataaataagccttattatgatgtaattttgataacagaagaaatactaaacattcttgatgatgccccagaagatgataaacgattcttcctagcctacatggaagccaatgcttctacacaacgcctttactggcttttttgttacatgtacgcctttagagataattgttcggatattttggtacgcaatacaagaactctccgcatacccaaaggctatgtataa

SEQ ID NO: 400049 - DNA, 2454 bp, Salmonella enterica
atggctatcaagaagaacgaactttactcctccctttgggcgagctgcgacgagttacgtggcggaatggatgcttcacagtacaaagactatgtgttgaccctactgtttatgaagtacgtctctgacaaagctaagggcaacccttacgcgatgattgaagtgccggaaggtgcaagtttcgacgatatgattgctctcaagggcaacaaagaaattggcgaaaaaattaacaaaaccatcagattactggctgaggctaacgacctgaaaggtgttatagacatcgctgacttcaatgatgaagacaagctgggtaaaggcaaggagatgatcgaccgcctttccaagctggtggcaatcttcgaagggttggatctctcagccaaccgtgttgacggggacgatctgctgggtgatgcctatgaatatttgatgcgtcactttgctacagagtcaggtaaatccaaagggcagttttacactcctgcagaggtgtcacgcattctggcgaaagttattggcatcagcaagcagacaccacaggatgctaccgtttatgatcccacctgtggttcaggctcactgttgttgaaagccagtgacgaagcaggccccaaggggctaaccatctatggacaagagatggattatgcgaccagcgcactggcccgcatgaacatgatcctacatgacaacgccactgctaaaatctggaaaggtaacactctggccgatccgcactggaaagatagcaacgataatctgaaaacttttgacttcgcggtagccaaccctcctttttccaacaaaaactggaccagcgggctggatgctgcgaacgatacttttgaccgttttgtctggggtacaccaccagaaaagaatggtgattatgctttcctgttgcacatcatcaagagcctgaaaagtaccggcaaaggtgctgtgatcttacctcacggcgttctgttccgtggcaatgccgaagcgcgtattcgtgaaaatctgctcaaacagggttatatcaaaggcatcattggcctgcccgctaacttattctacggcacgggtatcccagcatgcattattgtcatcgataaagaagatgcccagctccgagcgttcaacgctaatggcgagagtcagcaaggcatctttatgatcgatgccagtaagggctttattaaagacggcaataaaaatcgcctgcgcgcccaggacatccataaaattgtcgatgcgtttaatcgcgagcaggaaatcccccgcttcagtcgcatggtcccgctgtcagaaattgcggccaacgacttcaacctcaatatccctcgctatatcgacagcagcgatccggaagatctgcacgacctttctggccatttggctggtggcattcccgatcacgatattgatgctctcagtgcttactggaacattttcccgactttacgacaggatctattcgaacccgcccgccctggctatagcaatgcccgagtcgaggcaggtaaagttaagagtactatcctggcacatccggaatttgcatctttcagagatggagcactgataccctttgaaaattggtatgcagaatgtcgacttgatgaaattgctcgtggtgattcgccgaaacagcttattgaagagattggcgagagtctccttgctgcctatgcttctgaagccacagttgacgtccctctacttgagaactacgccatctatcagttactgatggactactggatggatgtcatgcaggacgatgtttatgtcctgagtcaggatagctggcaggcgggcaaagtgcttcgtgaacttattgtagaaaaaggggaaaaactcaaggaaacaccagatctagtaataggcaagaaaaagtataaggctgaacttttgccgcctgcacttttagtaactcgctattttgctaccgagaagctggaacttgatcagcttcaggtcgcttatgatgaggctgcccaagcacttgaaagtttccttgaagaaaacagcggtgaagatgggttactcgctgatgcgatgaacgacaaagagaaagttacagccgccagcattaaagcacgattcaaagtggccacggataaagaagaaaaagcagtactgaaaactgctcaggcgttgtttgatgctgaaaccaaagccaaaaaagcgcataaagaagcacaggaaaaactggatcttgctgtatttgcccattatccaaagctcgctgataacgagataaaaattctgctagtacaggataaatggaaggccagcctagttgatgctttggaagcggagattgagcgtgttacgcagcggttggcaaatcgagtgaaagagcttgaagaacgttatagctcaacaatgcatgaactcacacaattagtggctgagttagaagccaaagttacgattcatcttaagtcgataaatctgtga

SEQ ID NO: 400050 - DNA, 1368 bp, Salmonella enterica
atgaaaatgaataaatcacagaatttgaaatcgatcccaactggttataaacagactgaggtggggattattccagtagattggaaagttagtaatattggagacctatgcgttatttttggacgcataggtttcagaggttatacaaaagctgatattgtatcacaagaccaaggagtgctaagcattagtccgtctaatataattggtgggcgtacaagttttactcatggaacatatattactcgtcagaagtacgaagagtcacctgagataaagatatacgaagacgatatcctgctagttaagactggttctacctacgggaaaatagcattagtaaaaaatttaaaagaggatgcaactctcaacccccaggtagtagtatttaagagactaaaaagtcccgctgcatttctagcatacataatgcaatctgatattgtgcaaaatcagattgaagaaacaattgttggtggagcaattcccacattatctcaaaaggtagttttaagttataaaatcccgctccctgctccaagagaacagcttgctattgctaacgtgctctctgatactgatgcattgattatcgcgatcgagcaattaatcgtcaaaaaaaaggctatcaaaaccgccttcattcagcaactgctgactggtcgcacacgtttaccacagtattcgaagcatcctgatggcaccattaagagctataaacatacagaattaggtctgattccagtagattggataatctctactattgatgaatgtgcaaataaggttggcagtggcaagactcctactggtggttcgtcagtttatactgaggctggacacccatttgtcagaagtcagaatattggctggggtaaattagaactatctgatattgcttatatttcagattcaatacataaaacttttcccggcactgaattagcggaaaatgatgtactcctgaatataactggtgcatctattggcagatgtgcattatcagattttcgtattgcagggggaaatgtaaatcagcatgtctgcatcatcagagtaaacagtgataaattaattccaaaactgcttgtagagttaatgaacgctgacatcggtcaaaatcaaattgatagttttcaagctggcggaaatagagaaggattgaatttttcacaggtgagacaactcagatttgctatccctaaatcactcgaagagcaaaatactattgcaactatcctctctgacatggatgctgaactcacagcgctagaacgcaaacttgccaagttccgcgatataaaacagggcatgatgcaacaactgctgactgggcgtatccgtttaccgttggaacagcagccatga

SEQ ID NO: 400051 - DNA, 1434 bp, Salmonella enterica
atgaaacacacccttgataagacagttctgtccgtcaagggtcttttgagcctgactgacgtagccattccggcctatcagcgtccttataaatggacggtaaaaaatatcagcgaactgttggcggacataaacagtcatctcgataaatcggcctaccgcttgggctcagtagtgtttcatcagcctgagagtaatgaagaacatagactggatatcgtcgatggtcagcaacgaacgttgacactaatgctggcagtatgggccattatcgaaacccgatttgctgagttggaacgtcaggatttacaggaaacgctaacccatctaaagccctccgttgaaggttttatgggacggcaacgctttgtcagtcaggtatcggaatacaatctgtaccagaattatcaggagctaaaacgtagggttagccatcgagaattcagcgagcaacatattgattttctcctcaaccgctgccagttggtggtctttgtgctgactgacctttctgaagcctttcagttcttcgactcacaaaatgcccgtgggcgggatctggatcctcacgatctgcttaaagccttccatctacgtgaattcgccagccatgaggtagaattaaaagctgtatccgttgcccattgggaaggattacctagtgatgacctggctaatcttttcgcatcttatctctacagggtacgtcagtggtcgcagggaaattcagcgcgtttctttggtaagaatgaagtcggcctattcaaagggatcaaccttgatcagattggtcagtttccttatgtggaatctttgcgtatggctcaccattttgtggatgactataacaatcaataccagcgcaagattgatggccagaaaatgcgtttccctttccatctcgatcagatgattatcaatggaagacgctttttcgaaatggcggaacactaccagcaacaggtatcggcaattatcacaagtgagcatgccagcattcatactcaaaagccgttaatgattcagggcacagtccttggtgaaatggcaacccggatactaagaacgttaaatagctatagaaatcgccatcgaacaggggatcaatatatacgcactatgtttgattgcgctctgatcttttatatcgacaaatttggtgggcagtcgttatctgcagcgattgaaaaaagctttatctgggcctacagatgccgaatccgacagcaggtggtacagctagcgactatggataagtacgtactggaaaataatctgttccgaataatcaaagaagccagagtacctagtgatgtgctatctataccattactcacaattcgggcttcagaaaataataataaccgccgtaccggtaaccatgagcaagacgagctggtgaggctgttcaaggagatgaactactatgagtga

SEQ ID NO: 400052 - DNA, 2007 bp, Salmonella enterica
  misc_feature (1406)..(1415): n is a, c, g, or t
atgagtgatgcaaaggtaacatcctttacggtcagatcattactgggtgatgcatctcgttaccttatccccatgtaccagcgtaattatgcctggggagagggggagatcactcaacttgtgcaggacatactcgactaccaacaaaaaagcctgcatagcctataccctcaaacttactacatcggtacgttagtcgtgttcactcgtcctgatggggacgcagagataatcgacgggcagcaacgtttcactaccctatcccttcttgctaactggttaaaaaaacatgcgggatccacgctggatatgagctggtaccaagggattaacttagggtttgagagcagacctaagtctggcgaaacctttgctcggctctggcaaggcgtcgaaccacataaactgcggagcaaggaatttaatgaagggctgatcaaaggctacgaacttattggcaaggttctactcgacttgaaattagttggtgagtcattaactcatttttgtacctatctattcgaccatgtacaaattgcccgaatagaagtgcctgctgataccgacctcaatcatttttttgaggtgatgaacaaccgaggcgagcaacttgaaaaacatgaagtggtgaaagcgcgactgatggcggtcaacgagataacggaccagcaagctcggcagagcagcctgaacaccctctcacgagtttgggatgcttgctccaatatggaacgttatgtccagtacggttttacaccagccgaacgtcatcaattatttgggcaggaaaattgggggcaatttgtgcccactgattttaattccctggctgatatgcttatcccatcggcttcggcgcttggtacaagagagaacgaaacaacccgcacactggctgacattatcaagtcatcttcaaccataagtggtgatagaggcgacgaagatgaaggtagctcagagcgttttaatagtgttatcaatttctccaacttcctgctccatgtgttgcgtgtctgtagccaaactggaaaggacagagtggatgttccgcttgatgacaaacaattaatcgaccagttcgaacttcggttattaaagcagaatgacccggttaaagcggtacagaatttcacctttgcacttctcaaatgcaaatatctttttgatcagttcgtgataaaacgagaattcgctaagggtagcgatgggtggagccttaagcgcctgcgttggtattcggaaaagagcaccagctataccaatacgtttaatgacgatgatggtagctatgtagacatcaaccgacagatcttgatgctgctttccgcatttcacgtttcaacccctactctggtttacaaacactggttgaatggagctttgtactatctgtttaatgcccnnnnnnnnnngtacctcgagtatctggagcatctcgcctccgcgtttgtctttcaaaacttcctggcagaacaagaaccaaaatcatattttgagatcatttacggtaaagaggtacctctccaacccacggtactgtcggacaagattcagaagaagatgcgctttgggatgatagcaaacaacttggtgttcaattacctggactacttactctggtgtcgtgacagaaataaagcagaggtagtcaaacgttttgaatttaccttccgaagttcggtagagcatttctaccctcaacaccccatggatagctacaagacattaccagatgtatcgttgcactccttcggcaatctctgccttattagccacagcaagaattcgcgactgagtaatttccagccaaaacaaaagcaagagcacttcgaagcgagtcttggacggaatgaaatagatagcctgaaactgctcgccatggtcgagttgatgaaaaagaacaatcagtggggggaagaagaaatcgccgctcacgaaacggaaatgctggcagtgttaacctgtgccggtggtagcgatagcgtatttagggaggtgttatga

SEQ ID NO: 400053 - DNA, 1392 bp, Salmonella enterica
  misc_feature (1302)..(1311): n is a, c, g, or t
atgaacagtgttggtcaacgtgaacgcatgacacaaaaacgtgttatccagttattcaccgaacatctcggttatcactatcttggtaactggcacaaaagagaagacaaccggaacatcgaaccaggcttagtctctgcctggttaacaaaacgcggcgtgtcagaagtcctaatcgcccgagcaatacgacaactggatcgcgctgcaagcctcggtgaaggtcgtatcctctatgatgcaaataaagaggtgtatcgccttctgcgctacggcgtaaaggataaagaaggtgcgggtgagcagaatcaaacagtgtggttggtcgactgggaaaatccagatgccaatgaatttgctatagctgaagaagtaacctacaacggcgaaaataaaaagcgcccggatttggtgctgtatgttaacggtattgcgcttggtgtcattgagctaaaacgttctacagtgtcagtctcagagggcatccgccaaaacctcgataatcagcaaaaagcctttatccgcaacttcttcactaccatccaactggtgatggccggtaatgatttagaagggcttcgatatggtgtaattgaaacgccggagaaatattacctccaatggaaagaagccgccgaatcacctcacaccaacatgcttgatcgtcacctggctcagatatgcaataaacagcgcctgctggaattgatccacgactttatcgttttcgatgctggagtgaaaaaaacctgccgtcataaccaatattttggcgtcactgcaacaaaaccgtttattcaacgcaatgaaggcgggattatctggcatacccaaggcagcggtaaaagtcttacaatggtttggcttgcaaagtggatcagagaaaatattaccgacagccgagttttgatcattaccgaccgtacagaacttgatgaacagattgagaaagtgtttaacggcgtggaagaagacatccttcgcacccggagcggcgcggatctcgtggcacgcctgaatcaaactaaaccctggcttatatgttcgctagtacataaatttggtcgtcaggaggaggatgacaaagacgctgacacggacgattttatcgaacaaatgaaacgaaatatccctgccgattttagcccgaagggaaaattattcgtgtttgtggatgagtgccaccgaacccaatccggcaaactgcattcggcaatgacaagcattttgccagatgcacaatttatcggtttccttaagattacctcaccgctcaaaggaataactggtttgacaccgtcnnnnnnnnnntctgttccagcgtctatcaggcctgcaaatgctatgagatgtttagtgacgcaggttttgccggtaaatgtgcgattgtga

SEQ ID NO: 400054 - DNA, 1026 bp, Salmonella enterica
  misc_feature (1014)..(1023): n is a, c, g, or t
atgtttagtgacgcaggttttgccggtaaatgtgcgattgtgacgagctaccagccaaatgccagtgagattaaaggcgaagagagcggtgaaggactgactgagaaactagccaagtacaacatctaccgcaaaatgcttgcggaatattttgaacaacctgaggctgaagcagccaaacgtgtgagtgatttcgaaaaagaggtcaaacaacgcttcatcaaagaaccgggccagatgcgccttctaatagtcgttgataagttattgactggctttgatgccccgtcagccacttacctctatatcgacaagaaaatggccgatcacaaccttttccaagcgatatgtcgcgttaaccggttggatggtgaagataaagaatacggctatattgtagactataaagaccttttccgctcattggaaaaaacagttcaggactacaccgcagaagcctttgacggctacgacaaagaagatgtagccgggttactgaaagatcgtttgcaacaagccaaaatcgatcttgatggtgctctggatgccgttcgcaccctatgcgaaccagtaaaaatgccacgcaatcaacttgattatcagcattatttctgtggggaatcaggggcgtcgatagagcagttatctgagaaagaagctttacgtctaacattgtatcaatccgtggcgaagcttatccgtgcttttaccaatctggcaggtgagctaacagatgctggttatagcgagcagcaggcaaatcaaatccgcattgatgttgagttttatacaaaagtccgggatgaaatcaaaatagccagtggcgatttcgtggacatgaagcagttcgagccaggtatgcggcagatgctggatctttgggtggatgccgatcctagtgaaacccttatggattttgaggaactagggctgcttgagttgattattgaacgcggagaagaagcactagatggacttccagccgacatgcgtggcaaccaagaggcgatggcnnnnnnnnnntaa

SEQ ID NO: 400055 - DNA, 477 bp, Salmonella enterica
  misc_feature (44)..(53): n is a, c, g, or t
atggacttccagccgacatgcgtggcaaccaagaggcgatggcnnnnnnnnnntaacgttcgcagaaccattgttgatgaaaacccagtcaacccgaaatactacgaaaaaatgtcggtgttgcttgatgaactgatcgcacttcgtcgtcaacaagctatctcctatcaagattatctggagcgcgtacgtgaactagcgaagcaggttaaacatccgcaatccggaagtaaaagtacttatccagcaagcattgatacccttgccaagaaagcgttgtatgacaacctcgggcaggatgaagtgttagttataaagatagatactgcagtacgtcacactaaaaaggccgactggtatggggatcgttttaaagagcgcgagatcagctttgctatcgcggaagaaattaaaggttattcagtgacggtcgcggatgttatggctctggtgaaggtacagaaggagtaccgctga

SEQ ID NO: 400056 - DNA, 714 bp, Salmonella enterica
atgccgttggttacctttggtgaactcactctcgatttgcagcgtaagccaatcaaaaacttgcatatcagcgtacttcctccggatggccgagtaagagtatcagctcccatctatctgtcagacacagctatcaggatggctgttgtcagaaggctagtatggatccgacagcagcaagcacaatttcaggctcagccgcgccagagtgaacgagaaatgtgtagtggcgaaacacattacctttggggaagaggatatcggctggatgtagttttagtagataagcccgttgaagtgaaacttcagggtggttggatacgtatgaaagtacctccacattatgatacggcccagcgggaagctgttctcaaccagtggtatcgcggtattttaaaacaaagactgcctaagttaatggcaaaatggcagcaggaaattaaagttgaagccagttatgttggcatcaagcgaatgaagactaaatggggtagctgtaacccccaaaccgcacgtatctggatcaatctcgaactggtgaaaaaacctcctgaatgccttgaattcattgtggttcacgagctagttcatctacacgaacgcaagcacaatgagcgttttatcggcctgatgaacatgtacctcccgaactggcgcgaacacagagctaagttgaataagatgcccttggcttataattactggggatattga

SEQ ID NO: 400057 - DNA, 1482 bp, Salmonella enterica
atgagtgagatgaaggcgcttcatgaatcacttttacttgcttgtgatttgtttagagggaaagttgactcatcttcttataaagattatatattttcaatgttattgctgaaatatatttctgatgttaaggctgactatgaatatgatttaattaatgaagaatattctgggttgttagagattgtttctcgagtaccagaggatgcgagcttttataaaatatatcatgaggctaagaatcatggtgattatattggagagaggattgacgactcgctgaaattaattgatcaggctattgattcggtctgtcaaagtagaggtggttatttatttgagtctatacaatttgcgacggttaattttggtgcaagatcagcgagagatcgaatgcttgttaatttactcgctatttttgcacgtcctgaaatgaattttggttatattcaaggtggtaatgaaaagataaaagtagcatgtagatatcttttggaaaagattgcatctgactcggcgatgaggggtggagatttttatactccagaaggtatttcgttactatttgcagagttattgcagcctaaggatggagatagtatttgtgatcctacttgtggatctggttctcttttaattaccctaggggaaaaaataaaaaaatcctttaaaagcaataactataccttgtttggtcaagaggctaatagatccaattgggccttggctaaaatgaatatgattatccataacgaaattaatagtcggatagaatggggggatgtaatatctaaccctcagcttctggatacagataatagattgatacagtttgatgtagttgcatctaaccctccattcaatattatcggttggaatcatgatgatttaatacataatgattatggtcgttttaatttaggttttccacctcagtctaagggtgattatgcctttattttgcacatgatttcaacacttaaaagtgcaactggtagaatggccatactggtatctcacggggtattgttccgtggaggtcaagaggagagtataaggaaaaatttagttagtgaagggttgttagatgcggtaataggtctaccagataggttgcttcttggtacagggataccatgcgctattttgatcttcaggagagataaaaaacattctaatgttgtgttcatcgacgcatctgatttggctaaacccgtaaaggggcgcaatttaataacaaatgaaatcattgagaaggtatcagaatgctactttgaaagaagtagtatcagtaatttttcatatgttgcttcttttgatgaaatacaagaaaatgattttaatttaaatatatctcggtatgttaagaagcatgaagagcaggcttttgttgatcttgagagcttacgtcaacagcgtgaggaactactatcaacattgcatgaattagaaagagaaatgaaagattttattgataattga

SEQ ID NO: 400058 - DNA, 603 bp, Salmonella enterica
atgcataaaattgttacattagagagtgttgctgagatccgcttagggatgccctttaaatcggcaatacaagatgctggtgagcaaggctcctgttatcttatccagacgaaagatattggacttgacggcattttagatctaggtgctttaacctctgttatcccagagggtaatcctgagaagcattatcttttccctaatgatattttattacgtctgcgggggcctgtgttttctgctgggattatcgaaggaaatttaggcaaaccaatcattacgtccaatcagttagcagtaattagatgtaatgataatctaatactgccacattatttacattggtatataaactctacttctggaagtaaacatattcgcagtttaagtgaaggtacgagtattagtaaacttaattcaaaaacagtttctaaaatgactgttaaactcccaaatttgggggttcaagaaaagattggttctattaatagaaactggaataaacaaaaaacagtttataattcactaatacaaaatggtgatatgctctttgatggtatatgtgaaagtatcattaatagcgaggagttagaaaatgagtga

SEQ ID NO: 400059 - DNA, 189 bp, Salmonella enterica; identical to SEQ ID NO: 222253

SEQ ID NO: 400060 - DNA, 495 bp, Salmonella enterica
atgaaaagcataaaaaaattgattatcgcaagtgcgttgagcatgatggctgctagttgttatgctaatggatttttgccgagcacagagcaaaagaaatcagtggatattaactttgccgctcccgaacatataaccgtatcgcttgatcaagtgccgggcttaatggctgggagggagcatgatggtatgaatattgcgaagcttacagttagttctacttctattaaacaattcggggtcaggggggtttctggcacgctaatgaacggcagtgccagtgcatgggaaataaatggtagaaatagtggcaagccaatcattgtgggcttggcaagtaatgcggccacaggtaagggcccgaaaatgtggaatggggaaacttggaacacctttaataccaataccccagttaatattgttacaataggggatcaggatatcccacctgatacgtacccaatgactgtagacgtagtgggatatcagccttaa

SEQ ID NO: 400061 - DNA, 348 bp, Salmonella enterica
atgactttagaacaacgagttgaagcgctggagttcaaggtagaatttccagaaaagaatggaataagttttaatatgaacaaagacttagccatgaaagccatacagcgtattggcagcaatgtgtcggtaaacattgattcagaaatgttagctaatattccatatagcgaagaattaacgccagaacttacgcttgaagggtacaatcagcgggcgaaagagcatgctgaaaaaatggtctcgaagatttttgaagcggcccagaaacagaccgctttattcagattagataatggtcatgtgtgcatcaatccagtaaaaatcaatttttctgttcaggaataa

SEQ ID NO: 400062 - DNA, 297 bp, Salmonella enterica
atgttgaaattaaatctgaataaacgttatttaacgctttctctatttatggctgcgttgatgctttgtgttgcagaacctgcacttgcggatgatgtgtctacgaagactactggttttttacagaaaataattgatttcttaactgcgcaacgtaagccagctattacaattatgtgtcttggtattgcctatatcgcgttatttgccagacagcatatggcatggattatcccacttattattgggatgattatatttattattgctccttacgtgcctgactggttgccataa

SEQ ID NO: 400063 - DNA, 207 bp, Salmonella enterica; identical to SEQ ID NO: 20327

SEQ ID NO: 400064 - DNA, 1053 bp, Salmonella enterica
atggattatatattgggtcgctatgtcaaaattgctcgatacgggagcggtggattagttggtggaggcggaaaggagcaatatgttgagaatttagcgctttgggaaaatattataaaaaccgcatattgtttcataaccccatcgagttatactgcagcgttggaaacggccaatatacctgaaaaagatttctctaattgctttaggttccttaaggaaaatttctttattatacctggcgagtataataactctactgagaataatcgttactctcgtaactttttacattatcaaagttatggtgctaatcctgttcttgtgcaagataaactaaaaaatgctaaggtagtaattcttggttgtgggggtataggaaatcatgtgtctgttatactcgcaacgtctggtattggcgaaattatactaattgataatgatcaaatagaaaatacaaatttgacaaggcaggttttattttcagaggatgatgtcggtaaaaataaaacagaagttataaaacgcgagttattaaaaagaaactctgaaatttcggtgtctgaaatcgctttgaatataaacgattacactgatcttcataaggtaccagaagctgatatatgggttgtttctgcagatcatccatttaatctgattaactgggttaataaatattgcgttagagcaaatcagccctatataaatgctgggtatgttaatgatattgcagtctttggtccattatatgttcctggtaaaacaggatgttatgagtgccaaaaagtcgtggcagatctatatggttcagaaaaggaaaacattgatcataagattaagctaatcaatagcagatttaaaccggcaacatttgcacctgtgaataatgttgccgctgcattatgtgcggcagacgtaattaagttcattggaaaatactccgagccattatcacttaataaaagaataggcatctggtcagatgaaataaaaatacattcccaaaatatgggccgttcgcctgtttgctctgtgtgtggaaatagaatgtga

SEQ ID NO: 400065 - DNA, 1215 bp, Salmonella enterica
gtgaatactgcaaatattttatctgtgaactatggagcttataatgctatacgtatgttaattggtgtctaccatgcagcatttcttatatctacaggtgtcactatatctcaacttgctgttttacagatcgttttttctgtgacagtgctgattcttgattttcctttatctgtcattgcagacagattttacaggaaacaggttgtagttagtggcgtattttttactatattattttaccctctttgtattcagtctcctgatatgctggcattggttttttctgaaatattttatgccattggtatttgttgtatatctggggctatagagggatgggtgttaagtgctctggatggtagaaatgaaaagtttaccttatgtgctcatttatgcgaaagggtatcttcctttgggagtgtgataactggtgctgttggaatattagttgtctacttctatgattcttataaatctggctatatagtatcgttcttcttgatgtttgttgtctttatcgtttttttatgtgtgaaaactaatggcagtggaggtgaaaaagaagcacgagatagtattattaaacaggcaaaagagagtattggattgataacaggaagttataatgggacatattttttatctataacatgtatgtttacaattggtatacaggtaatttatcatttttggcagccaattatgctatctggggaaagtattggctcattatcaaaaagagagcttataactttactgatgtgtcatattggtgcattttcaatgcaatatatagcaaactatcttatgccaaagatagatgtaaggtgtaaactttatatacttgtttgtacattatgttcatttcttagttcaatcgcctgtattttactatttatgttaataacagataataaggttgttctcggcgtagctattttctctataatccatgggatgatttcaacaatacctgttggagcacagaatatattcataagcagacttaatggcaattataagaatattatttcgggagctcttggtcttgtttctctttcatgtcgtgttgcttccatttctgtgttgggagttatatctgtattaccaggtaatatgcctgtcaccacttatatatttatctctgcaattgcatgtgtactgtgcggttgtttgttcttaatgtggtcctttaaaaaggagatggtatga

SEQ ID NO: 400066 - DNA, 804 bp, Salmonella enterica
atgacgattaaacatgctgaagaattgacggaagaagttattttaaatatgaattaccctgattttgttgctctgatgcaacaggataacactcctcctggagcagagtacaccatagactactggatcaagcatggatgtattaacaaaaagtctcacctattagatttagcatgttccacgggttttagttcacgtgaatgcttcaaaaaagaaggtgcatctgcagagggtattgatatatctgaatcagctgtaatggtcgcaaatgaaaaggcaaaaaagcttaaggctaataatttattgaaatattatgtagctgatgcttgtgatttaccatttgaagataactcttttacacatgttctcggtggatgtaattttgcatttatacaaaatcggttaatagctttgaatgaaactcatcgatgtttaaaccacatgggaagcatgtgcatttcaaatttttattacaggcgtaaaatatcagataaacttatcaatgatgtatataatgcaataaatttcagacccaatcctttgtggactttggaatactggcatcagtttttttctgaaagatttactcttgtttcagaagaaaaccatgagatggaatctcaaagtgaagatgagttaaaagccgatatttatgattacattttcaatagaaatgagtttacaaaaggtttgaatggttcacttcagaatgtattttttgaaagatttttaaaaatacgcagaccattaaatatccaaagagattatcagggagttacattgcaaatatggcgcaaaaaataa

SEQ ID NO: 400067 - DNA, 1770 bp, Salmonella enterica
atggcgcaaaaaataacaccatctaaaattgttaaacatgcccgggagttaattattaaggggattgaatcgggcgaaaactcatttgtcatttttgatgtagatggagctctggagcgtctggatcattacaggtgtcaacttaagagttttttccccaacagtagtatcgcatattcatataagtcaaataatctggcacaatggtgccagattatctcaggtaaaggtttgtatgcagaggtgtgctctgttgatgaaatgaacctcgccaaaagagacggttttaagcggattgtttttgatggccctttaaaaaaaacgagtgaactattaaaggcaatagagattggggcattaattgaagttgacaatattgatgaatgtaaaagacttaatgaactatgtaagttgcataagctgacatgtagaattcatttgagattatcgcattactatgatgataatttatcaagatttggcttatctgaaagtgaggctattaatttactggagatgttgatcagtaagtcagagtatctcattttagacgggttccatttacatgttggctctaatctacccaatgcggaaaaaatatgtaaagctattatacagtatcatgagttgattcttaggtatatgccagatgatggcactcttaatcttggtagtgggatacctgcagattctttctcagcatccagtgataacccaactccatgtccggaggtatttttctcatcgatatatgatacaataaaaaattgcttcggtactgtatgtgataaatggaactatatttttgaaccagggagacatctggtcgaagactttggctactttatagggaaagttattagtactaaaaacaggtatggtgttaaagttgctcaaactaacattggtataaactggataccttcgatcagaaattgggaccattcatttacattgtttcataatcataaccatatttcagatgataaatctgatgagtatattattgctggattcaattgctttgaatgtgattgcttgtttccttcagttattcttcccagtaacttatctgattatttattttctgttcgagggtgtggtgcttatgatatgcaaacaggaaaccagtggacgcgtaatctttatgctgtatataccataacaaatgatgttgttaatatatcaaggattcacagaagagaacttgatttccggaagtatgatgtatctcttacgccatcaggaataaaagtaaatgatgaaattacattattgtatccagcgttaaaatacgctgaagagttatatttgctcattaatcaaaacaaaataaatttcattaaaagcatggcatggccagcgtttgttaataacatttctgattctgtttctttcattgagcaatcaatgattgataaccagaatgaaaaagcattaatcctctttattaaatacaaaactaagatagctggcgttgtatcgtttaatattattgaccatgccaataaaacagcatatattggctattggttaggtgctaactttcaggggaaggggattgtaaccaatgctataaataaactgatacaggagtatggggattcgggcgttataaaaagatttgttataaaatgtattgttgataataaaaaaagtaatgccacggcattgaggtgtggcttcaccttagaaggtgttctgcaaaaagcagaaatactcaacggtgtatcatacgatcaaaatatttattcaaaagtaattggttaa

SEQ ID NO: 400068 - DNA, 1035 bp, Salmonella enterica
atgatgatacaatctcatccactactggccgctcccctggcagtaggagatacaattggtttcttttcatcatctgctccggcaacagttactgcaaaaaatcgtttttttcggggagttgagtttcttcagagaaagggatttaagctggtatcagggaagcttaccggtaaaacagatttttatcgttcaggtactattaaagaaagagctcaagaatttaatgagttagtctacaatcctgatattacctgtataatgtcaacgatcggtggagataacagtaattcactactaccgtttctggactatgatgctatcattgcaaaccccaaaattatcataggttactcagatacaactgctttattagcaggaatatatgcaaaaacagggttaataacattctatggaccagctcttattccttcgtttggtgagcatccacctcttgtggatataacatatgaatcatttattaaaatactaacaagaaaacaatcaggaatatatacctacacattacctgaaaagtggagtgatgagagcataaactggaatgaaaacaagatattaaggcctaagaagctatataaaaacaactgtgccttttatggttccggaaaagttgaggggcgtgtaattggaggaaatctaaatactttgacaggtatatgggggagtgaatggatgcctgaaattcttaatggagatatattgtttattgaggacagtcggaaaagcattgcaacaattgaacgattattctctatgctaaagcttaatcgcgtgtttgataaagttagtgcaataatactcgggaaacatgagctttttgattgtgcaggaagtaaacgcagaccatatgaagtattaacagaggtattagatgggaaacagattcctgtactggatggatttgattgttcacatacacatccaatgctaactcttccacttggtgtaaaattagctattgactttgacaacaaaaatatatctataacagaacaatatctatctaccgagaaataa

SEQ ID NO: 400069 - DNA, 459 bp, Salmonella enterica; identical to SEQ ID NO: 4500

SEQ ID NO: 400070 - DNA, 237 bp, Salmonella enterica; identical to SEQ ID NO: 20326

SEQ ID NO: 400071 - DNA, 1779 bp, Salmonella enterica
atgacggtggaaaaactgattgtcggccatatcgacacctggaccacggcgctgcaaacccgctccacggcggggcgcggcagctcggggaagattgacctgtacggcattaagaagctgcgcgagctgattctggagctggcggtgcgcggcaagctggtgccgcaggatccgaacgatgaaccggcgtccgagctgctgaaacgcattgcagcggaaaaagccgagctggtgaagcaggggaaaattaaaaagcccaagccgctgccggagattagcgaggaggagaaaccgtttgagctgccggtagggtgggagtgggtaactttttcacatttaggacatttttttggtggtaaaactccaagtaaaatgaaagatgaatattggggaggaactattccatgggtaaccccaaaagatatgaaaacgaatctaatagtcgacgctgaagataaggtgactcctttagccattgaagatggtttaaccaaagtatctccaggaagtatactatttgtcgcgaggagtggaattctaagaagaatatttccagttgctataacatcgattgaatgtacagttaatcaagatttaaaagtattatcgccatttttcagtgaaatttcatactatatacgactgatgatgaatgggtttgaaagatatatagttgagaatttaaccaaaacaggaactactgttgaaagcctgttatttgatgattttatatcacacccattcatgattccaccattcgcagaacagaataggatcttaagtactgtaaaaaaacttatgtccctctgcgaccaactggagcagcattccctgaccagtctggatgcccatcagcagctggttgaaaccctgctaaccacgctaaccgacagccagaacgccgatgaactggccgaaaactgggcgcgtatcagcgagcatttcgacacgttgtttaccaccgaagccagcattgacgccttaaaacagaccattctgcaactggcggtgatgggcaaactggtgccgcaggatccgaacgacgaaccggcctctgaactgctcaaacgtattgcgcaggaaaaagcgcaactggtgaaagacgggaaaattaaaaagcaaaaacccttgccaccgattagtgatgaggaaaaaccgtttaaactgccggatggatgggagtggcgcaggcttggagagcttattgaatccattgatgcaggctggagtcctgcatgttcttctgaaccagccgctcctggcgaatggggggtattaaaaacaaccgcagttcaatctcttgaatatagagaatacgaaaacaagtcgctccctaaaaataaaagtccaagaccacaattagaagtaaaagcaggtgatattcttataacaagagcaggtcctaaaaatagggtcggcatttcatgccttgtcgaaaaaacaagagaaaacttaatgatttcagataaaatcatcagatttcatttgatatcagaggatatctccgcgaaatacatttctttatgtctcaactatggggttacttcattatatcttgaaaattccaaatctggcatggctgaaagtcagatgaacatttctcaagatattctaaaaatggcacctgtggctatcccgactacacatgaacaactaaaaataatagataaaataaacgaaatgatggattattttataattttaaagaataaaatccaatccacccaacaaacccagctccacctggccgacgccctcaccgacgccgccataaattaa

SEQ ID NO: 400072 - DNA, 1629 bp, Salmonella enterica
gtgaatttaaatattgaaaaatataaattagcaatctcgctattatttatatattccttaggttttaccataaatgttctggttccgctaatatctgatgattttagctacatgcgcatggggcttgatttatcaagtcactatcaacattatatgacatggagtggaaggttggaggctgatctgatcagttcaacaatacttcaatttgactcagttctaataaagtcactaataaacacttttccattgattgctctatgctattttgtatacaaaatagtttcattgtattctgaatcggaccctctaattacaccccttatagctttttcatgttattttttatttaaccctaatcttgggcaaactactttttggatagtaggttccgcgaactatctttggacgacagctttttgtattatttttacatattcaatatgcttattaaccacattagataaaatttccaaaaaagaagaaataataatatatgcatctgcagttttagctggttgctctagtgaggcaagctcggctctaatggtctctgcttctgcactggctcttttatacaaccacttcgtaaccaacaaaaataaacgaataacaacaatttcgtttatactttgtttagttggattccttgttttagtaggtgctccaggtaacaaagttagacttgctagcgatgtttttagtgcatggagagacatgggtttatttgaaaaagtagaataccacttttctgaacgcataccaagtctcatgcgttacctaaagtttgagttggcaatttcattgttctgttttattttatttgttattaaaagcaagtataaattcacgaaatctactttttatttatatatagccccgtttataggattttctttcataatccttattcttatattttcaccatatacaccagatcgttctgttaacatacttactgtaatcctcgctattcctatatgcgcttcaataaacaacttgaccaaatggattaaggttacaattacatttctaattgtaattgtaatgcttgtaaattggtcgcatgtttattcctcatactcaagagtatatattcaagatgtcatgagaagagcgtacattcatgaaatgatctcgaaagaaatatatgatataaaacttccactatataatttctctaactttttcaaagagtttgatctctgggatttatttagcaatgaatatgaaattgcaagatatttcggtgcaaagaaagtcactgtcattcctgtaaatgttgattactcatatttatctacacagccaaactatacttgcaagatcgatgaagggactgaaaaagaaaaggcatattctattaatttttacgtggatagctttaatgatgtattacttatcggagaaacgaatagcagcaaaggaacaatcgatggtttgactaaaattaacacgtcaattaatacgaatagtggaaagcatcaatatgaactaccatcaaacaacattaatatatttgatcgtaattttatcgtagtaagagtgccatctgttgggattaataaatctaaagaaataactgtttccttaaatggttctgactgcacagtagaaataaatagatag

SEQ ID NO: 400073 - DNA, 2709 bp, Salmonella enterica
atggacttatttaataaacatatagctaatattttaagagcaaaagatgaagagtctttagctatttttattggagctggagtttcaaaatcatctgaaacaaaaaccattaaaatgccctcatggggagatttaattgactcactcatatcagacctaaatattgagggagagacagattatctaaaaatcgcacagctttattacctcacatttggcgagcatctttactataaaaaaatcaaagacttctttcctgataacattcctcattcaaaaatccacgatctaatatttaagttgaatcctcactctgttattacgacgaattgggatacactacttgaagcagctataaatgctaaaacttatttttacaatgtgattagcagtgataaagatttgatgaaatcttatcttgggaaaaaattaataaaaatgcatggtgattttaaaaatcacaatatagtatttaaagaagatgattatctaaattatagctataagttcccgttaattgaaaactatgttaagagtatcatatctacgcatactgttctgttcttgggatattcatataatgatatagatctcaaacagatcatcaaatggactcaaaatcattcatctgttagaccgccaatgtatctagttgtatttaaagatatccctgcacaaaggaagtatcttgaaagtcatggcattatcacgattattttagccgatgaaaaacttaagcctttcaacaatgattcatattctaataaattatatacttttctctacaacctaaatagtcttgagttatgcacgaacttaagtgatatagaaataattaatcttatttactcaagagtgaaatcgcttcaatctctaaatgcaatacttgctgaacagatcacaagatgtttcactaattgtggtttaatgtatattgacgataatggaccaaaagctttattgagattttatgacactgaagtaacctctagtgacaacaatatagagctaagaggattttataaaaaattcgtgagccttcttaatgatgatgaaaaggttgaaaagtacaagtctcatcttcagaaattattttttattttcaaaaaagcaagtatatatggtgtcatcctaaatgataagcgtgacagagcattactaactactgaaatactgccaaatgattcattgatcaagattgacaaagagataaacttcaattattacgagaatatcacacccatacgttctaatattatcgataaatccaggcaatataattgtttccagttaaataagcttgatgaagcttatagcatcatcgaggaagaactatcggaagaaataaggcaaaaagactatgctaacattcttatttctcttttcaatcaaaatgtaatacttcatagcttgaaatatggtttctcaagtgatagggataactattcaactctcgaagaaaataaaattcacgagctatatgatgaccttccaagaaatattaaaaagaccgtctcagtcatatacgacctagtaacatttaactatttatttaatctccattataccgttagttctcttttaacaaaatacagcgacgtcagaaagagaaatacacgattattaattgatggagatctttataaaactgattttttattcgaaaaccttataatatttgtattgaaaaatggttgtttgattgatgtttataaagaattcaaagatgtaattagaaaagttattgaaataaaaatcatcaaaaatgctggcaagaacgagctttctttaacaaaactagagttatactcctgcattaaatacatcgatgagaaaactcttacccttcttttaagaaaggaagacaaaaaaccaataaaactatctgtgcaaccaaaagagttagattggttaatacttatagcactcaataatttagcaaaagcgtatagtaagaattcaaaagcatttaatcctgtcgaaatcaaactcattaacacaataaaattactatctttaattaaagtaacggttgatcaagattccataatattaaaaatattagatgacaccctaaaatcctcatatcataacttagcattctatgatgccatttcagaatatattgttttgaggtataacgctaaagatgataattcatctattgatggaataaaatccataattgatacgttcctaaataagttgataagcagaaatctcggtgggtatgaaataatagccatagtcaatcgtggtcttgctaatatcttctctgtggcagaaaacttaggcgtcaatattgaggatgctgataagatagataaattactccttgagattagttcctattcaaatgcagacagagcaagagctgtagaaaccatactatatgatctgtatagaataaccactggagaaataagagaaaagataaaaaacttcatcaaaaatacttcaacagttgatttcagtgaagaaagaaaaattaagtttgaattatttttattagcttcgggaatttctgataattatgacaatcttcctgagagagttactaaactcattgaaaattataaaggatttagctttaactctgaagcagaggtaatcagaaatttattgcgacatatagttaatacccgaaatttaagtgacttttcacaagcactctcgaagattgaggaagtaatgaataattataaataa

SEQ ID NO: 400074 - DNA, 1632 bp, Salmonella enterica
gtgtctttacatgacaagctactgatgcttagtctcagttcagcaaataaagaagaaaatgagacaatcccggagttacctaagttagagcctcagccctatcaagctggaaaaaatttgaaatgggataataaagaactcaaaaatcatcccattacttcaaagattgacattgatgtaatatgcaaaaaaattgaaaacaaaagcattgtaattacgtcagctaacgatgtagccaatcttttagaagttccggtcggacaattattatttattttatataataaaaaagataactatagaacttttgaaataaaaaagaaaaatggaaaaagtagaataataaacgcacctcaagggggtttatcaattctgcaggagaaattaaagccgattattgagtacttttatcgtcccaaaaaaccagcgcatggattcattaaggataaaagtatattaacaaatgcagaaaaacatacaaagaaaaaatatgttgttaatgtagatttagaaaattattttggttcagtcactttcgcgagagtgtatggaatatttaaaagtaagccatttaatttctcacatcctgcggcgagtatattagctcaattatgtactaaagatgggaaattacctcaaggagcctgcacttcccctatcctggcaaatttagcatcagcatcgctcgataaacacctaactcaactggcacgtagaaaaaacatcacatacacaagatatgcagatgatattactttttcatttaatcaacaacaagtcagagaaatcataacgttagataatgagaataattttgaattgggtgaggctgttatctctgtgatcgagaaaagtggctttagcataaatacaagtaaattcagagttcataaaagaaatgaacgtcaaaaagttactggattagtggtaaatgaaaaagcaaatgtcgagcgtaaatatcttagagttactcgttcattagttcataaatggagagaagacaagttaacatcagcattattatttgttaataaaaaaggctttaaagcagcaaataatgagcatgctatatcaatttttcgcaatcatatttatggccgattgagttttataaaaatgatccgtggtgatgactttccattatatcttaaattaatggctgaaatgagtcatcatgatcctttaaaaacaaaagaaggacttagagcaatgaaagaaactgaaacttatgatgtatttatttgtcatgcaagcgaagataaaacatccatcgcaattccaatttacgaagaattaaccaaattaaaaatatcaacattcatagatcatgtcgaaataaattggggcgattcattaatccagaaaattaactcagctcttgtaaagtctaaatatgtaattgctattctttcggctaattctgtagataagcattggcctaagaaagaattgcattctgtgcttgcaagagaaatcgctgaaggtgaagtaaaattacttactcttgtaaaagaagcagatgaagcaatagttgctgcatctttgcctctcttaagtgataagctttatattacctataaagataatccggcagagattgcggataaggttcgtgcacttttgaacaagtga

SEQ ID NO: 400075 - DNA, 195 bp, Salmonella enterica
atgaacttttcaaaaattaactgcccaaccaaccgtctgcaggtgaccattctgcatgaaaaagaagtgctgactggtatcggtgatgccatcggcgaattgcacacataccaatgttcacgggagcacgtgtgcagctatagagaaacgacggaatgcattgtaagaaagcgggagattcttcaaaacaggtga

SEQ ID NO: 400076 - DNA, 123 bp, Salmonella enterica
atgtttcgttccaaaagtcagttgactgtaattattactacgtcactttatgccgaagaccttttccgcttcactttgagcctgattcacttctacctgaccggctcgcctctatccttctga

SEQ ID NO: 400077 - DNA, 549 bp, Salmonella enterica
atggccccagtagctggccttcggggtgtccgggctggtaaccacggtgaaaataaccggcaatggcgcggtcgttgtggcgttgctgtgctctatcgacgccatcagcggcgttttaaagccagcgcccccgtcctggctgatatccagcgtcagcgtaccgtccgcgccggtagcggtgtaatactcaacgccgctgttgcgcgcgtcgctgtggttaatctgtatggctgccgcctgcgaaccgttaacctcctgattcgcccgcccaatgctgtcgccgcgcgtaaagataaccggcgtgtccgccaccggcttgccctgggcatccagcgtggtgatggtgaccggaatcgtctcgccgaccttcgctttagcgaaaccatcgctgtcgttatactgcggcgaagtcagcgttatctgcgtcgccaccggatgggcgttttgcaggcagacaaaatagagtttttcatcccacagcagcgaaccgatgccgccgtcgcgcagattaatcgacttaacgtagcggttttccgatgtcctgcttaa

SEQ ID NO: 400078 - DNA, 501 bp, Salmonella enterica
atggcgccgcctggccaggtgtcgtacagcgactggagatcggcaagcgagggcacaaatcccgcgccgcaggcatctttcgccacctcaaaattcacgctgccccaggtttcgttattttccgtattgctgccgtgggtaataccgctggcgacttcagccgataacagcgggcgcttaaatacctcgccgttggccgtcgctaccgtttccggcatatggccccacattttagccttatcgctgtcggggctggtgaccacggtaaaaatggtgtcgatactggccgtcgcgctggcgttatcgtacagcgccgccgtaatcgcgaccttcgtaccgtgggtatccgggcgggtgacgttgataattttgctgccgtcctcgccggtcagttcgccgattttggtggcggtatcgttgagcgattcaccgtcgatgaccaccgcagaaacgatgccgtcgccgctaccggcgatgtgtttttccccctggcgggtatag

SEQ ID NO: 400079 - DNA, 750 bp, Salmonella enterica
atgatcataaatgacatttttaaaatatctgaaacaatcacatccccatttcactatatattcaagagaaaactttcacattacttatatcagaagaatattattgaaattctcggtagagttaatgatgacaaactgcgaggatggtatagtccatgtgatttgatgaatacaagagaattcagaggaatgattaattcgcttttccaacccggtgactatcatttttctactatggatattgctgctgcaattagtattgcaacaggtcattattctgataacgagtttaacaaattcagccacgagattattgatttctcatatcacatatcgcatgaaataaaggaatcaataattaaaaataaagtaattcgagatggtttggttgattatgggaaaaacattagcttaattgatataaaatcagatcggacagcaattgaatgcctatttaaggataaaaaagagttgtttcgacattatttttccacgttcaataatgctatctataatcatagtattcagatttggcatcaaggtaatgataatacgtggattgactggaccgaaaaaaattctatacgcataaacattaacccctataaaatccgagagggtttctttttaatcggatttgactatcgtgatgtcacaaatgataaaaggttgcatgttgccagtaataaagatggatatgaatattttaataaatgcttgaaaaatagttcacgtgtgtggatgcagtaa

SEQ ID NO: 400080 - DNA, 405 bp, Salmonella enterica
atgggctgggagcttcacatagtaagaacagaatgttggtttgatagcgcaagtgatccaataagccgtgaagaatggctccagcttgttaatgacgacgaagaactaacaatagataacgtgaacggtgattcttatgctatatggagtggtcagagtgaacatgatgagccttggcttggctgggatgatggaaggatttcaacaaagcatcctgacgaagccctttactgtaaaatgttgcaagtagctgagaagctaaatgctgttgtcgttgatgatgatgatcataaatatttattaccaagtgatcttatgaatccatcatgggcgaaatcatcacctaccggtagaaaacaaaatttatgggaaaggttgttttcaaaattaaaaaaactcttttaa

SEQ ID NO: 400081 - DNA, 969 bp, Salmonella enterica
atggaaaaaatcttcagcaacccttacgttagcccacttagataccctggaggtaaacgtaaactacttcctctgatagccgatcttatcaatcgttcagagccagtgtccctacttgttgaaccgtttgctggcggtgcgtcagtatcaatcggtttactagaggcagggattgttgaacatatagccttatctgatcgtgacgagttaatcgcaggtttttggaaaacagtattttctaaaaattcaaaagctcttgctgataagattttatcaacaccagtaacattagatacatggagacaacttagagaggaaatacctaagacttcattcgaaaaagcctataaatgcctatttcttaatcgcacaagttttagtgggatactaaaagaaaccgctggccctatcggtggaaaaaaacaagaaagtaaatatccaatcgattgtcgttttaaccgagagaaaatcgccaatcgaatcatccaattaggaaaattacgagaaagagtgttatttgttaaatgtcagtcttatcatagaacaattaaacaaatacacgagtcattaggtaaccgttacgcagaatctaatttgttatggtatttagatccaccattttttgagaaagctgattccttatatcgttattcattttctaaatcatcacatatcaattttagaaaatcgattaataagctgaagggacgttttatcctatcttatgatgatgtacctaaagcgagagctttttacagtaataatcctgggtttgctagagtaaatctagcatacaatgcaagaatagattctaaagaacgcttactttcaagtgaaattatcgtatctaatattatcgcagctctacgaagcgaagggaatttcactatacctcaaatgggtgagataatatctctatatggattggaatcatttgaaaaaattagaaaaggttatatgcatttttaa

SEQ ID NO: 400082 - DNA, 2088 bp, Salmonella enterica
atgatatttaacattgcgaatgaagttgtaaaaactgaatctccgttagtcagtttacttggaaatcatgaagaatcatttgtaggatatgtctatggaatgaaatttgacgaggtatttgtattaactaatgatgcctttaagcacaaagtaaatggaatacctcataattcatttttagttgctgctgcatttaatcctgaaaaattcacttcatcgcaattaattgatcaagaagttatcttattaagggttctggagccagtaaatcttcctcaagataatgattatttacgtacacgcattgaacatcaccagagaagaactgcgcaagaaaaatatcctggagatgctaacgatggttttgatcctataacggcagtagagcttcaagccggtggattaaaatgtagtgtattaggaacgttctatatcgatgaaaatgagaatcttcgtttaggaagtgatattgaaaacttcatgacattatctagattaagagcgtataaaccatgcggttctgcattagataagatcgtgaatcatgtaaatcctgaggttgccaataaagcacgcgaagaggcatctaaggctggtttcaagagcaccccttccccaatccatataggttcgattcgttatacttcaactgatcgtatgcatagaagttcatctgaatctaaagtgcccgtttttattcagcccacagattttttagcacgccgcaccgccgtcttgggcatgacgagaacaggtaaatccaatacgataaaaaccacagtttccgcagttgctcttgcagcacaaaaagatcatatatctattggtcaattaatttttgatattaatggtgaatacgcaaacgctaatcatcaagatgatggtagttctattgcagatgtatttcctacggataccattcgttatcgggcgatccatacagatggattcaaagatcttagaaccaatttttaccttgactgtaatcaggcattgaatttaattcaatctctatttaaagcagacaattccccattcacaggtcaagatctcgatgcttttatgtcttcaactcttgaaaaaccagacccaaaggagcgttcagaatatactcgctgggaacgtcatcaagcagtttttcaatgtattctttacagggctcaataccctgaacctttatcatttcaggttaaagttcctattggtaaaagcttaataacaaatttatctaaatttgccaattcaaaagaaacaccaatagaactaaatattcccacgtctgaatatgtttccttacccgaggcctgtaaatggtttgaacaaattagaataataaatcttgcaataaaggaagaacaacgagaagaaaaaaagcctgagattggtattgaatcatcaacaaaaggtaattcatggatcgatcctacgttagaagctttattgaatattctggcgcgagaaacaagtaggaaacaatcatttggtggctggagagcaattcagaagtataggccttatcattctaatcgcagaactattgatgtaacaaatgaaattattgaacacttggactctggaaagattgttatccttgatctttctgtcggaccagtagaaattaggagtgtcctttctgaaagaatagctcgtcaactatttgaactccaaatgtcaaaattgcatgaaggtaaacaacctaaaaatatagtactttatgtagaagaagcacataaccttattggaaaaaaggcagatctgactaatacttggccgagaattgcaaaagaaggagctaaagcaaggattgccttcgtgtatgcaacgcaagaaccatcgtctgtgcaccccaatattcttgcaaatacagaaaactggttcgtgactcatctaaacaatgacgacgaattaaaaacattaggtaaattttatgatttttcagattttgtcaattccttaaaggctgcacaggatgttggttttgcaagaataaaaacgttatcatctccatttgttattcccactcaaattaatcgattctctcctgtcctgataaaagaaatcatttccgaaattcgtaatggagaataa

SEQ ID NO: 400083 - DNA, 1362 bp, Salmonella enterica
atgccgtataatggagaaaaagcaagcaaaggcggccatgctgactttgtaaaaaaccctgatgtaatgagttttttagcagaatgtgaatacatgcgtgaaccaaatagtactgaggcttcattgattgcatctgcatatcaaaaaattcttttagcagtaccgccagatttgcctcgttacgtagtcgcttctgatgcaagcaaaagtgatacgcctattaatgataaactacctagtactcagattggtttcattaaagttagtcaagtattaattggaatggatcgttatgccgaacttatagatcccgcaagccgttttgttgacccatttaaagcagcagaaatgcatagaaatgcttcagcaattacttttactctaccgggtagtaatattcgatttcaaggtgctaaaagcgtaaaagatggattccgccgagctgtttttaaacaattaaatacaaatcgcgcgaaagataacagccatttcttattaacagaaacattgctacaattaaataatggaataatagaattttctttatgtccatcttgtggtattgaaaataatttccaatttattactaatgaagtccagcattgctcacattgtagagaacctgtattcataaccgattggcttcgcttacatgaagacatttcagatttcggtaataatacaagtgcaatgacacggatgatgaatgttattgaacatctacttcttgttactctaatccatcaagttttctctgtatctccaaaatctctatcaaccatggcttttgtgattgatggccccttagccatttttggtcaaccagcaaaactacattctcgcataatggaatttttattcagaattaataatcgccttgcagaactaaatctgagtcctatattagttattggcttgcaaaaaacaggtgatgtaatggatcatgctaatatcctgaataaattcctaccaccaggtgtaataaaattacttgatgatgaataccgttataaatatataaaaggtagcgattctccttcagaaaatttcggtggtgaaacttattatggacaagactttattttcaaaactgaaagaggtagaattttcaacttcgccataccatatcctttttctgataaagcaccaggaaaaaaggaattttctaagaaaaaatcaaaaatcgcaaactatggaaatcttgttgaaaaagcgtgtaatttaatttgccactttgaattagatttgtatcaaaatgctattgtccctgtcgcattagcacatagacatgcatctattagcattgttcctggaggaaaagttctcgatattattactaaaacaggactaaaaaataattaa

SEQ ID NO: 400084 - DNA, 888 bp, Salmonella enterica
atggccttattcgcattaatggattctaatgtagcaacaaaaatcctacgcattgagttggacagtaatgctagttcaatgataaatacaatttttaacgaccaaaaacttcattttgaatctcaccatagtacagtaattaatttttatgctggctacactccgagctatagtgaatgcttcaaactttctaattttaacgaatcagcagcacttattgacgctgtgaccagaaacaccgcgattcctgtttgggatccaaaagtgattgatgtaaatcatataaaagctctattcgtaggtattgcttccccgcaaaataataatcttatagcgatacagacgttcaataagaagcaaatacttgatacttctaagtcatttgttatgaaattgattggttctgccaatacatttagcaaagcagataacgttggattcaatcttgatgataaacttgttgcaataattaatggttccgatatttttttcagaagttttttcaagctaagaagtatatttgatatgtcaaattatttcgcagaggcaacggatcaagaagtaaatgactttgctatgcatagtgtttttgaagttccacttggatttaaactggatacagttgcagacactgttatcaggacaaaggtaacactcattaacaaaagtggaacattgaacaatcaaacaatatcaaaacttaaaaaggcagcaaaaaagattaattttccattacaaacaaatcttgttagtggagttgagaaaatagttatgccgcaagaaaaaaaagcgattaaagcattgctggattttcttgatgaagatatatttacatcggaaataacacaaacaatctacaaatcaaattcaaaaagaaagtatagttaa

SEQ ID NO: 400085 - DNA, 519 bp, Salmonella enterica
atgaacaaattagcaaggttactactcacagcaagctctattgcccccgtgtgcataacgctaattttcatcggttgggtgacagattctacatggctagtgaaatatagtctgatcactgccttagtaagttggcttctttgtataggattagtaaaatttgcagagtcgaaattggaaactttacataaaaatattgactctctatcccctgctaacaaagaggtaactaattatttccttagctatcttttcccattattaggcacagattcgatagctgaaaaaaaagaatatgcaatcttcttttatgtttctctgcttttttatatttgtttctctgagaattataattttaaccctgtattatcgttacatggctataaattttatgaagctgaagacgatacaggggttggatttgttttgatatcaaaagaagttattacagacatcaaaggaaaacaatttcctgtcgtcaagctgactgactacacttttttacacgtaacgcggtga

SEQ ID NO: 400086 - DNA, 984 bp, Salmonella enterica
gtggaacgcgcagggcagctgacgcgggtcatcagcggcaacacggagacgcactacggctacgatgcgctggggaggcgaatccgcaaggcgacgtacgggcggcacacgggtcatacggcgcggagccggacggactttgtgtgggaggggttcaggctgttgcaggagaacgtgcagcagcagggctggcggacctatctgtacgatgcggaacagccgtacacgccggtggcgagcgtgacggggcggggagaaagcaggcaggtgtggtattaccacacggatgtgacgggcacgccgcaggaggtgacggcggcggacggaacgctggtatgggcggggtatatcagggggtttggagagaatgcggcggacatcagcaacagcggggcgtactttcaccagccgctgcggctgccggggcagtattttgacgacgagacggggctgcattacaatctgttcagatattatgcaccggagtgtggacggttcgtcagtcaggatccgattgggctgaatggaggtattaacctctaccaatatgcaccgaatccgttgagttggattgatccgtgggggttagctggtagccgtcttcccagaagtaatggttactgggacggtagccctggagagagtaattggcattccaataatccatccgtaaatgcgattactggtggcgagccaatttccttctctggaggaagaccggatttctcaccgtggtcaaaaggttctattacctttaacgaaggtgttcttaatggtagtcaaaatgattttactgaagtatacaaaagtattgctaaagaaatgaatattacacctactgcagctaaaaacttactctcagaaaaaggacttaccccgcatcatttgagtgttacagagattatattagttccaagtgatttgcatgggaatgtcccgcatattggatcagcttcagatatgaggaattcatcaaaatgttag

SEQ ID NO: 400087 - DNA, 153 bp, Salmonella enterica
atgaacagttttttttgctttgatgtcgttattgctaatcgctaccacagggggggatattttgctcagcctccagtatatgagcaaagaagttatataaagaacggagagtctgaggcttttttattaaaaatatggtcgtccgacacgtga

SEQ ID NO: 400088 - DNA, 1014 bp, Salmonella enterica
atgttagttttaatcactggcggtgcaggctatataggttcacatactattatacccctattagaaaataatcatgatgtaattgtacttgataatttgtgtaattcatcaattgaatctataaaacgagtcgaatatcttactaagaaacaagtaactttatatataggtgatgttcgtgatcgggatttattgaataaaatatttatgtctcatcaaattgatgcagttatgcactttgctgctttaaagtcagtgggagagtcaaataatattccgctaacttattattctaataatattacaggcacgcttaacttacttgaaagcatgcagcgatataacgtaaaaaaattaatatttagttcttctgcaaccgtctatactgccgggaataagatgccaaatacagaaagtgataaaactggaatagctaaaaatccttatggcacatcgaagtttattatggaaactatactgaaagatattagtaaaagtgatccgagtttctccattatttctttaagatattttaaccctacaggagctcacccttcaggtatgattggagagaaccctaacggcatacctaataatcttatcccttacgttgcaaaagttgcacagaatacactccccgttttacatatttatggcaacgattacccaacgaaggatggcaccggtgtaagagactatatacatgtaatggatttagctttgggacatgtaaaagctttggattatatctttctaaataagattaattatgaggtttttaatttaggaactggacgcgggtattcagtgctcgatgttgtttatctgttcgaaaaagtttcacaaaaaaaaatatcatatgtcttctgtgataaaagagaaggggacgttgcagtttcatgggcatgccctcaactagctaatgaaaaattaaaatggcaggcaactaaagatttagaggaaatgttgaaagacgtctggcattggcaaacaaaaaatccgaatggttattaa

SEQ ID NO: 400089 - DNA, 1017 bp, Salmonella enterica
atgacaaatgttgcattcattatcacaaaatctgaaatcggcggtgctcaaacttgggtaaatgagatagctaaacttatagaacaggattgcaaagtatttctcataacatccgagtatggatggttaactcaatgtagtgttttttctgaggtttatataattccagggataaaaaaatattttgatgttattgcatatataaaattaattaagtttataaaaaaaaataacattaaatctatagtggctagttctgcaaatgcgggggtttattctagacttgccagattaacgtgctcttttaaatgtatttacgtttcacatgggtggtcatgcttatataatggtggtcggctaaaaagtatattttgcaaaatagaaaaatacctttccaaattaacggatgtcatctggtgtatttctgaaagtgatagagaaaaagctataaaaaaaataggaattgatgagggtaagattattacagctacgaatgctgttccacccatgcctgctcgtttaaaagagtgtttggaatataaaattttgtttgttggtagattgacacatcctaagcgcccatgtttattggcccaagtgatatcaaaaaaaccgcaatataagctggatattgttggagggggagaacagttagaatctctcaaagcccagttcaaggattttaaaaatattcgttttttaggtgaaataaaaggtttttctgcttataaagattatgatatttttgctcttatatccgatagtgagggtttgcccatgtcgggaattgaggctcatactgcaggtgttcccctccttctcagtgatgttggaggatgccatgagttaatcgagaagaatggagttttggtagaaaatattgaaagagacattgagcttagtatagatagaatttttgaaagatatgattttttccatacgcaagctgtcctttctgctgataggtttgttattgataattatattcaattatataaagaaattattttgaattaa

SEQ ID NO: 400090 - DNA, 429 bp, Salmonella enterica
atggatggcgttgttcttggacaactaaaaaacgctgagaaaagcaatgaaattactgctattccggagttaattaatttactggatgttaaaggaaaaattatcacaactaacgctatggattgtctaaaggatattgcggaaaagattgtttttcaagatggatattatttatttgcagtgaaggggaatcaggggagattgcaaaaaacatttgaagaaaaatttcctctgaaagaacttaataatcttgtacacgatagttattcaacaactgaaaaaagtcatggaagagaagaaactcgtttacacattgtgagtaatgttcctgataaattgattgatttcacctttagtggaagggcggaagaaattattcgtagcggtttccttccgcaaagaaatagcatttcaagtgaaagaacctga

SEQ ID NO: 400091 - DNA, 570 bp, Salmonella enterica
atgcgtaaatttctgttggtagctggtgtcgcagctttgatggctgggtgtggcgaagagagtgatttcgaaaatgccattaatgaaaaaatcagcaaagatggtgtttgttatggttttagtaaagagaataacgctaaagtatttgatgattttaaactcggcactcctgtaagggttaatatttacagcaaagatgatgaagaccctattttaatcggtttgaaaaactccggcttgctgaacatttcatatgaacaggaaatgtttaaaagagtagcaatattagaaacaacagataaaggtcgtaagacaaatttttgggatagaaataatgggacctgtatcggtcatcgaactgttgttgaaatcacgaactggaccgaaccaagtgataataacggtcaaaaagtcactcaggtcttgtatgcatggaaattgtctggtattccgggttgggttgataaacaagcattcattgctgcaggtattaatggcattgataaaccaaaagaaagtgagattattttagttaaaacacagaaaggctggaaggccagaggattataa

SEQ ID NO: 400092 - DNA, 441 bp, Salmonella enterica
atgtcagatagtaaagaatttagagatttttgggctgaagtttctaaggttgcggctaaatataaagcatctgctgacggtaagcagggggaattatttgcccgtgaattatatagtgattatttgaacgtgcaacctaaaaataagaaggcatggctggatgaaatgattaaattttcttttgtatctatgaaagattcccctaaatgggtgggcgaatatgattggccatattttaatggaaggccaatggtttttcttgaacaatttaaaataccattatcagctcaacatattgattttcctaggacagatactcattatatattcgcttccaagaaagacttgggggatggtttttcttgcatttataaaataattattcaaaaagataatggtaatctcattcactcaaatggagatggatatatagagttttga

SEQ ID NO: 400093 - DNA, 270 bp, Salmonella enterica
atgaacaatattaaaatgataacactccttcatccccatgagaaaacaccatttctgatatgtgtcgtaaacaaagtggaagataccgaacatggaataaaacttactcttgaaaacggcaatgatatttttgtaaataattacagccattatctgttatcagagtctgtaagtcgttgcgataaaaacaggctgaaaaatatttatattcgcttggtttcagaactcacgctgatgagtgaagaaactataaaatcacagatgttataa

SEQ ID NO: 400094 - DNA, 156 bp, Salmonella enterica
atgaccatgaagatctgttctgtggctgaaatcgaaaacctgtccaatgcgatcatctgtaatacgtgtacgggcatggtaggcagctttcgcaacggaagtcatgccttcacttcgttttacaattttaaaatccagatgaaaaatcgccattaa

SEQ ID NO: 400095 - DNA, 663 bp, Salmonella enterica
atgctaaattcattatctgagattaataaaattgatactgtttatcattactgtaggacagattcttttctcagtattataaaaaataagaagttatggctgagttcgatggatcatttgaacgattttatggaaaagagattgttcatatctgaattcgaaaaatttattaatgaatctgaagatccgaaagtttatcaatcaattagacgcagtatcgaggctaatatgaacttgggaactccatacttgtgctgtttatctggttccggtgatattcacgggaatttagatttcgataatcaaccacctgattttcaaaataagatcgtggatcttgataggcagttctttcattttaatacacatattaaaagtgatgcatttaaagaagaaaatgagattcgattggtatacgtacataataaagaccatgattcaggggctaataatagacctataaacaatctaacatatagaatatcaaacaacaatttgacgtcttattttgagtttgtaatacctcatgacgcaattaacaaaatatatttaggtccaaaaaataaattttcagaaaatgatgtcagatcatttctaaaacattcaggcattggtaattatcaggatgtagagatactaaaatccatagcaacatattgctaa

SEQ ID NO: 400096 - DNA, 174 bp, Salmonella enterica
atgatagtagccatggtgagcgatttcatgcccggcatcaaaaattgctttaatgatttccgggaaggtgtctacagtgtgtccgggaataaaaaaggtggttttgatattattttctttaaacaatttcagaagccttggtacgccaacttgagcaccaaactctcctcgtga

SEQ ID NO: 400097 - DNA, 264 bp, Salmonella enterica
atgagtatggaaatttatgttgtctgtcatgatgaaggtacaggcgttactaattattcagatggttcatcctcatatagacaagaagatgaaagcaggattgttgtcggtcgtgatgaagattttatttattacaaagacggttcacacacatctattaatctaacacccgatgaattaatggcggattttgaatattatgcaaggcacggttattttgatgattccgaagtggtgaaaaaaattccccatcggttgcattaa

SEQ ID NO: 400098 - DNA, 441 bp, Salmonella enterica
atgaaaagattaacgatgaaggaatttttcaccaagtatgacgcgttaactgaaaaaacacagaaacagaatatacacgtaatgtttgatgataattttaacgtatatcttatagggaataagaagaacaaaaatttattagcagtagcaaaaaatatatcgcacgctacggctattaaggtgcattttgatagatggctaactgcggctaaaagtgataacagaaataaggccgttggtgtgcatgtggctaaaacgacactaaaagaaattttagataagagaattactaatcataaaattaatggtaattaccatactgtgttaaatggaaacttgcgaacgtcacgcaaggaaagcatgaaagttactagcaatattaaggaagcaccaacaacatcagccggaagtattgcgcttgatggtaaatggcaaaaatag

SEQ ID NO: 400099 - DNA, 267 bp, Salmonella enterica
ttgcctgtaaaaataaaagtggtggaatttaggcacacttacgcaaaaaataaaattagcatggcctacaatattaaatcagacgtgaaaaaacaggacgcattgcagacgctttacaatcatggctttaaatgggttgttgtgcataaagggaaaatagtatttaaaactttttatgaatatcaggcacttaatcataagcgtctaatgaatttatggggcgctaaagttgtgcctgtaaatgattctattttggagtttttctaa

SEQ ID NO: 400100 - DNA, 840 bp, Salmonella enterica
atgacgcatggtgaatttattgaaatgcgagaaacatatttcaaggataaattaaaagcagggaaaagtaaaagtgaagatacattaaaagcaacggtaaatcttagacttagtaaaataattgcgttttttaaatggctgcaagtaaaagggataataaatgagaataaagcaatagatattaaatttaaagataaacgttcagataatgacaagagagggactttcacgaatgagcagtgtcatagaatccttgatttaattcatgcgggatttagttgcaacaacagtaagagaaggacttatggtgatgatggtgaaagtctggttcaacaactaattgtattaggtatgtttacaggagcgcgtatagctgaattacaagatttagctaaggaagattttttatgtgatgcaaatggcgcacccaaaggtatttatattcatggtgcggtaaaaaattcagcaagtgaacgccttattccgcttggtgatttccctaagtggtttaagttagatttatcgttgtttcgtacttgcaggaatgaagattacaagtatttcactaaggatacacttggtaaagaagtaaataaaaccataaaaaagattatcccagaagcgttagaagataatttaacgtttcactctttccgccattcattcgaaacacgcgcaagcaaatatgaaaatataaatacaacacatattgaccagataacaggtcacgcctttaaagatacggggcgtaaaatttatctggctaaaaataaaaacttagacgatatagaacatttattttcagttattaataaaattaacttggcattgttgaagtaa

SEQ ID NO: 400101 - DNA, 726 bp, Salmonella enterica; identical to SEQ ID NO: 14097

SEQ ID NO: 400102 - DNA, 711 bp, Salmonella enterica
atgcccagtaaaaatagtgaagcccagcagtgcgcgaacacaaaccgggcctctatgtcagtaaccgtatgcaaggaaactaacatgaatattgtagcaaaatcagattacaacttccacggagttgagttggtgcccacccgtgatatgcatggtgtttggtttacatcatctaatattgcatctgcacttaaatacgcaaatagtcgtgcagtaacaatgatttataacaagtatagcgatgagtttagcgccggaatgactcaggtactcgaagtgagtacctcaggaaattatcgcaaaaaagtgcgagttttctcactacgcggtgcccacctaatcgcgatgtttgctcgcactccggtagccaaagagttccgccgctgggtgctggatattttggatcggcaggcagaatgctcaccgattgcaaaacagttcactgacgaagagctggttaatctctgctacttacaattgtggatggagaagagtcaacaaatgtgcaaacacatctacccaggaatgaagcaaattggttctgagctttctggaaggatttacgatattgcatatgagactcgctacatgtcagaagaaaccaagaaatcacttcttcgtgaaatgaagaatcttgataccaacaattttgtcgtaaagaacgctcagcaaatgctggcaaaacttcgcggcgaggaatggattcattga

SEQ ID NO: 400103 - DNA, 384 bp, Salmonella enterica
atgagcaagttccctagtcatgaaatggataggttcaatatcaggcttccggcaggaatgcgggatgctatagccttaagagcaaaggaaaacggcagatcaatgaatacagaactagtgtttatcattgatgatgcattgaagtctccggtgcctgctgaggttgataactccaggattatgaagatttactcaaacctctccgggaacaggccatcaaacaaagaagagtttgagcggtgggagaatgagctagtcaaagcaattttctacttactagatagcatcagttctcattcgcaaatgtatcaagctctcaggagcttaaggcaagatgcatataaaaatgtttttggcgatgatgctgaagacatccagttttga

SEQ ID NO: 400104 - DNA, 288 bp, Salmonella enterica
atgctctttacaaagtggcgatttttgtttaatatcgtttctaacagtagaaatccgtcctttgttaaggtggatttgaaagaaggccctgcagcgatgcggggctttttgcgttttaagcacgacctttctgaaagcgccctatcacctatcaccagaacacatccagataccctttctcattcgtggcgacggggtagggcgttttacacaaaagaaaacccagcactatggctgggattcgtgaaaatgggcggcaagagactgttgacgcagcctcctgcctga

SEQ ID NO: 400105 - DNA, 252 bp, Salmonella enterica
atggacgaatcaagaaagcagtttttggagtggtttggtgaagagttcgagtctattaacaacagcgaagaacttcacgttcaggccatcaagatgattgcctggcagtcatgggttaagtctcgcgcagctatcgagataaaactcgatgacaaagtgatggctgaggatgatttcgacaaaggacacaactgcgctatcgattattgcgctgacgccatccgcgccgctggaatcaaagtgaaggagtga

SEQ ID NO: 400106 - DNA, 168 bp, Salmonella enterica
atgagaggacttgcatacaatcccggcattcttccggcagaaatgattattcgccaacgcgtaaagccaatgccatcgagagaggaattgcttaagagaaattcttttccgtcagtgaatcaaaacaaatatctgaatgcgatgtggcgtaaaggaggcaaccagtga

SEQ ID NO: 400107 - DNA, 177 bp, Salmonella enterica
atgaaatacgaaatcccggaatcagaagatattgaatggcagcaggctatgctccgtgaaatagacagcgcccttgacgtcttgcgtgatgagcatgagcacgcagtggtggtagaagaaatcatcaatgatatcaccgcgagaatagcatcactccgcgcgtactctggatactga

SEQ ID NO: 400108 - DNA, 639 bp, Salmonella enterica
atgagcaccttcactaaagagcagttaatagaatacctgaaggaatcgacgcagaacgctagtggtatgtttgaaatcagcgaggacaccatctgcgcgttgatgtccatgctcgcctccccgccagcgccggtatctgtgcccgctgcgatggaaattgatgatgactttgacagcgcgtttgaacacggaaaagctgtcggctggaacgcctatcgcgccgccatgcttcaggccgaacctgtaagtaatagtgatgagttaccgctggactatctgcaaggacacaaagacggcctggagtgggctgcacaattggcagaagccaatcatccgcaaacaggtgactggttgtacgacgacccaatcgatcttgccagggcgattcgcaaaggtccggatatgcctactgttcagggtggcaactctccggtaactccggatggttggataagctgtagtgagcgaatgccggataagttaattccggtaatggtcatgtatgaagacggtgagatgtggtctgcaatgtggaatggcaatcgctgggatgatggcaccgaatatccgaatccgcactcagttacgcactggcgtgaaatgccagcagcaccgaagcaggaggttaaccgtggctaa

SEQ ID NO: 400109 - DNA, 588 bp, Salmonella enterica
atgaaaaaatatcagaatatcaaaaatttcagactgactgacgcgcctgtaaacagggggaaaactcaggccgaaataaatataggtgcatattttctgaagtcagacgacggacaggactggtatgagtgtcagtcattattttctgatgatactgcaaaaataatgtacgaccatgaaggggttatctggggtgttgttaataagccagtcccgcaacgtggcaacacatattctgtatcaatgttgtggccggttaatatgtctgttgcggaaatagacgctgctgactgtcctgatgattgccgtggtgatggctcatggttgtacagggatggtaaggttttacccgttccggtggattatcaggctaaggccgaaaccacccgacagaaactactggatgccgctaacagcgccattgccgactggcgaaccgaactggcgttgggtgaaataagtgacgacgataaggccagcctgactaaatggatggcgtatatcagggcgcttaaaacgctggatttgagcggcgtgaaagactcagccaccttcacggaaatcaggtggcctgaattaccacaataa

SEQ ID NO: 400110 - DNA, 732 bp, Salmonella enterica
atgcaccgctcacctgaaacatcatccttaaaacgcattaatgccataataggcgcactattcggctttttgggcgcagtttttattacctttttatgggtgcagtacaaactgggcgacggagatggctggcaagcgttgggcgttggcatcgttggcgtggtgatcgttcccctgctcacgctggcgggactgattgctggcctgctggaacatcgtcgcgtatttggcccgctgcttcgtgggtttgcggcgatactggcggcgatctgtgtttacttcggcattgcgattctggcgcaggataacgaaaatgagcggctatacggtggcgtaaaataccggatgctggcggtcacggaacgtcgtgatatcgcgagtgcagcactaacaccgttagggggatcggcatactggatatgttcagtatcagcggtgaagccggacgatcgtcctgatcggcatgacgaaagctgctggatacccgataaacttcccgcgtggcaaccggggctgaaatttcgactgacggtccgctggttcagagaaggccatttctctgatgaggattttctggtttctgcccctgagtatgagaataacaaagaaggtttttttgttattttattcggacgggataatgaagtttgcctttatacggcctatggagaacgtaattcttatgatttaaaacccgcttccgggaaggcttgtagcataatggctaagtga

SEQ ID NO: 400111 - DNA, 1977 bp, Salmonella enterica
atgaaatcttatcttaggatagagcgtcttattttggtgggttctagaaaaaattattttgtggaatttgaagatggactgaatattattcatggtgattcagatacaggaaaatcaagcattcttgagtttattgactacttattaggtggaagtagtattgaacttgctgatgaaattatttcttctgttgactatgctgctttagaaataatcatcaatgatgaaccttatactatcattagaaatatatttaaaccaaacgaattaattgaggtgtatagctgtaattttgacaatgttggtagttatatccctaagaaatatgctccaaaatttaatataacaagtgcaccggatgggtttttttcggattttttgatggattctttgagttttccaaagttgaaattaaaggtgtcgccttctcaagaaatatctaagttcagacgaattagttttcgtgatataattaagttttgttacattgatcaggataatatggggagtaaatccctgcttggattaacggagtgggcaagatatgctcatacaaaagaagtctttaaatatatatttaatttatttgatgctgatatttctgatattgaatcccaaatttctgagaaaacaacagagtttaatcgcttagttaagaagtatgagaatgtttctgagttcttgagagaaacaggctatgaatctattgcatcattagatatggaaatagacaaatgtgatctaaccattgaagatcttgaagataaacttagagaccttaatagttcaatgaaagcggattctgaggtatataatgaactgaaagcatatcattctgagtttaatttgaaaattaaagggctattaaaaaagattgcggacgtttcttataaaagagaacagtatgttcgcctaaaaaatgattacaagaatgatataaataaaattcaggcgattcatacagcaaatagcaaaattggtcaattgactaacgtgaaatgtaattgtcccatctgtgataatatcatcacaataaataatgatgactctgtttttttaaattcaaaaacggaaaaactcgatgaggaactaaattcattattgagacgcgttaaatctatagatgagttaattgttaatcttgctacagaaggacaatctttggcacaagaaagatctgtgttagaagacgaccttgctaaggtcgccgaaatgattgatactgaagctgaagaaatgattactccattcttaacacagcgtgatgctcttgttaaagaattggcagacatccgaaacagaagagggaatcttgtttccagcttaagggtaaggaatcatcaagatgatattttaactttacaagctaagttaaaagagaatctttctaaattaagtgagcaactggaacgacttaaaaaagatgctcctgatatctctggaattctatcatcgcttggtgattatttgaatgatttcttggctaagataaatattaaaaacagaactgggattagtataagtccgtcaacatattctgctattgtaaggaatagggattatttcaatataacttctggtggattaagaactttaatttcaataggttatatttcctctttgttaaagtattctatagttaatgatattaatcatccgagatttttattattagatacggtaggtaaatatttagggaagagtactaaatataagtatatgagcgagacagattcgaccgcagatcttaaggaaggaacatcggatccggaaaaatatgagcaaatatttaatagtttaattgatataagtaattatgctcagcaaaaatcaacaccatgccaaattattgttgttgataacgatgtccctgagaagctagctgggcgtttgaaggctataacagttgctcaatttagttcaactggtgagaataatcttcctccgggacttattgacgatattagctatgcgtga

SEQ ID NO: 400112 - DNA, 507 bp, Salmonella enterica
atgaattctttaccttatatcccgttagatgaagagttttctctcaatattggtattcttgcgattattctggaaaatcttagtaaaaacaggaatggaaacgctgtcctggatattgataaggctcagtttttcatgtatctcatgaaaaacccagccaaaattgaaaaggtaatgctatttttggggaagaaaattcctgttatagatgaaaaagaaactcatactataaaaagcctgtccaataatgttgatattctttttgataataaaaagataaagactattttaaaaactatggcgattagaggtctgttggacgttgaacgatatgaggaaaaaagttatctcaagttgtctgaatctggtgaagatttcgctgcgtctcttaatggtgattttttcgtttcgattaggaattattcagaatcgttaggatctctgaaatctttgccatcttcaaagttatataaaatattaaatgaagtatttatggaggcggaatga

SEQ ID NO: 400113 - DNA, 1206 bp, Salmonella enterica
atgagtatgcttcaatggagtaaaagagatggtgcgccaaatttaatactttttatccacggtttgaagggaggaagtgatacttggtcttatagcaatacagtatcttttcctaaacttctgtcatcagatcctgactttgaacactatgatattgcttgctttgagtatttcacaaattttactaatttctacggaaaaacaaaaaatctcttgagacgattgtttcaatgtacaaggaagaaagaaatcaacctgccagtcagtgaactctctgaattgttagttactgagatggatgtaaacctttcagattataagaatgttatatttgtagcccatagtatgggcggtctggttgcaaaatcctgtatattaaaaatgataaaatatggtagagctaataatttggcaggctttatctcattggccgtgccacattcaggggccggattggcttctgtaatgtccgcaatgattacatcaaatgttcagataaaagatttaagtgtttttagtaatgaaactgatgcgctgaatcgtgagtggttaactatagatagtttacctaagtcaaaattcgtgtatggaacaaatgacactatagttgcaaaacaaagtgctttgcctatacaagtccttgctaaagattctgtggcggtacatgaagatcatataactatatgcaagccagatagtattgaaaataatgtttataaagttgttaaaaaattcgtccttgagattagtaatactgtaaatgaaataatttgccctactgagtttaaggatgataagcagtatgataatgaatattttgtattgaaaatgattatagcggatgttcatgaagatataactaatcatgctaaagaatattattataatgctgaattggcgagaaatctatttaccagcgatcacgatcgtgcaattcttgataatctctatcgaaaaattaaaaatctttatcagactcaatatcagatagcgatatcagaacgattatcttcggatcaattactcgcggcaattcatagtaaaatagataacgaagataaaaatgaactagtatctttacttgcaagtctggataatttacataaaaaaggtatgctccatcagttagctaataaattgaatagggatgttatctggtctccagatacaaccgttgactctattagtgaattaagagcgaaatga

SEQ ID NO: 400114 - DNA, 144 bp, Salmonella enterica
atgcgtaaaagcctgttagctattcttgctgtgtcatcgctggtattcggttcggctgtttttgctgccgatcttgaagataatatggatattctcaatgataacctgaaagttgttgagaaaacggatagtgccctgaactga

SEQ ID NO: 400115 - DNA, 525 bp, Salmonella enterica
atgtcatggcaacacttcaagcaaacctggttaattaaattctgggcgccggcccctgcggtgatcgcagccggtattctctctacctactattttggcatcaccggcacgttttgggccgtgacgggcgaatttacccgctggggcgggcaaattttgcagctttttggcgttcatgccgaacagtggggctactacaagctgattcatctggaaggtacgccgctgacgcgtatcgacggcatgatgatcctcggcatgttcggcggctgtttcgccgcggcgctgtgggccaacaacgtaaaactgcgtatgccgcgcagccgaatccgtatcgtacaggcggtggccggaggcattatcgctggcttcggcgcgcgtctggcgatggggtgtaacctggccgcttttttaccgggatcccgcagttctccctacacgcgtggttctttgcgctggcgaccgctatcggctcctggttcggcgcccgctttacgttgctgccgatatttcgcataccggtga

SEQ ID NO: 400116 - DNA, 690 bp, Salmonella enterica
atgcgcattaagctggaaggcaagaatgagattgagcagtacgtgtatgcgttgactcatgagctgaaaagtccgctggcggcgatacgcggcgcggcggagattctgcgtgaaggaccgcccgcggatgtggttacccgctttacagagaatatactggcgcaaaatacgcgaatgcaggcgctggtagagaccctgctgcgccaggcgcggctggaaaaccggcaggatatccctctcgcgccggttgctgttgatgaactatttacgcagcttagcgaggcacgcagtattcagttggcggcaaaaaagatcacgcttactctacggccttcctcgctggttgtcgtcgccgacgcggagcttctggcgcaggcgctgggcaatgtgttggacaatgccatcgactttacgcctgaaaatggcgttatcacattaagcgctcagccgatgggagagaaagcgatcctgcaggtgacggattccggctgtggtattcctgattttgcgctgccgcgcattttcgaccgattctattcgttgccccgtgaaaacggacgtaaaagcagcgggcttgggctggcgtttgtcagcgaggcggcgcgactcctcaacggtgaggtgacgttgtgcaaccgtcccgaaggcggcgtgctggcctcgttaacacttcaccgtcacttcacataa

SEQ ID NO: 400117 - DNA, 972 bp, Salmonella enterica
atgaaatttgaacgccatcatagaatattgaaggaactcagtatttcgggagttgtaaaagtttcaaatctggcgaaaagtctcaaggtaacaaaggaaactattcgttcagatctcaatgaacttgccggacagggatatcttactcgctgtcatggtggtgcatttattacccttgattctcttgataacgtcgcaaaaaatgaaattgcttatgtgctggaaaaatatgaatcagcgcagaaaataaaaaaaggtctctctgccatgaaaaataatgtatgtgttattggctcgttcaatgttgatattatcagttatctaccgagattaccctcaacgggagaatcattgctggccgataaatttattttttcacccggcggtaagggatgtaatcaggcattagcagcaagctatgccgactctgatgtgcattttattactaaagtcggctcagatcattttagtgattacgccattaattttataaactcatcaaaaatccataaaagtgttatctaccagaccaaagaaacacaaacaggtacagcaaccatcatggtgaatggagataccggagataacgtcatcgctatctaccctggcgccaacatgacaatttcccctgatgaaatcaccattcaaaaagaagccattgttcattcagatattgttcttgtccaactggagacgaattacgaagcgctgcagcaaacaattcgtctcgcacaaaaaaatgacataccggtcatcatcaatccagcgccgtacaatgacatggttaacaccatcattgataacattgactatattacgccaaatgaaacggaagcaggcctgctggccaatatggcggttaatgatatcgaatcagccaaatgcgcggccaaaattattcaccagaaaggcgtcaaaaataccattattacattaggtagcaaaggttcgctggcactgttgcaaagttag

SEQ ID NO: 400118 - DNA, 1185 bp, Salmonella enterica
gtgtctaaagaaaaatttgaacgtacaaaaccgcacgttaacgtcggcaccatcggccacgttgaccacggtaaaactaccctgaccgctgcaatcaccaccgtactggctaaaacctacggcggtgctgctcgtgcattcgaccagatcgataacgctccggaagaaaaagcgcgtggtatcaccatcaacacttctcacgttgaatacgataccccgacccgccactacgcacacgtagactgcccggggcacgccgactatgttaaaaacatgatcaccggtgctgctcagatggacggcgcgatcctggttgttgctgcgactgacggcccgatgccgcagacccgtgagcacatcctgctgggtcgtcaggtaggcgttccgtacatcatcgtgttcctgaacaaatgcgacatggttgatgacgaagagctgctggaactggttgagatggaagttcgcgaactgctgtctcagtacgacttcccgggcgacgacactccgatcgttcgtggttctgctctgaaagcgctggaaggcgacgcagagtgggaagcgaaaatcatcgaactggctggcttcctggattcttacattccggaaccagagcgtgcgattgacaagccgttcctgctgccgatcgaagacgtattctccatctctggtcgtggtaccgttgttaccggtcgtgtagaacgcggtatcatcaaagtgggcgaagaagttgaaatcgttggtatcaaagagactcagaagtctacctgtactggcgttgaaatgttccgcaaactgctggacgaaggccgtgccggtgagaacgtaggtgttctgctgcgtggtatcaaacgtgaagaaatcgaacgtggtcaggtactggctaagccgggcaccatcaagccgcacaccaagttcgaatctgaagtgtacattctgtccaaagatgaaggcggccgtcatactccgttcttcaaaggctaccgtccgcagttctacttccgtactactgacgtgactggcaccatcgaactgccggaaggcgtagagatggtaatgccgggcgacaacatcaaaatggttgttaccctgatccacccgatcgcaatggacgacggtctgcgtttcgcaatccgtgaaggcggccgtaccgttggcgcgggcgttgttgctaaagttctgggctaa

SEQ ID NO: 400119 - DNA, 366 bp, Salmonella enterica
atgggtaaatatgaaaaagcattcaatgaggttgatgtacttatgagtgagatacttgataaattaaatattacactggaggaaactgatttatttcctacagaggatatatttataatggttgtaagggaaatagaagttgatgacttgaagttaatatcctctatttttacgaatgatgaatatcatgaggttaaagaggatatgacacccgcagtgaacaaatttatgcattggtggggagataatcttgattgtgataatataaatatactggctttaattgcgaaaaaagaagaaagtatactgtcttcaatcatgccaatttgttcagatagtgataaggaaaacaaaaaaagaatttaa

SEQ ID NO: 400120 - DNA, 228 bp, Salmonella enterica
atgagcttattgcctggacgtgacacacccaaaaaaaatcatagacttctgagaataacagatgtgattaatttgactgggttacctaagtcaacaatttatctaaagataaaaaataatgaatttccaaaccaagtatctattggttctcgttccgttgcatgggtggaaaatgaggttaatgaatggattgaaaaaaatattgcaaatagaaatttgaattcctga

SEQ ID NO: 400121 - DNA, 564 bp, Salmonella enterica
atgcacagtactttctcagacaaagtttggtggacacgtaaagctaaaattaaagccgagcgtagattattaaatttagattactattcgcaatttcttttactttggtattcatcttttttagtctgctattctatttattcacttgtaaaacctcctgccaataataatgaatctattattatggtagcattgtctgtactcattctcgcactcactctttttattaataatatgaattacaaagggcgtgccatgcttattaaacagtgttatgagaaactgagtgttattcatactttatctttaagtagtacagatctcacagaaatagataagcaatatcaggctgtattagcttcgtcagaaaatcatctcgaaagagacttcataaaagcaatggttgacgagaacgctaacacaagtgataagtcgaaactcacaaagcttccaacgacatggcataaaatacaggttttatattattctctaaggaatattattttatttttgtttttattttttgcgccattgattattttggttgtattgaggaaagcgtaa

SEQ ID NO: 400122 - DNA, 291 bp, Salmonella enterica
atgaataaagcctccccagtagagttaagagtgagcatcgaaatggcgcataaccgcctccacgatacagcgatcaagtgtgctggcacccagcaattacgggaaagaattagccgcgttttgggcgaagttattacaccagatcgtcataaacaagccgagaaaagcggcctggaaaggagtcatcttgaggcggcattaaacattaaaccggggcatacgctaggtgtcattgatgccatgttggtccatgaaatggctaaggcgttattgccactggaggctgattaa

SEQ ID NO: 400123 - DNA, 267 bp, Salmonella enterica
atgttgcgtagatttttaggtaaaagcgttattgtcggtgcgatgttggctatgtctgggtgtgctatggtgcaatacaatgacggagaaaaggttagcatccagtcagatggttggtatggcctggatagcctgcaaaaaacagcggataaagcctgccagcaatacggaaagtctaaagccgtatatcagcatagcgcgaacgctaaccctcatcttgcgcccggttcgggtgttcagaataccatctggaaatgtgagccttaa

SEQ ID NO: 400124 - DNA, 249 bp, Salmonella enterica; identical to SEQ ID NO: 31796

SEQ ID NO: 400125 - DNA, 393 bp, Salmonella enterica; identical to SEQ ID NO: 31795

SEQ ID NO: 400126 - DNA, 624 bp, Salmonella enterica
gtgccgctgtacgtgccgcagggcgtgcaagcctacccgacgttgcgcccgctgatcggcggcaccctgaacatcaagcacgtgcgtgcccactgggacgacatcctgcgcctggccagctcgatcaagcagggcaccgtcaccgcctcgctgatgctgcgcaagctcggcagctacccgcgccagaacggactggccgtggccctgcgcgagctgggccggatcgagcgcacgctgttcatcctggactggctgcaaagtgttgaactgcgccgccgcgtgcatgccggcctgaacaaaggtgaggcgcgcaactcgctggccagggcggtgttcttcaaccgccttggggaaatcagggatcggagcttcgagcagcagcgctaccgggccagcggcctcaacctggtgacggcggctatcgtgctgtggaacacggtgtacctggaacgcgccacccaggggttggtcgaggccggcaagccggtggacggcgagctgctgcaattcctgtcgccgctgggctgggagcacatcaacctaaccggcgattacgtctggcggcagagccgcagactggaagacgggaagtttcggcccttacggatgcccggaaaaccttag

SEQ ID NO: 400127 - DNA, 441 bp, Salmonella enterica
atgaaaaaacaaaaccactcaaccctgacaagttacctctctaaaacaaaaaagaatacagatctttaccgtctttataaccctcacttctcagtattctgtaaaaatagcgctgaagatcatgttttttatgttaattatttttccagacatatggtgacggaaagaaacattctgaccatatttgctatccatacctttttctcttatggcatggacaaaaaagagaccataaaatcctttattcgcttccttaaagaggagaataacgacgctttttatcagtcattttcttttcgtggctgcaatatcatttatacaaacaaaaaaagagaagtgaaagagatctcatggttttccttttcacggatctatgacgagatcgttaagataaaagaatatgaatacaacaataacacctggcacaaaatggccgcttaa

SEQ ID NO: 400128 - DNA, 408 bp, Salmonella enterica
atgaataatgaaataaattatcataatgacataacaaggttatcaaggcgtggaaaattccatactgacaaacttccacctgatgaaatacgaagccactgtgtcagtgtcagattaaatgaagaagaattaactattctcgacagtaaaagaggccagtataaaaaaggggaatggctaagaatgtcttccctggataaactcccaccggttctgcccgaaataaatcgcgaagcatggattaaactcggcagcctttcccaggatttaaattacctgctgaatcatcttgacaagaaaagtcctgacagcgaactaacccgtacagaactctttgccctgcgcagacaaatcaaaactcttcgggatcaccttattccctcaacatttctggatccagaccgatga

SEQ ID NO: 400129 - DNA, 270 bp, Salmonella enterica
atgaagaaaagactccctgcttacctttaccagtataaattatcagatgaacaacgcaatctgaacaatactgctcacaatgcattttggcttctcacattaatcgcttcatacacaccagataaaagcactgattacctgagttttcaccgtgcaacatccatcgcacaacaggaagagatacatatcacaccagcccgattttatcaggccatcgataaactgattgatacaaatattattatgcgtactgaatttaaataccagtag

SEQ ID NO: 400130 - DNA, 255 bp, Salmonella enterica; identical to SEQ ID NO: 379364

SEQ ID NO: 400131 - DNA, 234 bp, Salmonella enterica; identical to SEQ ID NO: 244341

SEQ ID NO: 400132 - DNA, 456 bp, Salmonella enterica
atgccaccggcgatttccagccgagtgttgaatgtcttcggcgtggattataaaagccatttaccagaagaatacgcggcttatctggcagcaaatcagcccgtaatgacgtgcgtatatggcaatacggcgacgggtaaaactaatttcaaagatagccttttaaggtgcatctcggatgatatggccgaaaactttttagttgaagatgaagataatggtcggatcagtgaagatactagattgcatctatttaagtctttttttgacgagggcaggaacgttgtctttgtagaacatgcccataactgtagctgtatgatcactcgattcgtgaatgcaatggctagcagcaaagttaactttatctttatcggcgaagtaggaccggcccggaaagcaaaaatgatcacggcggtaggtaagggcgggtatacatgggagacttccgtataa

SEQ ID NO: 400133 - DNA, 345 bp, Salmonella enterica
  misc_feature (328)..(337): n is a, c, g, or t
atgggtgcaattgtaaaaggctatgcacttgatgcgccaactgttccaagtttatttgagatagtgcatcttaatgatcttatggaatctcatattggcgatattcgtgattttgaaaagctgcgcaattctattgcagaatttaagccagaaattgttttccatatggcagcccagcctttagtgcgcctatcttatgaacagccaatcgaaacatactcaacaaatgttatgggtactgtccatttgcttgaagcagttaagcaagtaggtaacataaaggcagtcgtaaatatcaccagtgataagtgctacgacaatcgtgagnnnnnnnnnntatcgtga

SEQ ID NO: 400134 - DNA, 276 bp, Salmonella enterica
atggatgctataggaggtgttaaacatcatgttagcactatggtcatcgttgatgtgattggtgatggaagtcgtataagtaatatggcagaagaaatcgatggtaaaattgaagctatgtctaacccatactgggtgaaaaatgtagcaactcatgttagcgagaaattaggtgtagaaaatgtttttgatggatgtgaatctttaagagacattcaaaacaaaatatcacaacgattagatttagtggatttggaaaaatacatacaaatgtaa

SEQ ID NO: 400135 - DNA, 150 bp, Salmonella enterica
atgcaccttcgggcgcgttttttgttgacaggattaaaacagtacgagtactgtacttacgtacacaaaggaaacagttatgaagctaacccggtttttcttcgcattcttttttatcttcccctgaccgggaggcgtttcgtcatgtga

SEQ ID NO: 400136 - DNA, 993 bp, Salmonella enterica
atgtcgattaagaagctcgatgatggtcgttatgaagtggacgtcagaccgcgcggaacctcaggaagaaggatccgacgcaaatttgataggaaagcagaagcccagtcatatgaaagatacgtactgacaaactttcatgataaagactggcttgataaaccggctgaccacaggcttctatctgaactcatcactttatggtggggatatcacggtcggaatcacaactacggtgattcatacaaaaagcgccttgaaaagataaaccgtgatatgggagaaccgagggtttatatgctcacccgaaattttttgatgaagtatcgcgccaaccgactacaaagcggcgtatcagcaggaactgtgaatagagatttctgctcagtatccagcatgtttagtctgctcatcgagatggaagagtttcatcatgaaaacccattccatagcgttcgcaagctaaaactggaaaacaacgaaatgtcatttttagccgacgatgaaatcaatgagctgcttaactccctcaccggtgatgatcgaaaggttgtcgttttatgtctgaataccggtgctcgttggggcgaggccagcaatctgaaagcggaacatgtgatcagcaaccgtgtaacgtttgttaagacaaaaaccggccctgcgcgcacagttcctgtctctcaggaagtatccgattacatattgacgcgcaaatcaggaaagctattcaacaccaactatgagcgggtacgtgatgtattacgtaaggttaaacctgatttacccaaagggcaggcattacacgttctgcgccacacattcgcaactcacttcatgattaatggcggaaatataatcaccctacagcgaatacttggacacacgaccattgagcagacaatgacgtacgcccacttcgcgccagactaccttaccgatgcgatacgtttcaatcctatgcgtgggagtgtccagataatgtccaccttatag

SEQ ID NO: 400137 - DNA, 570 bp, Salmonella enterica
atgaaacatttaatgattgacctcgaaactatggataacaaaccgacttctgcgattgcttctatcggtgctgtattctttaatcctgaaactggcgaaatgggtgagcagttttatcaatgtgtcagcttggacagctgcgtagagcatggcctgactatgggggctagtaccgtgcgttggtggatgcgccaagacgcagcggcgcgcggcgaaattctgaatgaagattgcctggatttatctctgtcattagcgaatctcgaagcttttgtgacggagcactctgacccgtctaaagtgcaggtgtggggcaacggcgcagcgttcgacaatgttatcctccgcaatgcggcagaaaaatgcgggtttagtgaaccattgtggttcttctggaatgacagggatgtaagaacggttgttgaactgtcaaaaacacttggtctgaatgttcgtaatattattaagtttgaaggcgtcaaacatcacgccttatatgatgccatccatcaggctaaagttatttcttacgtttggatgtatcttgtcaaaatagccagtgtgaaataa

SEQ ID NO: 400138 - DNA, 213 bp, Salmonella enterica
atgcgatttttccagcaggaggctcttgtgtcatcgttcgactatctcaaaaccgcgattaagcagcaaggttgcactctgcaacaggtggctgacgccagcggtatgaccaaggggtatctgagtcagttacttaacgccaaaatcaaaagccccagcgcgcaaaaactggaggcgctacaccgttttctcgggctggagtttccccgctga

SEQ ID NO: 400139 - DNA, 1020 bp, Salmonella enterica
atggattttaaagaatggttaagctcaaataaaaacagtcttcccgatgcaaccagagaaaattttgaaaagctatacttggagttcatagacttcaaagcaaatgaatacatgctggaattaaaagaaaaaaaggcagaattactggcccaaaatgaacaagaacatcaaaatttcataaaaagacatgttaatatttggagagatgcttttggattattagagttgttgttagagttatgtattaatcaaggttctaaatatagtacaagcttacaacaagataaagacaccgacacaaacaaccacttacaattactaattagattacacgcaaaggcatgtgcaattgctaacgagattttatgcctattaaaaaatggatttcctgacgcagcccatgcaagatggagagcactgcatgaaacaaatgtaacactacatttcatcgataagcatggccctaaatgctcagaaatatttttagcacatgaaatttatgatagctattatctaatgatgtcacataaaaagtatgaaagtaggcttcaagagaaaggacccagtaatgaagaggtcagagaattaacagacttgttcgataaagccattaaaacgtatggtagaagctttgattcgcaatatggttgggccacaccatttttaactgataagaaacacaaagctagctttaaatcaattgaaaaagaagttaaattagatcacatgcgcccatattttaaatgggcatgccaaaacatccatgtaaatataaaaacaatcactaatagcttgtcactaccccatcacctgaagaacgacatcaacataggtccaagtaatttcggattagttgaccctgcacatgctacagcccttagtcttactcaatcaacgtgctgtctactgaaaaatgactgcaacgaagagaatttaattttcatgaatttaattaaacaactatctatagaaataggggatacattcctatctatatctaactcaattgaaaacaaataa

SEQ ID NO: 400140 - DNA, 444 bp, Salmonella enterica
gtggctgaattgcagaaggtggacgactggctgagtgccttgctggcgaatctggagccagccgcaagaagccgtatgatgcgccagctggcgcaggaactgcgccggacacagcagcaaaatatcaggatgcagcgcaatccagatggcagcagttatgaaccgcgcagggtaacagcacgcagcaaaaaggggcgcatcaaacgtcagatgtttacaaagctgcgcaccacaaaatacctgaaaactgccgccagagccgactctgccagcgtacagtttgaaggcaaggtgaagcgcattgcccgcgttcaccattacggcctgcgtgatcgcgtcagtcgaaaaggtatttatactatctatgcgaaaaggcagttattaggttttaatgcccaatctattgagttaattgaaagaatgttcattaaaaacctaacttga

SEQ ID NO: 400141 - DNA, 303 bp, Salmonella enterica
atgacaagggcagtgcgtatccatcaattaaaaattgcacctaagtatttcaacgctgtggttgcaggtcaaaagacggctgaacttcgtaaagacgatcgtggctataaagttggtgatgttctttctctttgcgaatggaagcatggtgtatttacgggtagggaatgggccgctgttatctctcatgtgcttccggttaatgacgtcatggcagtttcagaacaatgggtgatgctatcaattcgcccattaaccccattagaagctttaggatatgttattgcaggaggtgctgtatga

SEQ ID NO: 400142 - DNA, 249 bp, Salmonella enterica
atgagcaacgacatttcaattcgtgtaccaaaagtgatggcgacacctgcagagttcgcggaatgggaaggccgctctcgcggttcggtatatcaaatgattcataatggtaagctcgctaaatttttggaaaaaaaggaaaaaccgaaagacagagtatgtatacgttaccttgagtacaaaaaggaacaagtcaggaaaaacatgggccaatccaatttcaattttaatgtcatcgttggtggctaa

SEQ ID NO: 400143 - DNA, 402 bp, Salmonella enterica
atgatgactgagttcaaacgcacccaacgcgattatcctctatcctttaaaatagccgtcgttgagcaggtcgaaaaaggcgagatgacctataaacaggcccagcagcgatatggcattcaggggcgctccaccgtacttgtctggctgcgtaaatatggccggcttgactggagacccggacttcctgacctggtgaagaggaaactgcctgtggctcagacaactatcccgctgacacccgggcaaagaatcagggaacttgaagaacagcttgagctggcaaaccagaaagctgagttttttgagtccgttatcaacgtcctgaaaaatgattacggggtaagtgttgtaaaaaagcggcccggcaagtcctcacgcaaagtcaggcccccaaaataa

SEQ ID NO: 400144 - DNA, 369 bp, Salmonella enterica
atgccctttcatattggaagcggatgtcttcccgccaccatcagtaaccgtcgcatttatcgtattgcctggtctgataccccccctgaaatgagttcctgggaaaaaatgaaggaatttttttgctcaacgcaccagactgaagcgctggagtgcatctgggcgatttgtcacccgccggccggaacgacgcgggaggatatgatcaacagatttgaactgctcaggacgctcgcgtatgccggatgggaggaaagcattcattccggccagcacggggaaaattacttctgtattctggatgaagacagtcaggagatattgtcagtcacccttgatgatgccgggaactataccgtaaattgctag

SEQ ID NO: 400145 - DNA, 348 bp, Salmonella enterica
atgcttgatgtgtcgcaaagtagcagtgaaacggaattacgcggtaaccgtaaagttgccgccccgtaccgaggggccgtcgtgctagtgaattttgataccgaccagcgtaaaccatggtttattaaagcgcagcgtcctgatggctcgcctcttatttttggttatgatgtagtagatcatcatggtcataatgtgggcattgttggacaaggtagtcagctatttattcgaacgaatgatattccgcccgaagtcagtgtaccagtagataaagagcaggggctttcatgttcaatcacctttggtaaaacggttgatgaaagtaaagtttatatttgtcggtag

SEQ ID NO: 400146 - DNA, 507 bp, Salmonella enterica
atgttttcccggattagaggtttgatttcatgtcaaagtaatactcaaaccatcgcacctacgctcagtccaccttcatcaggccatgtaagttttgctggggttgattatcctctattaccactagatcaccaaacgccgctcgtttttcagtggtttgaacgcaatccagatagatttggtcaaaacgaaattcccattatcaatacgcagaaaaacccttatcttaataatattatcaatgctgctataatagaaaaagaaagaattatcggtattttcgttgatggcgattttagcaagggacaaagaaaagcattggcaaaattggaacaaaattatagaaacataaaggttatttataattctgaccttaattatagcatgtatgataaaaagttaacgacgatttatttagaaaacatcaccaaactggaagctcagtcagcaagtgaacgagatgaggtcttgcttaacggggtaaaaaaagcctggaagatgtcttga

SEQ ID NO: 400147 - DNA, 240 bp, Salmonella enterica
atggaagggttaaaaaagctatgtgtggcggtattctttcgttcagagaaacatagcggaaagaaagaaccggaaatgttggtgagattttatataagttcagcggatttaacagcagaaaaatttgctaatgcgatgagaagtcattgggatgtggaaaataaattgcactggcgtttggatgtggcgatggacagagagtacctcgcgtcagtccttgcggggggcggggtttcgtaa

SEQ ID NO: 400148 - DNA, 129 bp, Salmonella enterica
atgtttttagccggatggtgtcatccggcaaccggcgtgaccgatggctgcttgtgttttagacgtccgtataccagcaacgacgacatggcggaaaacgagagcagggcggcgggaagcgccacgtag

SEQ ID NO: 400149 - DNA, 204 bp, Salmonella enterica
atgacaacgcattcccaccatgacaatgttgaaaagcagtttggttcacaggcgaacgcctatttacatagcgccgttcacgcagcgggtcgtgacttagcgcggctggcgcaaaggttgtctgatttttcccacgcgagcgtactggatatgggatgtggggctggacacgcgagttttgtcgctgcgcaacatgccaactag

SEQ ID NO: 400150 - DNA, 312 bp, Salmonella enterica
gtggtgaaggtcagcgacggcggcgatatcagccagcttactgcggctgttccggcagcctcttccgcaccggttcaggctgccgctcccgcaggcgccggcaccccggtcaccgcgccgctggcgggcaacatctggaaggtgattgccaccgagggccagacggtggccgaaggcgatgtgctgctgattctggaagccatgaagatggaaaccgaaattcgcgccgcgcaggccggcacggtacgcggtatcgcggtgaagtccggggacgcggtctccgtgggcgacaccctgatgacgctggcgtaa

SEQ ID NO: 400151 - DNA, 675 bp, Salmonella enterica
atgtcctggcaaacacataccgtctttaatcaacctgctccgctcaataacagtaacttattcctgtctgatggcgcgctgtgtgaagcggtttcccgggaaggcgcgggatgggatagcgatcttctcgccagcattggccaacaactgggaacggcggaatcactggagctgggtcgtctggcgaacgcgcatcctcctgagttgctgcgttacgatccccagggacagcgtctggatgacgttcgctttcatcccgcctggcacctgttgatgcagggactttgcgctaatcgggtacataacctggcctgggaggaagaggcaagggcgggaagttttgtcgtccgggcggcgcgttttgtattacatgctcaggtagaagcgggaacactctgtcctgtcacgatgacctttgccgcgacaccgttgctattgcagatgcttcccaccactttccatgactggctggcgccgctgcgcagcgatcgctacgattcgcatttgctgccgggcgggcaaaaacggggcctgctcatcggcatgggaatgacggaaaagcagggcggatctgacgtactcagtaatacgacccacgcggagcggctggcggctgggagaagagggcgaagggattcggcatatcttaaagatgggcggtatgacgcgtcttga

SEQ ID NO: 400152 - DNA, 1632 bp, Salmonella enterica; identical to SEQ ID NO: 380387

SEQ ID NO: 400153 - DNA, 1851 bp, Salmonella enterica
atgacaggatcaaattcacacataacaatattaaccttaaatgtaaatgggctaaatgccccaattaaaagacacagactggcaaattggataaagagtcaagacccatcagtgtgctgtattcaggaaacccatctcacatgcagagacacacataggctcaaaataaagggatggaggaagatctaccaagcaaatggaaaacaaaaaaaggcaggggttgcaatcctagtctctgataaaacagactttaaaccaacaaagatcaaaagagacaaagaaggccattacataatggtaaagggatcaattcaacaagaagagctaactatcctaaatatatatgtacccaatacaggagcacccagattcataaagcaagtccttagagacctacaaagagacttagactcccacacattaataatgggagactttaacaccccactgtcaacattagacagatcaatgagacagaaagttaacaaggatatccaggaattgaactcagctctgcaccaagcggacctaatagacatctacagaactctccaccccaaatcaacagaatatacatttttttcagcaccacaccacacctattccaaaattgaccacatagttggaagtaaagcactcctcagcaaatgtaaaagaacagaaattataacaaactgtctctcagaccacagtgcaatcaaactagaactcaggattaagaaactcactcaaaaccgctcaactacatggaaactgaacaacctgctcctgaatgactactgggtacataacgaaatgaaggcagaaataaagatgttctttgaaaccaatgagaacaaagacacaacataccagaatctctgggacacattcaaagcagtgtgtagagggaaatttatagcactaaatgcccacaagagaaagcaggaaagatctaaaattgacaccctaacatcacaattaaaagaactagagaagcaagagcaaacacattcaaaagctagcagaaggcaagaaataactaagatcagagcagaactgaaggaaatagagacacaaaaaacccttcaaaaaatcaatgaatccaggagctggttttttgaaaagatcaacaaaattgatagaccgctagcaagactaataaagaagaaaagagagaagaatcaaatagacacaataaaaaatgataaaggggatatcaccactgatcccacagaaatacaaactaccatcagagaatactataaacacctctacgcaaataaactagaaaatctagaagaaatggatacattcctggacacatacaccctcccaagactaaaccaggaagaagttgaatctctgaatagaccaataacaggagctgaaattgaggcaataatcaatagcttaccaaccaaaaagagtccaggaccagatggattcacagccgaattctaccagaggtacaaggaggagctggtaccattccttctgaaactattccaatcaatagaaaaagagggaatcctccctaactcattttatgaggccagcatcatcctgataccaaagcctggcagagacacaacaaaaaaagagaattttagaccaatatccttgatgaacattgatgcaaaaatcctcaataaaatactggcaaaacgaatccagcagcacatcaaaaagcttatccaccatgatcaagtgggcttcatccctgggatgcaaggctggttcaacatacgcaaatcaataaatgtaatccagcatataaacagaaccaacgacaaaaaccacatgattatctcaatagatgcagaaaaggcctttgacaaaattcaacaacgcttcatgctaaaaatctaa

SEQ ID NO: 400154 - DNA, 777 bp, Salmonella enterica
atgtatctcaaaataataagagctatctatgacaaacccacagccaatatcatactgaatgggcaaaaactggaagcattccctttgaaaactggcacaagacagggatgccctctctcaccactcctattcaacatagtgttggaagttctggccagggcaatcaggcaggagaaggaaataaagggtattcaattaggaaaagaggaagtcaaattgtccctgtttgcagatgacatgattgtatatttagaaaaccccatcgtctcagcccaaaatctccttaagctgataagcaacttcagcaaagtctcaggatacaaaatcaatgtgcaaaaatcacaagcattcttatacaccaataacagacaaacagagagccaaatcatgagtgaactcccattcacaattgctacaaagagaataaaatacctaggaatccaacttacaagggatgtgaaggacctcttcaaggagaactacaaaccactgctcaaggaaataaaagaggatacaaacaaatggaagaacattccatgctcatgggtaggaagaatcaatatcgtgaaaatggccatactgcccaaggtaatttatagattcaatgccatccccatcaagctaccaatgactttcttcacagaattggaaaaaactactttaaagttcatatggaaccaaaaaagagcccgcattgccaagtcaatcctaagccaaaagaacaaagctggaggcatcagctacctgacttcaaactatactacaaggctacagtaa

SEQ ID NO: 400155 - DNA, 1107 bp, Salmonella enterica
atgctgcatatctacaaccatctgatctttgacaaacctgacaaaaacaagaaatggggaaaggattccctatttaataaatggtgttgggaaaactggctagccatatgtagaaagctgaaactggatcccttccttacaccttatacaaaaattaattcaagatggattaaagacttaaatgttagacctaaaaccataaaaactctagaagaaaacctaggcaataccattcaggacataggcatgggcaaggacttcatgtctaaaacaccaaaagcaatggcaacaaaagccaaaattgacaaatgggatctaattaaactaaagagcttctgcacagcaaaagaaactaccatcagagtgaacaggcaacctacaaaatgggagaaaattttcgcaacctactcatctgacaaagggctaatatccagaatctacaatgaactcaaacaaatttacaagaaaaaaacaaacaaccccatcaaaaagtgggcgaaggatatgaacagacacttctcaaaagaagacatttatgcagccaaaaaacacatgaaaaaatgctcatcatcactggtcatcagagaaatgcaaatcaaaaccacaatgagataccatctcacaccagttagaatggcgatcattaaaaagtcaggaaacaacaggtgctggagaggatgtggagaaataggaacacttttacactgttggtgggactgtaaactagttcaaccattgtggaagacagtgtggcgattcctcagggatctagaactagaaataccatttgacccagccatcccattactgggtatatacccaaaggattataaatcatgctgctataaagacacatgcacacatatgtttattgtggcactattcacaatagcaaagacttggaaccaacccaaatgtccaacaatgatagactggattaagaaaatgtggcacatatacaccatggaatactatgcagccataaaaaatgatgagttcatgtcctttgtagggacatggatgaagctggaaaccatcattctcagcaaactatcgcaaggacaaaaaaccaaacaccgcatgttctcactcataggtgggaattga

SEQ ID NO: 400156 - DNA, 1767 bp, Salmonella enterica
atgactattgccattaccgatgtcgtcctgcgtgacgcccaccagtctctgttcgccacccgcctgcgccttgacgatatgctgccgattgccgccgcgctcgatgacgtgggctacgggtcgctggagtgctggggcggcgccacctttgacgcctgcatccgtttcctcggcgaagacccgtgggtccgcctgcgcgagctcaaaaaggccatgccgaagacccccctgcagatgctgctgcgcggccagaacctgctcggctaccgccactatgccgatgacgtggtggagcgcttcgttgagcgcgcggtgaaaaacggcatggacgtgttccgcgtcttcgacgccatgaacgacccgcgcaatatgaaagccgccctgcaggcggtgcgcagccacggcgcgcacgcccagggcacgctctcgtacaccaccagcccggcgcacaccctgcagacctggctggacctgaccgaacagttgttagagaccggcgttgactcgattgccatcaaggatatgtccggcatcctcacgccgatggccgcctttgagctggtcagcgaaatcaaaaaacgttttgaggtgcgcctgcacctgcactgtcatgccaccaccggcatggcggagatggcgctgctgaaagccatcgaggcgggcgttgacggcgtcgacacggcgatttcctccatgagcgccacctacggccacccggccaccgaagcgctggtggcaacgcttgccggcacggaacacgacaccgggctggatatcctgaagctggagagcatcgcagcgtacttccgcgaggtgcgcaagaaatatcacgcctttgaaggccagctgaagggctacgacagccgtatcctggtggcccaggtgccgggcggaatgctgaccaacctcgaaagccagctgaagcagcagaacgcggcggacaaactcgaccaggtgctggcggaaatcccccgcgtgcgcgaggacctcggctttatcccgctggtcaccccgacctcgcagattgtcggcacccaggcggtgctcaacgtgctgaccggcgaacgctacaaaaccattgccaaagaaacggcgggcattctgaaaggcgaatacggccacaccccggtgccggtgaacgccgcgttacaggcccgcgtgctggaagggggcgctccggtgacctgccgtccggcggatttactcaaaccggaactggctgaactggaagcggacgtcaggcgccaggcgcaggagaagggcatcactctggcgggaaacgccatcgacgacgtgctcaccgtggcgctgttcccgcagattgggctgaaattcctcgaaaaccgccataacccggcggcgtttgagccactgccgcaggcggaagccgcgcagccggtggcaaaagcagagaagcctgccgcttccggtatctacaccgtggaagtggaaggcaaagcctttgtggtgaaggtcagcgacggtggcgatatcagccagctgaccgcagccgttcctgcctccgcgccagccgctgccgctccggcaggcgccggcaccccggtcaccgcgccgctggcgggcaacatctggaaggtgattgccaccgagggccagacggtggcggaaggcgacgtgctgctgattctggaagccatgaagatggaaaccgaaatccgcgccgcgcaggccgggacggtacgcggtatcgcggtgaagtccggcgacgccgtctccgtcggcgaccccctgatgacgctggcgtaa

SEQ ID NO: 400157 - DNA, 204 bp, Salmonella enterica
atggagtgttatggaacggactcaaaaggaattgaatgtaatagaatggagtggagtggactcgaatataatggactggaatggaatgaaatcacatggaatgggaacgaatggaatggaatggaaaggaatggaatcgaatggaaaggaatcgaatggaagggaatgaaattgaatcaacaggaatggaagggaatagaatag

SEQ ID NO: 400158 - DNA, 189 bp, Salmonella enterica
atggattggaaaggaatagaatggaatggaatggaattgactcaaatggaatggactagaatggaatggattcgaatggaaggcaaaggaatggaatctattggaatggactgtaatggaatggaatggaagggattggaatggactcgaatggaatggactgcaatagaaaggattcgaatggaatga

SEQ ID NO: 400159 - DNA, 144 bp, Salmonella enterica
atggaatggaaaggaatggagtggaatagactagagtggaatggaatggactggaaagcaatggactggaatggaactttcttgaatggactggaatcaaacggaatggaatgcaatgcaatcaaatggcatggaataaaatag

SEQ ID NO: 400160 - DNA, 204 bp, Salmonella enterica
atggaatggaatggaatggaatggaatgcccttgaattaaatggactggaatggaatggactcgaacagagtggaatggaaagtgttgagatagaatggaatggactcctttggaatggtgtagtatgcaatgcaatcgactggcagggaatcaaaaggaatgtaatcgaatggattggactggaatgcaatggactcgaatag

SEQ ID NO: 400161 - DNA, 555 bp, Salmonella enterica
atggaatcaacatcgaatggaatcgaatggaaacaccatcgaattgaaacgaatggaattatcatgaaattgaaatggatggactcatcatcgaatggattcgaatggaatcatcgaataaaattgattgaaatcatcatcaaatggaatcgaatggtatcattgaatggaatcgaatggaatcatcatcagatggaaatgaatggaatcgtcatagaatggaatcgaatggattcattgaatggaatcagatggaatcatcgaatggactggaatggaatcattgaatggactcgaaagggatcattattgaatggaattgaatggaatcatcgaatggtctcgattggaatcattatcaaatggaatcgaatggaatcaccgaatagaatcgaatggaacaatcatcgaatggactcaaatggaattatcctcaaatggaatcgaatggaattatcgaatgcaatcgaatggaattatcgaatgcaatcgaatagaatcatcgaatggactcgaatggaatcatcgaatggaatggaatggaacagtcaatga

SEQ ID NO: 400162 - DNA, 129 bp, Salmonella enterica
gtgcagtgcaatggaatggaatggaatggaatggaatggaatggaatggaatggaatggaatggaatggaatggaatggaatggaatggaatggaatggtatggaatggaatggaatggtacggaatag

SEQ ID NO: 400163 - DNA, 273 bp, Salmonella enterica
atggaatggactggaatggaatggattgaatggaatggactggagtggaatggactcgaatggaaaggaaacgagtggaatggaatggagtggaatggcttgaaatggataagaaatgaaaagaatgtaatggaatcggatggaatggaattgaatgtattggagtcgagtagaacagaattgaatggaatggcatcaaatggaatggaaacgaaaggaatggaattgaatggactcaaatgttatggaatcaaagggaatggactcaaatag

SEQ ID NO: 400164 - DNA, 246 bp, Salmonella enterica
atggaacggaatggaatggaatggaatggaatggaatggaatggaatggaatcaacccgagtacaatggaatggaatggaatggaatgtaatggaatggaatcacggaatggaatggaatggaatggaatggaatggaatggaatggaatcaactcgattggaatggaatggaaaggaatggaatggaatggaatggaactacccgaatggaatggaatgtaatggagtgtaagggaattgaatag

SEQ ID NO: 400165 - DNA, 144 bp, Salmonella enterica
atggaatggaacggaatggaatggaatggaatggaatggaatggaatggaatcaacccgagtgcaggggaatgtaatggaacggaatgcaatggaatggaatcttccggaatggaatggaatggaatggaatggaatggaatga

SEQ ID NO: 400166 - DNA, 807 bp, Salmonella enterica
atgactttttcacttgcacagggtgccaacagtcttttgttcaatctggttatggaactgagaggtggaaatattcggcgatgtgaggcgctggggttgaaacctgaagaaatgcgtctcctcagaagtctgacgatggaagaactgcattatctgtcaggcagccctgtttctgttttaaatgtagcaatacatcatgaaaatctaaaacgaatgctggaccaggccaatcgtgagcaaaagcgtagcgaacgaattgatcgtgctattgctcttggtgcatcaatagagatgatggggatcttctttggtctgaatgcttcagatgtcagttctaaacggcggctcgaggggatccagacacgtcagggacgttgccagtcacctgatgaggagtgtgaagcgaagatatggcgtctctggcatgaggccaatatcagcgatatagaaagtcttaactctcttgaaactatgatgcttattgcggaagaggctgatgtcagtctcacggtgatctggggattaatcaaaaactggtgtacggggggaggtagcctgatggattcactggcaccctcctttcagttttaccgtactgacccgagaaatgtgagtaaagctgtcacgtcaaaggcgcgtacactgctttccctgtaccagcagggaaagcgagtctacagccagataggacagacaggttatctcaagattgatctgggattacgctggcgtctgctgagtaaggatgcaggtaaaagctggttatttatgtctcaccagacctataaccgggaactgaaacgatga

SEQ ID NO: 400167 - DNA, 429 bp, Salmonella enterica
atggaacatcaaagagagctatatcagcaacgcggttatagcgaagacttattacctaaaacagaaacccaacgaaactggaaagcatttaactatttcaccttatggatgggatctgtacataacgtgccaaattacgttatggtcggcggtttttttatactggggctatcaacatttaatatcatgttggccattattatcagcgcattatttattgcggcggcgatggtaatgaatggcgcggcaggcagcaaatatggcgttccttttgctatgatattgcgaggttcttacggcgtccgcggcgcgctattccctggattattacgagggggaatcgcggcaattatgtggttcggcttacagtgttacgcgggatcgctggcatttcttattttaattgggaagatctggccaggattttag

SEQ ID NO: 400168 - DNA, 366 bp, Salmonella enterica
atgcgcactgacggcacggtgacgcagccgcgtttaaagcaggtcgtgctgacggcgatctctgaggttaacgctgagctgtacgacttccgcaaccgtcagcagatgctgggctggcggacacttgctgaggttcccgcagaaatgctggacggtaaaagcgagcgtatccggcactaccacaacgctgtttactgctgggcgcgcgctgtgcttaatgagcgttatcaggactatgacgccacggcgtcaggcgtgaagcgaggggaggagctggcggaggccagcggcgatctgtggcgtgatgcccgctgggccatcagccgggtgcaggatgcaccgcactgtacggtggagcttatctga

SEQ ID NO: 400169 - DNA, 588 bp, Salmonella enterica
ttggcgttacgccaaaactgcaaaaaaacctggctctataactacaccacctcaatttataactacgacagtagcgactggaatagcagccgttatcgcaatgacgatacgggttttaacattgatgcggggcttgctgccgatatcggtgaaaactggacgttggggctgagcgggcaaaatctggtatctcgcgatatcgatacgaaagatatttacatcactaatggtatgacgggagaaaccaccaactacaaagagacataccaaatccgccccctggttaccgcgggcatcgcatggcataacgatttgctgaccgtaagcgccgatggcgatctgacggaaacgaaaggctttaagagcgaagacaattcacagtacgttggcgtcggcgctgaagttcgaccgttgtcatggctggcggtgcgcgcagggtatcgtgcggatgtgaaaaataacgatagcaatgtggttaccggcggtcttggctttgcgccctttaaccgtgcgcatctcgatttaatgggactgtacggcgaagatgaaacctggggggcaggcgcgcagcttacaatgacattctga

SEQ ID NO: 400170 - DNA, 984 bp, Salmonella enterica
atgtcccgtaaagaccttgccaatgcgattcgtgcgctgagcatggatgccgttcaaaaagccaattccgggcaccccggcgcgccgatggggatggcggatatcgctgaagtgctatggaacgattttcttaaacataaccccaccgatccgacctggtatgaccgtgatcgttttatcctttccaacagtcacgcctccatgctgctctatagtctgctgcatttaaccgggtatgacctgccgctggaggagctaaaaaacttccgtcaactgcactctaaaacgcctggtcacccggagattggctatacgcctggcgttgaaaccaccaccgggccgctgggccaggggctggcgaatgccgtcgggctggcgattgccgagcgtacgttaggcgcacagttcaaccggccggaccatgagattgtcgaccactacacctatgtctttatgggcgacggctgtctgatggaggggatctcgcatgaggtgtgttcgctggctggtacgctgggactgggcaaactgatcggcttttacgatcacaacggcatctccattgatggcgaaaccgaaggctggtttaccgacgatacagccaaacgttttgaagcctaccactggcatgtcgtgcatgacattgacgggcacgctccggaggcggtgaaaaaagccattctggaagcccagagcgtaaaagataaaccttcgctaattatctgtcggacggtgataggttttggctcgccgaataaagccgggaaggaggagtcgcacggcgcggcgctgggcgaagaagaggtggcgctgacccgccagaagctgggatggcatcatccggcgttgagatcccaaaagagatttaccgcgcgtgggatggccgtgaaaaaggcgagaaagcgcagcagcagtggcaggaaaagtttgctgcttatgagaaggcttatcctgagctggccgcggagtttacccgccggatga

SEQ ID NO: 400171 - DNA, 534 bp, Salmonella enterica
atggcatatccttatcagactcagggttttacgctggacaatagcggacggcgaattgtggtcgatccggttactcgcatcgaagagcatatgcgctgcgaagtgaatattgacagtaataatgtcattactaacgccgtgtcgaccggcaccatgtggcgcggcctggaggttatcctgaaaggtcgcgatccgcgagacgcctgggcatttgttgagcgcatttgcggcgtctgcaccggtacacacgcgctgacctcaatccgtgccgtagaaaatgcgctgggaatcgcgattccggacaacgcaaactgtatccgtaatatgatgcaggctacgctacacgttcacgatcacctggtgcatttttatcatctgcatgcgctggactgggtcgatgtagttgccgccctgaaagccgacccgcatcagacctccgccatcgcgcaaagcctttccgcatggccgctatcctcgccgggatatttccgcgatttgcaaaatcgactgaagcggtttatcgagtccggttaa

SEQ ID NO: 400172 - DNA, 327 bp, Salmonella enterica
atgctttctgtaatttcttgtttaacggtcgacgtagcttcattttgtgcggcggttggcgttgccgctgatgccgatgacgccatcagagttaacgttatcgcggcggctgaaaaaaatagtgacgttttttgcataatagttatacccatatggtctgtttttgagacgctttatctttcctgttacgttcacctttatactaaaggagcatggctctcgaacaataaaaaacatccttctataaaactaccccgaaaagggagtagtgcaattaagaatatcgtatttgtttgtaacggcatgactcaaaatatcaacatttag

SEQ ID NO: 400173 - DNA, 834 bp, Salmonella enterica; identical to SEQ ID NO: 377159

SEQ ID NO: 400174 - DNA, 159 bp, Salmonella enterica
atgagtgaacacgacgccctgaccagcaccgcgccagtgcaggaggccgaacagcagaagaatacaactcacgccgaagcgttcagctttggcgatccgatcccggtactggaccgccgcgaactgctggactatgtggaatgcgtacagatggtatga

SEQ ID NO: 400175 - DNA, 189 bp, Salmonella enterica
atgatggtcatggtcatggtcatggtcatggtcatggtcatggtcatggtcatggtcgtaatggtggtcgtgatggtggtcgtgatggtggtcgtgatggtggtttcccgccagccactgctgctcgcctcgtcatgtccgccagaacatccagcacgcggtgctcagaataatgatcgcagaaattaa

SEQ ID NO: 400176 - DNA, 1926 bp, Salmonella enterica
atgagcggttattcggtaacttatgaagagagatttctttttaaagaaatcggttcaatagctacaaaacctgacattgctattactgaacttgtagctaactcacatgatgctggcgcaacggtagtaaaaattaatatatctgaaaccaatccgcaggtcctcactattgaagataatggagtagggctaacgaaagaacaattcgaaagcaggtggcttagattacgatatgataggcacaagcatcagggagcttatgtcgaatttcctagcgatgctgatgtccaaactaaacgtcttgcgtttggatgcaatggtgttgggagacatgcaggattatgtttcgatgatcattatatagttgaaacatggaaggactccattcgcaattattatcatttagctgtatcctccggtcaaagtccaattaaagttttagaacaccgtagcgagaaatcaacaggtcatggttctaagattacagtaaatattactcggaattatgtcgattccgaacagatatcagatattatatctgcaaggtttctttttaatccggagtttcatgtttatgttaacggccgaaaaatcaccttgttagaacatcctggggtggtaaaaacggaagaaataaacccaatcggaaacataaaaataaaactgactttagtagattcttctgctgcggctagaacttcaaatcagcatggtgtcgctttttggctgggcggtagattattaggtaaaccttcttggtatattgctaaaaatcaaattatagatgggcgaaagtcatttgccaaaagatatactttaattgctgagtcgaatgacctattcagctatgttgaacctgattggtccggcttcaagtcagattttactactatagaccttatatctaatgagattggtaggattcttcgcgcctggtatgttgagttgtctcaaatagatatgcaacaagcaaaatctacggtaattcaaaaccatgttgaggatataaagagtctaaatattcttgctagaaaggaactgaatgattttcttgacaatattttggaggaaaatccggatgttaaattggaatatttggagttggcatttaaagcagctataaatttagagaaatctagatctgggatttcacttttgagaaagttaattagcatttcacctgatgatgccgaagcgttgaatggttttctggatgagtggaatgtaacagatgcaatgacaattcttgctgaaattgactctcgcattaagttaattgagatgatttccaagattagtggtgaccatagtgtagatgaattacatactttacatccgttaatcgagaaggctcgttgggttttcggtccagaattcgatagtgccgaatattcaagtaacagagggcttatcaaaacaatggaaacaatatttaaaaaaagttataggaaagaatgttttttaaattcatcaaaacgtcctgacattgtcgtaggtagtaattcatctttaagcatgcttgggctcgaagagtttgatggtgaaataaagaagactaagactgtacttttaattgagcttaagaaaggtggtttcactattggtcgtgatgagatgaatcaggcaagatcttatgtggaagatatttggcatactggcgtagggtcttcacgtccttttattaaagcatttgttgttggtgatacgatagatagatttgccagcaagtatcaagccgttggtaataatgaaaatgataagtttggcgaagttaaagctattacttttgatgaaatggttaggactgcgcaggctaggctttttaatttgcgggataaagtattccttagatacgacagcttagataatgaaactacgatgagtaacgtcatcaatacccctacacaagataaatttagcatttaa

SEQ ID NO: 400177 - DNA, 633 bp, Salmonella enterica
atgacaactaacaatgataaaatcgatcactcagaactacttaaaattaaagttgacatatggaagcacgtaatttcaacgcaacagcattttaatgatctcgcaatgaaaatacgaaatttcgctattttaattttatctgcatttatcggagccataggtgttagtttcaaatccgggtttgcaatcccgttgtttggtcattacctctcggcttcattttttctgtctctcggtgctgcatgcatatggatgctattctttttcgttgatgtttattggtaccacccattattagttggttctgttaataaaggtgctgaaattgaaaaaaatattggtagtgaacttaaagattttataaacttaactcaggtggtgggaaaggaaagtcctaaagaaattaaattaagctttcgcaagaaagtttactggaaaaaagaataccatagtaaagataaagcaaaattattttatatgggtgtcttttgggtgctaataatattcagcattgctatttttttcatggacggacctgttactagcaaagaaagtaacaagaacctactcccaacgaaattagaatgccaaaagacaattagccttaataaaataaattgtaccattacgtaa

SEQ ID NO: 400178 - DNA, 873 bp, Salmonella enterica
atgaaaaacgttttaatcactgatgtcgacaatactctctttgattggttcaatgtatggtataacagttttaacgcaatgataaaaacagcttccaagataagcgggattccattatccgtgttaaagccagaaatcaaagaaatccatcaaaaatatgggacagcggagtactccttcgttttgcaagagttaccttctttgctcaaaaaatatggcaataaagagtcgatactaagagagttagatgaagccatacatgcttaccgctctgaaagaaaaagatgcctacaattgtacccaacagttatggatacgttatccattttaaaaaatataggggtgaaaattattgcctataccgaatccaaggaatattacacaaactatagactttcaaagctcgatttagatggagttatagatgttgttttctctccggaggatcattcacttcctgaaggaatcatgaagcaagaaagctatcaactcaagaaaacattaaactgccacactcccaaaggagaaattaagccaaaccctaagatcttgttagatattataaaatttgctaaggctaatccagaacaatgtgtatatataggggatagcgaaatgaaagatatagcaatggctcaatcagcacatgtttcctcagtatttgcaaaatacggaacaactcatttctcgaataatttagaaggatatgatctacttcgtgatgttactcattggactgatgcagatgtagaatacgaaagaaagattaaagaagagaataaagaaattcacagccaaaatatagctctccatttttctgatattttgaatatgttcacgttctgcgcctttgaggaaaaacatgacaactaa

SEQ ID NO: 400179 - DNA, 639 bp, Salmonella enterica
atgatcggctttaacggcgtgaagcgcgccaaaacctccaaccgtgctgaaaacccgctgctgcaggacgtcaataaaggctggctgcagaaaatccgcgaagacgcgccggatcacgtcatgggcagcaaaaccgcagaagacggcaccactactgcagaaccagtaaaagtaggtccgggtggtaagtatgtaaatcttgacgcggtggtgatggataccgtcaacgagctgatcgatgtggagtatcaggatgatgacgagctggttgttgtctgcggacgtgaactgctgtctgacaagtatttcccgctggtcaacaaagagcaggacaacagcgagaaaatcgccgccgatctgatcatcagccagaaacgcatgggcggcctgcaggctgtgcgcgcgcctttcttcccggcaaatgccctgctgatcacccgtctggataacctgtccatctactggcaggaagacacccgccgccgttcagttatcgacaacccgaaacgcgaccggattgaaaactttgaatccgtcaacgaggcgtatgtggtcgaggactaccgctgcgcggcgctggtagaaaacatcgaaatcggtgatttcagcgcgcctgccgcaccggaaagtggggaataa

SEQ ID NO: 400180 - DNA, 465 bp, Salmonella enterica; identical to SEQ ID NO: 377162

SEQ ID NO: 400181 - DNA, 651 bp, Salmonella enterica
atgagcctgagtcccgcacggcagcatcgcctgcgcgttcaggctgaacaggccgcccgcgagggcggcagcgttcgccacgcatctggctatgacctgatgctgctgcaactggcggaagaccgccgccgtctcaagggcgttcagtccacggtcaaaaaagcggaaatcaaggtggagctgctgccgaaatatgccgcctgggcggagggcgtcctggctgccggaggcgctcaacaggatgacgtgctgatgtacgtgatgctgtggcgcattgatgccggagattatgccggggcgctggagatcgggcgtcatgccctgcgtcatggctgggtgatgccgctgggtaaccgcaatgtgcagaccgtgctggcagaggaaatggcagatgcagcgcagagcgcaatgcttgccgccaccggctttgatgccgatctgttgctgcagacgctggagctgacagacggtctggatatgccggaccagtcacgggcgcgtctgcataaagcgattggcgctgttctgagtgaaagcaatccggcttccgcccttaatcatctcaaccatgcgttacagctcgatccccgctgtggcgtgaaaaaagacaaacagcagctggagcgcagactgcgcaatgacagccgctga

SEQ ID NO: 400182 - DNA, 633 bp, Salmonella enterica
atgatcggctttaacggcgtgaagcgtgcgaaaacctccaaccgtagcgaaaacccgctgctgcaggatgtgaataaaggctggctgcagaaaatccgtgaggatgcaccggatcacgtcatgggcagcaccaccacgggcggtgaaactacaccgggtgcggtgaaagtcgggaaaggtggcgaatatgccaacctagacgccgtagtgatggatgccgtcaatgagcttatcgacgtggtttaccaggacgatgacgatctggtggttatttgcgggcgtgaactgctgtctgacaagtatttcccgctggtcaacaaagagcaggaaaacagtgaaaaactggctgccgatatgatcatcagtcagaaacgcatgggtggcctgcaggccgtgcgtgcgccgttcttcccgccgaatgcgctgctaatcacccgtctggataacctgtccatctactggcaggaaggcacccgccgccgttcagttatcgacaacccgaaacgtgaccggattgaaaactttgaatccgttaacgaagcctatgtggttgaggactaccgctgcgccgcactggtggaaaacatccagattggcgatttcagcgccgctgcagcagaagccggagcgtaa

SEQ ID NO: 400183 - DNA, 159 bp, Salmonella enterica; identical to SEQ ID NO: 400174

SEQ ID NO: 400184 - DNA, 723 bp, Salmonella enterica
gtgtataccgcgctgattaaccttgagcacatcaagtcttatctgccggacagcacctttaaccgctacggcaaggtgacggcgctgtttgctgaagaaatcacggaaggtccgctggcgggcaagatggcactgtatgccgacgttgagccaacggagtccctggtggagctggtgaaaaaaggccagaaattattcacctctatggaagtcagcccgaagttcgctgatacgggcaaagcctacctggtcggcctggctgccactgatgaccctgccagtctgggcactgaaatgctgacattcagcgccagtgcagcccataacccgctggcaaaccgcaagcagaatcccgccaatctctttaccgccgcagaggaaacggtgatcgaactggaagaaatccaggaggacaagctgtccctgtttgcccgcgtcacggcactgttcaccaaaaaagagcagtccgacgatgcccggttctctgatgtgcataaggccgtggagttggtcgccactgagcagcaaaacctgagcgcacgcaccgaaaaatccctgtctgagcaggaagaacgtctgtctgagctggagactgccctgcaggcacagcagacagcctttaacgaactggtgaataagctgagtcatgaagacagccgccaggactaccgccagcgtgcaacaggcggtaacgcccccgctgacactctgaccaattgctga

SEQ ID NO: 400185 - DNA, 465 bp, Salmonella enterica
atgaagtttgttgcgccagaacaggcaccggaacaggcggaaatcatcagaaatacgccgttctggcctgatgtggacctgtcggagtttcgcagcatgatgcgcactgatggcacggtgacgcagccgcgtttaaagcaggttgcgctgtcggcaatttcggaggtcaacgcagagctgtatgagtttcgcagacgccagcagatgctggggtatgcctcgctggcagaagtcccggcggaacaactggacggcaaaagcgagcgcattcagcactatttcaacgcggttttttgctgggcacgcgccatgctcaacgaacgttaccaggactatgacgccacggcatccggtgtgaagcggggcgaagaactggcagaagccagcggtgatttgtggcgtgacgcccgctgggccatcagccgggtgcaggatgcgccgcactgcacagtggagcttatctga

SEQ ID NO: 400186 - DNA, 537 bp, Salmonella enterica
atgtccacctatacccgtcccgtcatgcttttgctgtgcgggctacttttgttgactctggccattgcggtactgaatacgcttgtgccgctgtggcttgctcaggcaaaccttccgacctggcaggtggggatggtcagctcgtcttattttaccggcaatctggtcgggacgttatttaccgggtatttaattaaacgcattgggtttaaccgtagctattatcttgcctcgctgatcttcgccgcgggttgtgtcggattgggggtgatggtggggttctggagctggatgagctggcgttttattgccggtatcggctgcgccatgatttgggtggttgtcgagagcgcgttgatgtgcagcggaacctcgcataatcgcgggcgcctgctggctgcctatatgatggtctattatatggggaccttccttggacaattattggtcagtaaagtatctggtgaattgctgcacgttcttccctgggtgaccggaatgattctggcgggaattctgccgctactctttacctga

SEQ ID NO: 400187 - DNA, 483 bp, Salmonella enterica; identical to SEQ ID NO: 379699

SEQ ID NO: 400188 - DNA, 195 bp, Salmonella enterica
atgtattttttacttcaaaaagtaattttaccaaacattgatctatgcacggaagagcagctttatttcagaactcagggcgggaagtataactatacctcacgtaacttacttgttccgcgtcataaggttgcatattttgatacttttttaatgcattctcaattaagaaatggaaaaaatatacaaccttaa

SEQ ID NO: 400189 - DNA, 516 bp, Salmonella enterica
atgaaattttacacaatatcaagcagttacataaaatacctgaaggactttgatgacaaagttcccaatagcgaagatcctacatacaacaatcctaaggctttcattggcatagtactagagattgaaggacataaatatttagcacctttaacatcgccaaaagcatggcatgctaatgtaaaagagtcatcacccgccttcttcaaacttcatgaaaacggtgtccctgataatcagcttggattgattaatctgaaatttatgattccaataatcgaagctgaagtgtctttacttgatctggatagcatgcctgatacgccttacaaaagaatgctatataaacagttacaatttattcgtgtaaatgaagataaaatatctgaaaaatcaaaactattaagaaaccttgccttgcaaggcagaatgcaaggaacatgcgactttgccgtgttagaagaaaaatatcaacatttcggtaaaaaacctgaagacatggaaatagacgattaa

SEQ ID NO: 400190 - DNA, 711 bp, Salmonella enterica
atgctgtactggaaaagaatgccttcactatggataggtatcaaaatatctgaattcaacgatcttgatacagcaaaagccatcgccgcgttaaagatttatttaacattttgccttttctgcaaagagtcagattcaggacagagaactgttgagctaacttttagtaacctatgtgagatagcatcattaagccgatcgttagttaacgaagggcttaaaattctttatgcaaaagagttgataaaaaatttatcaacgacagtacgtaaaaaaatttataccatagatgtattagagaagcatgatgatggttggtgtaagcttccctttaaaggaattgtaggtgaagatggaaaaataagtgcatttcaatccatgcacaacagatatccatttgagttgctagctttacaaacctacatgtaccttctttatgctcgagataatagaaatgagtatactcttgccaggaaaaaaacaatatgtaaaaaactgaaatgcaaactacctgaactaaataaagctattacctatcttattcatatcggtttacttgataggattgttaaaaaatcaatagaaaacaagccgttggaaatgtttcatgattcatgttacttctactttagagcgggaagtaacagcgctctcacttacaaaaggaaatcagaggtgcttaatctttcagaggaggacttgcctttttga

SEQ ID NO: 400191 - DNA, 129 bp, Salmonella enterica
atgtttgagaaaggtgtgtttttggctgaaaggcttgcgaaggtcgcagtggtgctaactaatctggtgctatctatgtctgtattggggttggtctatttcatttttcaaattctgggaatgaggtga

SEQ ID NO: 400192 - DNA, 258 bp, Salmonella enterica
atgcctaaaaaaacatcaaaaccaaacgatttaagcaacactatcaacaacataaagaaagaaattaactcaggttttactgagttacttaatcgcgtagaagccttagaggctagtgacgcacaacacagcatggcgatacgtgatttacaaattcaggctagagccgctcgcggagacaagcgcatggatatagcaagagactttggcctcagcgagggacgaattagccagatcgttaatgcgggtcgtaactaa

SEQ ID NO: 400193 - DNA, 231 bp, Salmonella enterica; identical to SEQ ID NO: 372407

SEQ ID NO: 400194 - DNA, 165 bp, Salmonella enterica
atggattggtatttaaaggttttaaaaaattatctgggatttggcggccgcgcgcgacgcaaagagtactggatgtttattctggtcaatatcatctttacctttgtgttggcctgctggacgccatgcttggctggcaacgcgccgggggtgaaggcgttctga

SEQ ID NO: 400195 - DNA, 546 bp, Salmonella enterica
atgtcggcctatgcgaatccagtttgtggcggtgggtctggatatctgaagaaatgcacaggccccatcgagtgtgaggctgtgttattccatggttactccgataaaagaaatccccgcgagtgcgaggattgttattgctgcggtgatgctggcagttacacagaattactgacaggctcaggtggtgctgtatggtgggattatatagaaggatctgaatacaatctttcagacatacttttacagacagcatcaacacgtgctgatgctgaactcccccttgccaacgcaaaagtttctgctactgtagagcagactatatgtgcatatggtgcatcaattgggattacaaactcaaacgttttagctaagttcagacaaacatcacttttacatccagttgccgttaatggtgcgactggtcctgggacgcatataaacataacccctggatgtcatgtgtccatcgagaatcaaagtgatcaaagtggaagtccttatgttaagtataagactggcatcacttatagtgataaccagtag

SEQ ID NO: 400196 - DNA, 1332 bp, Salmonella enterica
atgaataaagtcataaaaatatcattatatatctcttttgtgttaattatttgcgctctatctaaaaacataatgatgttaaatacatctgattttggaagagccattaagccattaattgaagatatacccgcatttacatatgatttacctttattgtataaattgaaaagtcccattggttcaattaatagctatgactatataagttcatatagttatattctgtatgcgtatgtcttgttgattagcctttttactgaataccttgatgccaagttgttatcattacttttaaaggtaatatatatttattccttgtatgcaatatttgcctcatatataaaaacagaaagatatgtatctttatttgctttctttattttggcttttcttatgtgttcatcatcaacactgtcaatgtttacctcattctatcaagagcaaataattataatttgccttccatttttggtgtattctttaacatgcaaaaataataaatctatactattgctatttgcttcgttgttaataatatccactgcaaaaagccaatttatattaagtccgctcatagtgtattcatattatatattttttgatagacgtaaactaattattaagtctgtaatatgcggggggtgcttgctggcgtcaatatttgcaatatcttattcaaaaggtgctgttgaattaaataagtaccatgcaacatacttcggaacttatctttatatgaaaaacaatgggcataaagtcccctcttatgttgatgataaatgtattggattagatgcctggggtaataaattcgacatatcctttggcgcagtcccaacagaagtcgggacaaaatgtttcgaatctcataataatgaaaaattttcaaatgcactctatttattggttagcaagccaagcaccatcttcaagcttccatttgatgatggtgtgatggctcaatataaagaaaattatttccatgtatataaaaaactacacatcatttatggtgcatcaaatatactaacaatgattaccaacataaaagatcatatatttaaaaacattagatttacggcgttgttattgttttttgtcacttcggtttttattaaaaataataaagtgaaggcatctttatttgtagcatctctttttggaatgtctcaattttatgtatcttttttcggggaagggtatagagatttaagcaaacatttgtttggaatgtatttctctttcgacctttgcttatacataacacttgtttttttgatgtataaaataacgcaaagaaatcaagaaaatagcaatgtgaaacactaa

SEQ ID NO: 400197 - DNA, 210 bp, Salmonella enterica
atggctcaggattaccaccacggggtgcgcgttgttgaaatcaacgagggcacccgacctattaccacggtgagcactgccatcgtgggcatggtctgcaccggcgatgatgctgatgcatccgtgttccccctcaataagccggtcctgctgactgatgtgctcaccgccagcggtaaagcgggggagtccggcacgctggcccgctag

SEQ ID NO: 400198 - DNA, 678 bp, Salmonella enterica
atgaaagccaataagattattttatcgatgtctcttgctggggctttgactggttgcgctccaaatatacctcgtcctgtgggaactcctgtggaggttatcaaaccagctgtagggcagacagctacggcatatatgggaaatccaatcatcaagtcagcaacggggataaaaactgatgttttggagctaggggctgctaatggagctatgtcatctattgctgcgggtacttactgtaatgttggcaatggcgtataccgtaatcatcagaacccacagtctgtggctttaaaaaatatttatggtcaagttgctggctatgttgattacgtaagctataactctgcgaaaaatgaaatctcaccaccaaatggaacatcttacacggctgctgaaatatctatcaaacgagtacctgatggactgtgtcgagtagataattctcttgtaaaaacaattgagtataatggtaatgctggcggggtgatgaagtttacttaccgtgagttcgcaaacgatatggctcgtgcagcatttaccactgatttttctgtagattcaaaaatcagcgatgttattacttacaaaggcgctaagtttaaggtaacgaatgctgataactcgtctatttcgtatacagtgatttcaggttttgatgaagcaactagcttctaa

SEQ ID NO: 400199 - DNA, 810 bp, Salmonella enterica
atgagtactaaaagcgaacgtatgtccaatgcgcccgtttactatgcattggtacaagtaaagtttactccaatagctgcaatgagtaagtatgttccagacatacaagatgcgctaagagttgagggatttcctttatttgaggtttccaatacaactcagttgaaatttgaaataaaaaaccccaatgagccaccggtacattcatttgagcctgtgacaagttggttgatgattgatgcagatagaagatctggttttgttttaggcaacgatttcattacgttccatacaacatattatgataaccatgtatctttcatctcgtcattgatacttggtctgagcaaagttctagaatttgctaagccatcgctgttaagtcggattgggcttcgatatttggatgctgtgtttcctgagaaaagcgaaacaattgagcagtatcttgtaaaggaacttcatggtgttgatttcggatggacgccaatacagtccatacaagagtccgtatatcagacatgtgttgagccattgatccctaatggatttatggtttcacgaatacataagatgaatggtcagctaggttttccgccagatatgattcctaatggtttactgccgttgccgagatttagtaacacagagcatcgtatgcacgcaataattgatacagatcattatgttgaaggcaacatgtcaactgatttgcagttaattgaaaaacagattctttcgttgcatagtaaagttaaagaagcatttgaaggcatggtttcagattttgcccgcactaaatggcactga

SEQ ID NO: 400200 - DNA, 663 bp, Salmonella enterica
atgtatgcaatttctaccggaagcataggctctgtagatcgatatactccaaatttgcagtcaagctcatgtgtatcaggtgttgttgctgtcgccgcatctttactattagttggtacgggggcttcataccctgtaaatgcttataagcaatggcgtcagtatgttcagccaagggttcagtttgcatttgattccatagaatcaacgtacacgcctgcaatttctcctgaggttgatgtcaggaatgttgcccaacatttagctaatattcgagaagtgctgtctccatcaatgtcagaactggcaaaggatttggggataactcggcaggctctctataaatggttgtcaggggagaaccagcctgatgatgcttcaaaagtgcaattcattaccaaccttagtaatgtcgctgactctttttccaaagctggactccatgatgcgaagctattggtgaaaatgaaagcatttaatggtaagtcattgatggacgtagtaaaagaaggtgaggattggaatagggcagttcaggtattgattgatgaagctaaagcgatgaatgctgctgctgaatcggccaattacttagcaagcaaggcgaaaccgacagatgattggaagtcatctatttcaattcctggaacggtagaggaataa

SEQ ID NO: 400201 - DNA, 849 bp, Salmonella enterica
atgttggtacgaggaacatcatggcgtcaggggcatgtacttaaacatgatgatgccgtttcacttggaattctgcagcctgatgaaacgaaccataaagttgtagttataacgcatgattgtgatttacagagtaattcagaaaaaaacgtggaactgatgtttggccccttgaaaaaggggtcaagcaggatgaaaagagctaagcatccgagaatcctcgatctatgttttgaaaatccagaaagtgcgaagaagaatgcagtagagctccggcatgaaaggaaagtcatcattcctaaagaagctttctgttgtgaggaaaacgatccagcattctccattagcacagaagagaaacaagctcttaagcaatggttagctgctaagtatggtcgtccagcgtttcctaactcgtttgaagagcgcttgcgggcttacgacgaggataaaaagtttattttcgaaaaagaagttgcggacattatcgccacaaacgcagagcatttgatcggagtttttttcgatttgggcgaagaaagatttaacgatcttgaggaaggcataccatatgagctttctatcaatgttgtttatgatgcaactgaaggtggccccgatgccagaagagcggctgaacaaacatgttctgatctaaaggctttgttttataagttttatggtgatccaaccttggggcattcagaacttatagaattgaatacgtgcatagctgttgctgatactcatttctccctgtatgcattgaggcggatggatcaatggagggtagaatacatcagccttgaagaagattcatatggcgatttcattggtgccggtgtttaa

SEQ ID NO: 400202 - DNA, 450 bp, Salmonella enterica
gtggctgaattgcagaaggtggacgactggctgagtgccttgctggcgaatctggagcctgccgcaagaagccgcatgatgcgccagctggcgcaggaactgcgccggacacagcagcagaatatcaggatgcagcgcaatccagatggcagcagttatgagccgcgacgggcaacagcacgcagtaaaaaaggccgcatcaaacgccagatgtttgcaaagctgcgcaccacaaaatacctgaaaactgccgccagcgccgattctgccagcgtgcagtttgctggcaaggtgcagcgtattgcccgtgttcatcactacggcctgcgagaacgtattcaacgaattaatatgtctattaagtatccatgtagaaagttgttgggagttaatgaacaattaatcattgacttagaaaaattattagtagagtatttcgctcaaaattag

SEQ ID NO: 400203 - DNA, 384 bp, Salmonella enterica
atgcaacagtttattcagattttacaaactatttccacatggccgtttgctttcatctttggtctatgtattttatatcgtcctataaatatgttgtttagtagatttattgaaagtaatacggcaaaagctaaattaggatttgtggagctagagattggagagctagctaaaaaaggaagagaggctgttgataattttaatgagttaaccattgttatggctaagactcggttgttggagttagaggttactaaagagaacttttctgcagcgttttcatctaatcagcaagttaaattaaatgcattgatgttggagctagaaaaaaagattcattatcttgaggaagtaagagatgaaggtttatccattaaaaaataa

SEQ ID NO: 400204 - DNA, 1215 bp, Salmonella enterica
atgaaggtttatccattaaaaaataaaatggttatatctttttcatcctcagtccatatggctataattgtgtatatccaagatggattggtcttatcagatattatccatgaaaataacgtgcaatcaggtgagattgattttggtataccactttttgatgcaagtgaaacaagtgagaaaattgttgatcatctcctgacgttgataggggatacaaaaaatttacatattgatttattaaggagatactatgatgcgcaattagagctttataactcagttatctctagtaaattcttaaatgaactttttatcgattgtcctaatttagcgtggggaattgttttagataattattacggtgttaattttcatactgttgagtatttggcaagaataaaaagaaaacgattaatttctattttggctggtactgctgctgaggaaaagatagtaaatatacttaagaagacttcattgctgaatggaagaaaggatgagtttctctggctatcacgttgtttaagtagtgatgctattattgaagcgtataagcataaaaagaatatatctatacaggagctttatttagcatatagttatccaattttttgtggtgctaatttattggaaagtttgtgcgaagaaaaaaaagatactcttcaagattataaatacggaatgatatctcttgaaaagttggtacgggatagtatacgaataggcgaaaacataggtataaaatctgccaagacaatggttatgaattgtaatagtagggaagatgtgaaaaaccttcatgataagtggtcattacggttgagaaattcgatgacctatcttgaaaaggatattttcttggatgagccaagcatacaggttattgacggaatagagtatatcaactcaataaacaagttgattaaagagggtaaggaaatgaagcactgcttggcttcatataaagaaaaagttatcaatggtgaaagttatatatacaaggttttaactcggtggggagagcgagtaacagtcgagttggcattgtcaaacggtatctatttgctaaagcaagcaaaaggtatttgtaattctcaacctagtgatctcgctcttaattatattcatacatggttggaaaacgaaaacaaatacctgaaggaggctttagagttgtatgctggcgactttaaaagagctatgagtgcttag

SEQ ID NO: 400205 - DNA, 429 bp, Salmonella enterica
  misc_feature (351)..(360): n is a, c, g, or t
atgtcactcattttaccactggaaaaacaggcgcttaacctacgcccactgctgtggctgctgctcccgttactggtgctggcgacgctgtttttctggcctctgtcgctcatcgttgaacaggcgctacgcggtgccaatggcgagatcgggctcgagaccttccgccaggtggtcgactcgaaacgctttgtcggcgcgttgctgaacacgttgcaaatcgcctttttcgccaccgccggttgcctgctgctgggcagcgtgatgtcgctgattctggtgtttattcctttccccggcagcgagttgattggtcgggtcgtcgatacttttattgcgctgccgaccttnnnnnnnnnnggcgttcacctttatttatgggtcagcgggtctgctcaacggtgcgctgatgagcctgtttgcctttga

SEQ ID NO: 400206 - DNA, 633 bp, Salmonella enterica
atgagtgaacagcgatccccgccttcacgttcggctcaggggccggtcggctggctgctgtcgctggccggaaggtttatcgggctggttatcagcgcactgttgttgcgggtggtgctggaactggcggggctctatttctggtggccgcaggaaggcagcaggcatgtttttcaggtgatgaagcgggaacagtcggaactagttattgcgttacaaccacatccgcagggggaaaaaatagtgatgctgctggagaacggggtatctcacatgcttataaccaacagactcattcaaaaaccactcacagttctggcttatacattggtcagttttatgctacgcctgacgtggctggtcgccacgttccccctgctctgtctgtgcgtgttaatcgggctgacagaaggcctagtacggcgggatttaaggcggtttggctccgggctggaatccgtttttctccaccgttatgtcatcaggtcaggcagtttagtcgccacaacgatttgggtgtgttatctggcgcagccgctgtttctacctgcgaggttagttttattaccagccaccatatggtttgggataacggtatggatggtggctggtagctttaagcgctggttataa

SEQ ID NO: 400207 - DNA, 4956 bp, Salmonella enterica
atgaaaatacatatcgcggcaacgcaagggttacaccaaaacgagcacaatgccattcttgccattgagaaagcccttcctgcacactgggttgggtatgcgggtatcttgttgctcgacaaaaatcgtaaaagtctagaatttgatgtattgatcttcgccgaggatcgcatcttgatgatagaacttaagaacttccacggccaaattcatatggaagacgaccagtggatccagaccacgcctagtgggcgtaaaatcaagcatggctctcccatcgaccgcaagcgtgagcacgcccaacgaatcaagtccatgttcgatgaagagctgcgcgcgctgtgggggaatactttctacgaaatccaagcgttggtagttctctctggcgatgcaaagattacacagctatcgccaaaggataaaggctttgtgctaacgcttgatgagttcttgaccatcgcgaatctagatacctattttgacaaaatgccctacaccaaggctgaagggtattttcgccgctatcctgaaaagcgcccatgtgcccccgggcaaattgccatttttgagaagtggaaacgtggagggagttatgtccagatccgccagaagctcgaagcaggctatgtaatcacggagaagaccccacatctagagggcccccacgattactacaatgagtttgacggcgaacatgagcgtgattcggacgacaaaagccagatacgaatatgggacttcactaagatggcccatgtcggcacagatatgtctgtgcgcgttttttttggcttacgtgaggaccgaacgcagcggcatatacgtcgaaccgatagtcaactaggcaaagactatttattggaacccaagcacaaccttcaagaagacacacttaccgtcgacatggccgaagtctaccaacttcctaggctagccgagcgtttggacgaatacctagtatctacaccgttgtcgattgaaaaacgtacattattattaagagctctgctaactcccttggccggtatgcatgccatgggagtatatcaccgcgatttgagtgctaaacgcttgtggtgggaccgggaacgcaatgccatcatcgtcagtggcctgacaagtgccaaatttccggatttggggcataaaagcatcagtgatatgcgtcaggagttggatacaacgggtatcgtgctgccagaagatgcctttggtgagaccgaggtattgggtcaagcggtggatgtgttccaactgggagtactgtgttaccaaattgcctatggagagcatctaaccttatcccaagatgagcccccccaatggaagcagcctctaaatgaccccttcgaaggtaaactagacagatttatccagcgtagcctagagcacgatgcatcagagcgccacacagatgcgggtgcaatgctggaggcgcttacgcgaaccctgaattttcaaaacctcgatactaacgaagataaggttagggtgctcaatgcgttagctgcattcaatactgatgctatgccgataacgcaatatcctcaggtagaagcaccgagtactgatcctctgcgccaacgtatgactttccgctccacaactgttgatgggcagccctgtactgtgcgtatatatttgaatgcacgccccaacaaggataaccatggtcagtcccagcggcttctgcactttcttgaacgctgtgccgtcgcctccaataatgttttgccgattccgccattaattgaattcggctgcggcatgatgggaacacatgtcgttcagtcttatgccctaggggagagcttggaacaatggatggtgctgtccaaccatagttatgaggagcgcttccaattagctgatgcactgattcgtgcagtgcataacctacacgatctggatctaagtcatggtgatctgaaacccgaaaatttattggtccaggcggaaggaggcaagctgggcattctgctgcttgatatgtttgacttagatctggatggccttgctccggcaaattctgaatactccccaaccaccgacgtcagcgccacggcgcgtgaccgctatgccgtatacatgattgtagatgagatatttgctgcctgcattcatcctggcgccaataaaatacgtagggagatccgtaatgcgttgggagataataacgctgtacctcgtaacctagacatgttacggcgcacaatgatacatgcaaatgaacccgagttggttgaggctacgcccttggtgatcgagagtttgtatttccccaacgagcagggcgaactgttcgagatggactcaggcatctaccacctgacggtcaattatactaagggtaatattctaaaattattcttcttgggtgtgtcccataaattgacactgaatctcaaagtagatgggccgagtctcaccgtgcatcgtatgttctatgaccggttaggtacgggggagatggtgtatgacacccgtaataaccgcaagaatgataatcgtgccatgtcggtcaagcagccctttttacttaaaaaaggttcttatggtgcgacaaatactgaactactaaactttgtcagaacattacatgtagtgcaacatgtcctggacatcaagcccgcagaagaaccaccgacggcagttgccgatgctccaggggaaagtcttaagcgcctctggctgcgcctagtagaagtagagcgcgaagcactgcccaccgtcaaagtgattgcaagccctaaggagcgagatggcatcgttcatgtacaggttaatgagaatatcgacgctttagagtttgctgatgatgacgtgatcaacgtgacagcagatgatcatgaaactcacttcggccaactggatgttactaagtccggcaatggtgtgctggtgctctcggatgacaaccgcgggaataacttccgcctgcaaaacattcgagaagatacaatcctgactctgtctaattcgggtagtgatgttagctgggagcgacgagaccgggcactatcacgcattattgctggtgatgcagtgatgggggatctaatcgaccgcttcgtaattggccctcgaggttgccagcctccagcattacctatgccgaccgacgaacaaatcagccgctatggactggatgagtctaaacgcgccgcattcctgtatttgctacaaaatccactcagtgtgttgatgggcccgccgggtacgggaaaaacaacactacttagcgcaacactagattatctgctgaatgatgctgacgtacgccgcgtactggtggtgagtcaatcgcatactgcggtcgacgaagtggctaaccgtgtgcgtgagttgagctttaagcgccaggaacaatccccggatttcaaactgccaagcattgtacgcttaggtgagcgccgccgggtcagcgaaggtatgctggatgttcacactaatgctctacaagctcaagcccgtacggcctttcaccgcgatcttgaagtccggctgctagcactgtcagcacgcctgaaattgcctgaggcatttgtgctggaatctgccgctctgtatcgttcctgcggtcgtgaattgttcgagttcacccctgcccgaaatgaagtaagggaattccagcaagatagtgtcgatatggataacctgccaaataatgaacgaatagttcgcttggcggctgagcgtcgcctagataatttgacgaacgctttaactggcaggttgtcagcttttaccgatatgcccgaccaagtattgcatcacaataaaccgctgctcgcggtacttaatatgattgccgaacgacaccagattaataatccgcagcgcattgaacggatggctgaggtaattaaggtagcccaccactggtatcagcgattagccacagacgaaaccggctatgccgcctttgctgctcgtacccgtcaattggttgttggcacattggttggcatcgggcatggcggatatcaactggataaaaatgcctttgacttggtggtaattgatgaggctgcgcgcgctacgttttccgagctagccatagctatgcagagtgcgaagcgagtgctattagtgggggactacaaccaattggcacctagctatgatgtggctcatgtacgccaagtcgcccgtgatctaggcctgaatgaggtcgatgtaaaacgaacggattttgagcgagcttacgtcttgaatgatggccacatgttgttgaagcaatatcggatggcacccgcgataggtgacattattagccactgcttctatgacggcacacttgcgaccggtcggccttctgctcccgagtggatgtcctccctgcccaccccgtggaatcgcacggtgtcttggatcgatacctctgacagtaagttgcaagaaacgaatatcggcaagggaattgccaatgaagttgaagttaacctgttgtgcagcttgctgcggcaattggtcgacgatgagcaggcgatggggcagctacgtcagtggaatgacaacgatactacgccagccatcggggttattaccggttaccgcaagcaggtggaactcctgcagatgcggctggaatctgaatcttgggcagcgccgatccgctcaatgataaaggttgataccattgattcctatcagggctctgaaaatcgtatcatcttattaagtttagtacgccataactctgagcaaaagggcggattcatgaccgataatgcccgagttaacgtggccctgtctcgggcaaaagagcgtctgttaatcatcggtgcagggagtatgtggcaacaggcgaatgcatgtcagccgctggcccgtgtcttcgactatatccaccaacagtactcataccataatagtgagtaccaaatcattcgttcagctgacctgatccataatgcttgcgccgaggtgcaggagagtgactatgtgtaa

SEQ ID NO: 400208 - DNA, 1587 bp, Salmonella enterica
atgtgtaacaagacccttaccttgaacagaacagcgcagcaacctgtggaactgccggctgattatgaccgcttgctacaaagtattaccgtgctggcaccagtacagaagatcagtctggacattgatgtgacgcataaagcagcgctaccagcggttcttgagtcagctcttctactagtggcgcaactcgaaatcgtgtctccttctgagttaggaggctttttcggactcgctgaccatgagcgtcaggttctggttgatgaaatgatcgacactggcctcgtgcgatacaatgacgaaggcgatatcgcgactacagtcaagctgacaatgcagcgccgagaaggcgcatcggatgagggcattgcaattgaggacgtggaaaatcaccgtgacttcaccttcatcgacctttgcactgggcacattcagcctaagtgtaatgcggacctgcagaaaggtttgcccgagttgccacgtaagatcaatcgcagtgacttcaccgatttgatcgctagccaatttcgtcgctttcagatttgcttacccgataccaagagcaagcgcgcactgcgtagctcgaaggcccgactctaccgagtgaatcgggcctctgttggtcaatcggggttgaaacagcagatctcactcgatatccacgcccattccgatcctctgaacgggatacgtctggactcacggttgatggactatagcttagagcatacacgcttgatggaaagctccggtctcaaaacagaggctattaactggctgcacgagcgcaagttagaggccgctagttccacactagaagactattgtgatctggcaaaagatatggtgatccgccgatatatcggacgtgatggtaagctggaactagggcgtttactccatgatcgccagcgcagaaaaaccagctatggtaacagcacgacgcaacgtatgatgattgggcctgtctatgcagcccccaatcgtaacactttaattaagtgggctgaacggttgccacgtcagcagcaggtacatcaaggaatctggcttggtgctaccaacgagttatttggcgctagtttaggtctcgggtcgttcatcaaacaaatgaacaccgagctcgcaagtggagagcgcaacagtcgcctcaatttggcatttcagtgcgatgaggaatttcgggcacagcgtttaatcaccaatcagtttaatagccgtaccgacggtagcctacgaattttcccaaaaggccgttctgagtcgcacttggaaatattggttttccctggcgagtacggtatggcagtggttcagtaccatgctgctttggatccgtctcttgggtatgctggccttacattgccaatcggctacttcacgacggaccctgagcaggtagctcagttgtggatgcaggtacagcaacgaatccagtcaccggttcggtcagccgaccagcccgaggtagcgacagatgatcttaataagctactgggttgtgctcctgcagaattggcacaaatgctagtcgacaattccgaggaaaaactgaaaaaactggtggaaagattcaatcaacactag

SEQ ID NO: 400209 - DNA, 309 bp, Salmonella enterica
atgcaacatagtccattatttctactgttgactttactcatagggccacaggcctatgcctccccggaatccacccagctcgccctcgcgctgaaacaactcgacggcgtgaaaatctcgctggagcgtgcccaaaccagctccagcaccgatccacaatcgcgctacttcttcgactacttacaggcgcagcaggacatctccgccgttaaacaaggcatccaccgctaccttagcccagcaagagcacagccacgcgccatccagcccctgagcaccagctaccagcgggagaaccctgatgactga

SEQ ID NO: 400210 - DNA, 441 bp, Salmonella enterica
atgaaaattaccagcattgatattattgatgttgctaatgattttgcgtccgccaccagcaaatggcgtccggtggtggtaaaaattaataccgacgagggcatttccggttttggcgaagtcgggctggcttacggcgtcggcgcctctgcgggcatcggcatggcaaaagatttagcctccattatcatcggcatggacccgatgaataacgaagctatctgggaaaagatgctcaaaaaaaccttctgggggcagggcggcggcggcatcttttccgcagcaatgagcggtattgatatcgcgctgtgggatatcaaaggtaaagcgtggggtgtgccgctgtataagatgctcggcggaaaaagccgcgagaaaataagaacctatgccagccagctacagtttggctgggggacggtagcgataaagatatgctga

SEQ ID NO: 400211 - DNA, 540 bp, Salmonella enterica
atgaacgttattaaaacagaaattcctgatgtattaatttttgaacctaaagtgtttagtgatgaacgtgggttctttatggaaagttttaatcagaaagtatttgaggaagcggttggtcgaaagattgaatttgttcaggataatcattcaaaatcaactaaaggtgtgttacgtggtttacattatcaagttgaaccttatgctcaagggaagcttgtacgctgtatagcaggagaagtttttgatgttgccgtagatatacgcaaagattccgaaacatttggtaaatgggttggtgtcaatatttcttctgaaaacaaaaggcagttgtggatacctgaaggttttgctcatggttttcttgttttaagcgatagtgcagattttctttataaaacttcgaattattactctcctatccatgaaagaggtatcgtttggaacgatccaacgataaacattaattggccgattaatattgataaaatactatcggaaaaagacactattttaccaaaatttatcaatgttgcgtaa

SEQ ID NO: 400212 - DNA, 933 bp, Salmonella enterica
  misc_feature (800)..(809): n is a, c, g, or t
atgtataaaacacttgtgattactacagctccagtttttccaacaaataatggatataaaagttcggttttaggtcggttggatgaaatggtagcgcttggaaataaaattatattagtagagctaaactttgaaaatagcatcaacaaaaatgatgaggtaatttccgaacgctttcagagaattaaacgatacaaaattcgatgtaataaaaggacggttgtgcatgaaataaaatcattacttaatattaaaactcgacatgaacaattattttcagataaaaacatccgcaatagaatagaagatattcttgaaattgaaaagccatcaatagttgttgtagaatcattatgggcattacatgctttacctcgtgatgttaagggggaagttcgttgtgttatacatgatgtagctattgatttttttagagaaatgtttaaatcccaaaggggaatgttaaggagattgtgttatcttaatgactatattaaattgcaatttacagaagttaatattttaaatcgtgtaaaaattgatgagtttgtttttttaactgaagaagacaaagagtggtaccaagataaatataatatcaagcaactttgttctctcgcctctaatcatctatatgttgaaaaaattgaaagaaaaataaatcataagactccatttctattaattccaggaagtatagagtttgctcaaaattatcatggactaaactggtttgttaaaaatatatatcctcaccttaataaaaaaataaaagtaatagtaacaggtaaagcatctcnnnnnnnnnnctatcattacccctttaataaacactggattagtgaaaatattaattctataatcatattcttcccacccaatataatttgcaacagcatctggcagaagattataatgaataagggtatttaa

SEQ ID NO: 400213 - DNA, 936 bp, Salmonella enterica
atggcactgcccattattattgattgcgatccgggtcatgatgacgcgatcgccctcgttctcgccctcgcctcccctgaactggaagtgaaagcgatcacctcttccgccggcaaccagacgccggataagacgctgcgcaacgtgctgcggatgctgacactgctcaaacgcccggatattccggtggcgggcggcgcggtgaaaccgctcatgcgcgaactgattatcgccgataacgttcacggcgaaagcggcctcgacggcccggcgctgcccgagccgtcattcgccccgcaaagcggcactgccgttgagctgatggcaaaaacactgcgcgagagcgcacagccggtcaccatcgtctccactggcccacagaccaacgtggcgctgctgctgaatagccatccggaactgcatacgaaaatcgcccgcattgtgatcatgggcggcgcgatggcgctgggtaactggacgcccgctgcggaatttaatatttacgtcgatccggaagcggcagaaattgtcttccagtcaggcattccggtggtgatggccgggctggacgtcactcataaggcacagattcacgctgccgatatcgagcgtttccgcaacatcggcaatccaatttcgacgatcgtggctgaactactcgacttcttctttgaatatcacaaagacgaaaaatggggatttatcggcgcgccgctgcacgacccgtgcaccatcgcctggctgctcaagcccgagattttcaccaccgttgagcgttgggttggcgtggaaacccaggggaaatacacccaggggatgacggtggtggattattattttctgacggggaataagccgaatgcgacggtgatggtcgatgtagaccgccagggatttgtcgatttgctggcggaacggctgcaatactacgcataa

SEQ ID NO: 400214 - DNA, 726 bp, Salmonella enterica
atgattaccctgaaaaatgtttcaaaatggtatggtcactttcaggtgctgaccgattgttcaacagaagtgaaaaaaggtgaggtggtggtagtctgcgggccatcgggttccggtaaatccacgctgattaagaccgtcaatggtctggaaccggtgcaaaaaggcgaaattaccgttaacggcattattgtgaacgacaaaaaaaccgatctggcgaaactgcgttcccgcgtgggcatggtattccagcacttcgagctgtttccccacctgtcgatcatcgaaaacctgacgctggcgcaggtgaaagtgctgaaacgcgataaggccgccgcccgcgataaaggcctgaagctgctggagcgcgttggcctgtctgcacatgccaacaagttcccggcgcagctttccggcggtcagcagcagcgcgtggcgatcgcccgtgcgctatgtatggaccctatcgccatgttattcgatgaaccgacttccgcgctcgatccggaaatgatcaacgaggtactggacgtaatggtcgagctggcgaacgaagggatgaccatgatggtggtgacgcacgaaatgggctttgcccgtaaagtggctaaccgggtgatctttatggatgaaggtaaaatcgtcgaagattcgccaaaagaggagttcttcgctaaccccagttccgatcgcgcaaaagacttccttgcgaaaatcctgcactaa

SEQ ID NO: 400215 - DNA, 675 bp, Salmonella enterica
atgtacgaatttgactggagttcgattatcccctcactgccttacctgctggccgggttggtcatcacgctgaagatcaccgtcaccgccgttgtcgtggggatagtctggggaaccattctggccgtcatgcgcctctcaagctttgcccctatcgcctggtttgctaaagcgtatgttaacgttttccgttccatcccgttggtgatggtcttgctgtggttctatctgattgtacccggctttctgcaaaacgtgctgggactatcgccgaaaaccgatatccgcctgatctccgcgatggtggcattctctatgtttgaagcggcctactattccgagattattcgcgccggtattcaaagtatttcccgcgggcagtccagcgccgcgctggcgctggggatgacccactggcagtcgatgaagctcattattctgccgcaggcgtttcgggcgatggtgccgctgttgcttacgcagggcatcgtgctatttcaggacacctctttagtttatgtactcagcctggcggacttcttccgcaccgcgtcgactatcggcgagcgtgacggaactcaggtcgaaatgattctgttcgccggcgccgtttattttgttatcagcctgagcgcgtcgttgctggtcagctatttgaagaaaaggacagtttaa

SEQ ID NO: 400216 - DNA, 741 bp, Salmonella enterica
atgtcaatagactggaactggggtatttttttacaggaagcccccttcggcaataccacctatctcggctggctatggagtggttttcaggtcaccgtagccctttcgattaccgcctggattatcgctttcctggtaggatctattttcggcattttacgtaccgttcccaaccgtttcctctccggactgggcacattgtacgtagaactgttccgcaacgtgccgctgatcgtgcaattcttcacctggtacctggtggtgcctgaactgttgccggaagatcttggcatgtggtttaaggcggaactcgatcccaatattcagtttttcctctcctcaatgatctgtctgggactgtttaccgccgcccgcgtttgcgaacaggtgcgcgccgcgattcagtctctgcctcgcgggcagaagaacgcggcgctggcgatggggctaacgctgccgcaggcttatcgctatgtcctgctgccgaatgcctatcgcgttatcgtaccgccaatgacgtcagagatgatgaacctggtgaaaaactcggctattgcctcaaccatcggcctggtggatatggcggcgcaggcaggcaaactgttggattactcggcgcacgcctgggaatccttcaccgccattacgctggcctatgtgctgattaacgccgttatcatgctggtcatgagcctggttgaacgcaaagtccgcctgccgggcaacgtggggagcaaataa

SEQ ID NO: 400217 - DNA, 909 bp, Salmonella enterica
atgcaattacgtaagctaaccacagcaatgctggtcatgggactgtctgcgggccttgcgcacgcagaagatggcgcgcctgccgctggtagcaccctggacaagatcgctaaaaatggcgtgatcgtcgtcgggcatcgcgaatcttctgtgcccttttcttattacgacaaccagcagaaagtggtcggctattcccaggactactccaacgctattgtggaagcggtaaaaaagaaacttaacaagcccgatctgcaggtgaagctgatcccgatcacctcgcaaaaccgtattccgctgttgcaaaacggaaccttcgattttgaatgtggttcaacgactaacaaccttgagcgccagaaacaggccgccttctccgatacgattttcgtcgtcgggacgcgactgctgactaaaaaaggcggcgatattaaagacttcccggatctgaaaggcaaagcggtcgtcgtcacctccgggacgacctctgaaattctgctgcataagcttaacgaagagcaaaagatggggatgcgtattattagcgcgaaagaccacggtgactcgttccgcaccctggaaagcggtcgcgccgtcgcctttatgatggatgacgcgctgctggccggcgagcgcgccaaagccaagaaaccggataactgggagattgtcggtaaaccgcagtcccaggaagcctacggctgtatgctgcgtaaaaacgaccctgagtttaaaaagctgatggacgataccatcgcccaggcgcaaacctccggcgaagcggaaaagtggtttgataagtggtttaaaaatccgatcccaccgaaaaacctgaacatgaatttcgagttgtctgacgagatgaaagccctgttcaaagcaccaaatgataaagcgcttaactaa

SEQ ID NO: 400218 - DNA, 1590 bp, Salmonella enterica
atgactcgccccagccaaaactggacgaataacagcaatagtggactaaaaatggcatttgcctcgttaattgaacgccagcgtattcgcctgctgctggcgttattattcggcgcctgcggaacactggctttctctccgtatgacgtctggcccgcagcgatagtgtcgcttatcgggctgcaggccttaacgttcaatcgccgcccgctccagtctgccgccatcggctattgctggggactcggacttttcggtagcgggattaactgggtttatgtcagtatcgcgcaatttggcggcatgccgggcccggttaacgtttttctggtggtgctgcttgcagcttatctctcgctgtataccggactgtttgccgggattttgtcgcgcctgtggccaaaaaccaactggctgcgcgtcgctatcgccgcgcctgcagtatggcaaatcaccgaatttttacgcggctgggtgctgaccggcttcccctggctgcaatttggctatagtcaggtcgacggcccgctaaaaggcctggcgccggtaatgggcgtcgaagcgatcaacttcctgctgatgatggtcagcggcctgttagcgctggcactggcgacgcggaactggcgtccgctggctgtcgccgtgattctgtttgctttgccctttccgctacgttatatccagtggtttacgctggaaccggccaaagcgacccaggtatcgctggtgcagggcgatatcccgcagtcgctgaagtgggacgaaaaccagctactgaatacgctaaaaatttatctcaacgaaactcgcccagagttaggcaaatcacagattattatctggcctgagtcggcgattccggatctcgaaatcaatcagcagcctttccttcgttcgctggacgagatgttacgcgaaaaaaatagcacgctgatcaccggtattgtcgatgcgcgtctcaataaacagaatcgatacgacacctacaatacgattattacgttgggcaaggataatccatacagttatgactcgcccaatcgctacaataaaaatcaccttgtaccctttggcgagttcgttccgctggagtctatcctgcgtccgctggcgccgttcttcgatctgcccatgtcctcctttagccgcggcccttatatccagccgcagttacatgcgcacgactataagctgacggcggcaatctgttatgaaattattcttggcgaacaggtgcgggataacttccgcccggacaccgactatctgctgacgatttctaacgacgcctggtttggtaagtccattggcccgtggcaacatttccagatggcgcggatgcgttcgctggagctggcgcgtccgttgctgcgcagtaccaataacggtattacggcggtgattggcccgcagggcgaaatccaggcgatgatcccgcagttcacacgccaggtactgaccacccacgtcacgccaaccacggggttaactccctatgcccgtaccggcaactggccgctatgggtactgaccgcgctgtttgcttttggcgcggtagtgatgagtctgcgacaacgacggaaataa

SEQ ID NO: 400219 - DNA, 879 bp, Salmonella enterica
atgagcgacgacaattcacacagtagtgacacagtaaacagtaaaaagggatttttttccctgctactcagccagcttttccacggtgaacctaaaaaccgtgatgagttgctggcgctgatccgtgattccgggcagaacgagcttatcgatgaagatacgcgcgatatgctcgaaggcgtaatggacatcgccgaccagcgcgttcgcgatattatgatcccgcgctcccagatgattaccctgaaacgcaaccagacgctggacgaatgtctcgatgttatcatcgagtccgcccactcgcgttttccggtgatcagcgaagataaagatcacattgaagggattctgatggccaaagatttgctgccgtttatgcgcagcgatgccgaagccttcagcatggacaaagtgttacgcaccgcggttgtcgtaccggaaagcaaacgggttgaccgtatgctcaaggaattccgctcccagcgctaccatatggcgatcgtgattgatgagtttggcggcgtttccggccttgtgactatcgaagacatcctcgaactgattgtcggtgaaattgaagatgagtatgacgaagaagacgatattgacttccgtcagcttagccgccatacctggacgattcgcgcgctggcgtcgattgaagacttcaatgacgctttcggcacccacttcagcgatgaagaggtcgataccatcggcgggctggtgatgcaggcgttcggccatttaccggcccgcggcgaaaccattgacattgatggttaccagttcaaagtggcgatggccgatagtcgtcgtattattcaggtgcatgtcaggatcccggatgactcgccccagccaaaactggacgaataa

SEQ ID NO: 400220 - DNA, 474 bp, Salmonella enterica
atgagccaggtgatcctcgatttacagttggcctgtgaaaaccacgcgggcctgccggatgaagctcagtttcaacgctggctggacggcgttattccgcagtttcaggaagaggcggaagtcacaatccgtctggtggatgaggccgaaagccacgaccttaatttgacgtaccgcgggaaagataaacccactaatgttctctccttcccgtttgaagcgccccccggcattgaaatgccgctactgggcgatctgattatttgccgtcaggtcgtggagcaggaagcgcaggaacagagcaagccactggaggcgcactgggcgcacatggtcgtacacggtagcctgcatttgctgggttacgatcatatcgacgatgacgaagcggaagagatggagtctctcgaaacggagattatgcttgctatgggctatgaggatccgtacattgccgagaagattgcagaatag

SEQ ID NO: 400221 - DNA, 1047 bp, Salmonella enterica
ttgaatatagacactcgcgaaattacccttgagcctgcagacaacgcccgtctgttgagcctttgcgggccgtttgatgacaatattaaacagctcgaacgtcgtctcggtattgaaatcaaccgccgtgacaatcactttaaactgaccggtcgtccgatttgcgtgaccgcggcgacagatattttgcgaagtctgtatgtcgataccgcaccgatgcgcggccagactcaggatatcgaaccggaacaaattcatctggcgatcaaagaagcgcgggtgctggaacagagcgcggaaagcgtgcctgactatggcaaagcgatcaatatcaaaaccaagcgcggcgtgattaaaccgcgtaccccgaaccaggcgcagtacatcgccaatattctcgatcatgatattacctttggcgtcggcccggcgggtaccggtaaaacttatcttgcggtcgccgctgcggtagacgccctggagcgccaggagattcgccgtattctactgacccgtccggcggtggaagcgggcgaaaaactcggctttctgccaggcgatttaagtcagaaggtggacccgtacctgcgtccgctgtatgacgcgctgttcgaaatgctcggctttgaaaaagtcgagaagctgattgaacgcaatgtgattgaagtcgcaccgctggcctatatgcgcggacgcacgttaaacgacgcctttatcattctggatgaaagccagaacaccactatcgaacagatgaagatgttcctgacgcgtatcggctttaactcgaaagcggtgatcaccggcgacgtgacgcagattgacctgccacgcaacaccaaatccggcttgcgtcatgccattgaagtgctggcggaagtcgatgaaatcagtttcaacttcttccacagcgaagacgtggtgcgccatccggtcgttgcccgcattgttaacgcctatgaagcctgggaagaggccgaacaaaaacgcaaagctgcgttggcggcagagcgtaagcgtgaagcccaggagcaggaacagaaatga

SEQ ID NO: 400222 - DNA, 1425 bp, Salmonella enterica
atgactaaaaaactccatattaaaacctggggctgtcagatgaacgagtacgattcatcgaagatggccgatctgctggacgccacccacggctatcaactgaccgacgtggcggaagaggcggatgtgctgctgttgaatacctgctcaatccgcgagaaggctcaggaaaaagtcttccatcaattaggtcgctggagactgttaaaagagaaaaatcccgatctgattatcggcgtcggcggctgcgtggcttcccaggaaggcgagcacattcgtcaacgcgcccattacgtcgacattatttttggcccgcaaaccttacaccgcctgccggagatgattaactccgtgcgtggcgaccgcagcccggtggtcgatatcagcttcccggaaatcgagaagttcgaccgtttgccggaaccgcgcgccgaaggcccgaccgctttcgtttctatcatggaaggctgcaataaatattgtacttactgcgtggtaccgtatacccgcggtgaagaagtcagccgtccctcagacgatatcctgttcgaaatcgcccagttagcggcgcagggcgtgcgtgaggtcaacctgctgggccagaacgttaacgcctggcgcggagaaaactacgacggcaccaccggtacctttgccgatctgctgcgtctggttgccgccatcgacggcattgaccgtattcgctttaccaccagccatccgattgagttcaccgacgatattatcgaggtgtaccgcgatacgccggaactggtcagtttcctgcatctgccggtacagagcggttccgatcgcgtgttgaatctgatggggcgcacccacactgcgctggaatataaagcaatcatccgtaaactgcgcgcggcgcggccggacattcagataagctctgactttatcgtcggattccctggcgaaactaccgatgatttcgaaaaaaccatgaagcttatcgctgacgtcaactttgatatgagctacagctttatcttctctgcgcgtccgggaacgccggctgccgatatggttgatgacgtaccggaagaagagaagaagcagcgtctgtatattctgcaagagcgtatcaatcagcaggcgatggcatggagccgccgtatgctcggcacgacacagcgcattctggtggaaggcacgtcacgtaaaaacattatggaactgtctggccgtaccgaaaacaatcgggtggtgaactttgaaggcacgccggagatgattggtaagtttgtcgatgtggaaattactgacgtctatccgaactccctgcgcggaaaagtggtgcgtaccgaagatgaaatggggctgcgcgtcgccgaaacgccggagtccgtcattgcccgtacccgtaaagaaaatgagctaggcgtaggattctaccagccttaa

SEQ ID NO: 400223 - DNA, 1176 bp, Salmonella enterica
atgacaaatcaaccaacggaaattgccattgtcggcgggggaatggtcggcggcgcgctggcgctgggtctggcgcagcaagggtttacggtgatggtaatagaacatgccgcgcctgcgccgtttgtggctgacagccagcctgacgtgcggatttcggccattagcgcggcatccgtggcgctgctcaaggggctgggcgtttgggaggcggtgcaggggatgcgtagccatccttatcggcgactggagacctgggagtgggaaaacgcccatgtggtgttcgacgccgctgaactcaagctgccgctgttaggctatatggtagagaacaacgtcctgcaacaggcgctgtggcaggcgctggaagcgcaccccggcgtgacgctgcgcgttccggcttcactggcggcattgcaccgccgccacgatggttatgcgctggaactggccgacggcgaatgggtaacgccgaagttagtgattggcgccgacggcgcgaattcgcaggttcggcaaatggcgggaattggcattcatgcctggcaatatgcgcagtcgtgtatgcttatcaccgtcaagtgtgaaaattcgccaggcgacagcacctggcagcagtttacgccaacggggccgcgcgcttttttgccgctgttcgacgattgggcgtcgctggtgtggtatgacgctccggcacgtattcgccagctgcagggtttatcgatgacgcaattgcaggtggaaattaaccagcactttccggcgcgtctgggggcggtgatgcctgtcgcggcgggcgcgtttccgctaacccgtcgtcacgcgttgcagtatgtacaaccggggctggcgctggtaggcgacgcggcgcataccattcatccgctggccgggcagggcgtcaacctggggtatcgggatgttgatgcgttgattgatgtgctggcgagtgcccgtagctatggcgagtcctgggccagccattcggtgttgaaacgctatcagacgcggcgcatggcagataattttatgatgcaaagtggaatggatctgttctatgccgggttcagcaatgaactgccgccgctgcgtattttacgcaatatggggctgatggcggcgcagcgcgcaggcgtgctaaaacgtcaggcgctgaagtatgcgttggggttgtaa

SEQ ID NO: 400224 - DNA, 525 bp, Salmonella enterica
atggtcgtcttgctctgcgctttcaccttcattgatatcacggccagcgccgcctggttgattattttgggtctggtttaccccgtggcagtgtcaatgaggctacatatactgcaccagaaaaaggccgtcatgttgcgccagaatagtgcggaatggatagtgtatctgccagggatccctgtgcaagaaaaacaaagcgcgctgattaatgtcgcgttttcctcgaaaacggcgctgcgtggattctatattcgcgccctgtccagcaaagtcattcttcacatcatcactttttatattctgtggtttgatgtccaacatgcaacactgacgtggtatcggattatcgccgcattaatcaccctggcgattcttgtaaaatcaatgagttccacattactgatgctacataaagtagtacgttgccaatacaacgtatgcacaattgaaatggcatcaccttggtatgaaattgattttaaagggaaattaggtttatgtgctttatttgcagtaaagtaa

SEQ ID NO: 400225 - DNA, 192 bp, Salmonella enterica
atgaaccgtctcttgctgatgtggattctgtgtctgctgcagaaacgaatttctctgaagccagtgggcctgacaatgatttttttctgtccgggaatgacttcatgcgagcagaagaagaatctcaaagagtggttgagtcattcagagatagccttagcaggaagaaaggattctgattttgaattctaa

SEQ ID NO: 400226 - DNA, 453 bp, Salmonella enterica
atgccgacattcacgcaatctggaactgggaagtttgattattggcttatagatggagttaagtctttttcaaaaataccggctaacacactgccatcaatcaccgtagatatgccgatccgcttacaagtcggaaatggttactttggctcaacacacataaccgccaggcatggtaagtggcttcaacgctatcaaccagatggttgtgtagcaacattcatccataagaagctcagcaccagtggaaagatcttactgttggaagagcaagataaaataggtttagctctcagactgaacccagactcagctctgatactgaaaaacattggtgattttttctctgtaacaacaatctattacaaacgaagtgggcttcagggaaatgaaataggaaggtataccggttcatcgtgggcgacatctccttttatcgatagaaagcgataa

SEQ ID NO: 400227 - DNA, 432 bp, Salmonella enterica
atgaaagcgaagacagagccacttgaaaaaaagtggggagaacgaagcatgcttatgggatggacagcgatccctacatcgctgctttttctacaggcggaactatcaattagtcctttgggtttcaatttgttgatgaaccttatttctcactggtgggaaactacagagcacccttacccttcacaagaatcgatggcaaaaagaatgggcgtttcgaaacgttctatccagagagaaatcacaactttggtagagcttggcttactcgataaacagccgaataaggccgggagcaagaaatttaaaggtcgaaacacctatgacttaagcaagcttgttcaagtccttaatgaaaaaacacctgataaaataagcagtttcaaacgttataaaaaaaatggagaatcactagattcagagctggagtaa

SEQ ID NO: 400228 - DNA, 771 bp, Salmonella enterica
atgatatatatatcgatagtctcgcatgggcattatgagattataaagaaattagggacattatcaaatttaactaaaaatagtcttgttaaaattattataaaagataacttaggtgaaaaaggtttggaagagttttgctatgttaataacataacttatttaaaaaatagtgttaaaaaaggatttggtaaaaataataatgaagtatttaataccatagcgcacaatataaagacggatgattttttcgtagtaatgaatcctgatgtttttatagatgctaatgtattgttggaggctgtttatgaatgcgataagtctaatgcatacgtggccacagttaatttatatagagattttgataaaaaggaatatgacaattccattaggaaattcccttgtgtaatggattttatccattcctttttatttggaaaaaataaatgttcaattgataaagccgggataaatgaacctttatatgttgattgggcagcaggttcttttcttatatttaaagctgagtttttctctaagctaaatggatttaatgaaaaatactttatgtattgtgaggatatagatatatgttggcgagcaaataaaatttacaatacttcggttttgtatttaccccagtatgttggtgttcatttggctcaatttaataatcgtaaaatattatctcgtcattttttatggcatataaaaagcattatattatttttaatgtataaaaacggcttcttaacgataaataaaaaatga

SEQ ID NO: 400229 - DNA, 1089 bp, Salmonella enterica
gtgtcaaaaattaaagtaggaatcctaatttcgagactccagaatcttggacctgtaaatgtagttcgtagtatagttaaaaatagttctcgttttaattacactattttttgtttaacagatgatataaatgaagaaatttcacaagaattattagagcgtggcgttaagattataatggttccgggtggcaaccaagttagtaaaatttattttttaaaaaaatatatagaaaaaaatccacatgatgtttttcattcacatggtattacagcggatgtttttatgttttttttaaacggcataaaaatatcaactatccataatagattgaatgaggattacgtaccgctttttggtctcctcaaaggcaatttgttatattacgcacatttgttgttattgaagagttttactcatttagttgcatgctcagaatcggttgctacaaaactataccaatcaaaaataacaaaaaatgtttctgtaatccaaaatggaattgatattaataaattccatcccgtttcgactgataaaaaaatcttactaagaaaaaaatatggtttctatgatgtagaaaatatatacgtatattgtggttccttatctcaaagaaagaatgtatcctaccttttagaacatttatctttaggtaagaatgatagatttattattattggtgatggtccattatttgatttttgtaaaaagagccattttatagacaatagatacatttttacaggaaaaattgagtctcctttagaatactatcagttatctgatttttttgtttcagcttctttatctgaaggtcttcccttggcattgttggaggcagtctctgctggttgctttttatatgtaagtgatattccccctcatagggaagttgcaagcttattaaagaataactcaattgaattttttagtttggccggagggaataataaattgaaactgccgttatatatatcaaagatatgtgatataagtgatgaaatttatttcaatatttctgatgaaaaaatggctgcattatatggcgacttgtactcttccttattaataagagatttaaaatga

SEQ ID NO: 400230 - DNA, 213 bp, Salmonella enterica
atggttgggttaagtgagatggctatactttcaggacgtctctcatcatttttaacactaggtgaaagcatattaatcgtatattgtattttttataaaagaaatatctcggtaggttttgttttctttttattattaactttcatacaaatgggatatgatttgttaatttcaaacgtacatccgaaactctctctttttatatttggataa

SEQ ID NO: 400231 - DNA, 966 bp, Salmonella enterica
atgtcagaagataaattcctttccgaatatagccctcgtgattcgtcgtgggattcacatcgcacgtttaccgattccgtgggcggtatctatcagaccgctgccgaattcgagcgctatgcgctccgtatggcttcctgtagcggtttattacggttcggctggtctacgctcatggaaaccggagaaacgcgtctgaggcttcgcagtgcgcaattttgccgtgtccgccattgtcccgtctgccagtggagaagaaccctcatgtggcaagctcgtttctatcaggctttaccgaaaattgttgcggattacccgtcttcccgttggttgtttctgacgctaaccgtcagaaactgcgcgatcgaggatctgggggaaacactgacagtgatgaatgcggcgtttaagcgaatggaaaagcgaaaagagctttcacctgttcagggctggattcgtgcaacggaggttacgcggggaaaggatggcagtgcacatccgcattttcactgtctgctgatggttccaccgtcttggtttactcgcgattatgtaaaacagtctcgatgggtggaactctggcgcgattgtctgcgggtgaactacgagccgaatattgatatccggacggtaaaaacgaaaaccggtgaggttgtggccaacgttgcagagcagctacaaagcgctgttactgaaacgctgaaatactctgttaagccggaagatatggcgaatgatcctgagtggtttcttgaactgacgcggcagcttcataagcgccgttttatttcgaccggcggggcgctaaagaacgtcctgcaactggacagggaaaccaatgaggatcttgttattgccgatgatgttggggatggcacagacgatgggaaacgaactgcgtttgtctgggactcgagtaaacgccgttacaaacgagcccctgagaaagaccgatttgataattga

SEQ ID NO: 400232 - DNA, 159 bp, Salmonella enterica
atgttcgtcgaactcgtttatgacaagcgaaatgttgaaggtttgccaatgcaggcgaacgcattaaacagtgactgtacaaaaaccgagaaagaacggctgcaccgtatgctggaagagatgtttgaagaggctgatatgtggctggtcgccgaataa

SEQ ID NO: 400233 - DNA, 492 bp, Salmonella enterica; identical to SEQ ID NO: 379319

SEQ ID NO: 400234 - DNA, 456 bp, Salmonella enterica
atgaaattgcatgaactgaaacaaaaacgtaacaccatcgcgaccgacatgcgcgcgctgaacgaaaaaatcggcgataacccatggacggatgagcagcgtaccgaatggaacaaggcaaaatctgaactggaagcactcgacgagcgcatcgcccgcgaagaagagctgcgccgccaggaccagacctacgttgatgaaaacgaggaagagcagcgcaataatcaggatcctgataaagacccgcagcaggacgaaaaacgcggccagatttttgataaatggatgcgtcacggcgccagcgaactgagttccgaagagcgcaaagccttacgcgaactgcgtgcgcagggtgtggcgccggatgaaaagggcggctataccgtgcctgataccttcctggcgaaagtggtcgaacagatgaaatcctacggtggtattgccagcgtggcgtag

SEQ ID NO: 400235 - DNA, 342 bp, Salmonella enterica
gtgacttttttacatgaagtctcatttaatgaattaaagattttatattctaaagcctacgcgcttgtttatccatctattgatgagggttttggtatacctcctattgaagcgatggcatcaaatactccagttatagtgtccgatataccagtatttcatgaagtgttaaccaatggtgcattatatgtgaatccggatgatgaaaaaagctggcagagtgcaattaaaaatatagagcagttgcctgatgcaatttcccgatttaacaactatgtcgcacggtatgactttgataatatgaagcagatggttggcaattggttggcggaatcaaaataa

SEQ ID NO: 400236 - DNA, 642 bp, Salmonella enterica
  misc_feature (629)..(638): n is a, c, g, or t
atgatcgttaacctatcacgtttaggtaaaagtggtacgggaatgtggcaatactcgattaaatttttaacggcactgcgagaaatagctgatgttgacgcaataatctgtagcaaggtacacgctgattattttgaaaagctcggttatgcagtagttactgttccgaatattgttagcaacacatcaaaaacatcgcgacttagaccattagtatggtatgtatatagttactggcttgcgctgagggttttaattaagtttggtaataaaaaattggtgtgtactacacatcacactatccccttactgagaaaccaaacgataaccgtacatgatataagacctttttattatccagatagttttattcagaaagtgtattttcgctttttattaaaaatgtccgttaagcgatgtaagcatgttttaacggtatcttataccgttaaagatagcattgctaaaacttataatgtagatagtgagaaaatatcagtaatttataatagtgttaataaatctgattttatacaaaaaaaagaaaaagagaattactttttagctgttggtgcaagttggccacataaaaatattcattcattcataaaaaataaaaaagtttggtnnnnnnnnnnataa

SEQ ID NO: 400237 - DNA, 1359 bp, Salmonella enterica; identical to SEQ ID NO: 368685

SEQ ID NO: 400238 - DNA, 1350 bp, Salmonella enterica
atgagaaactttcctgttccgtactcgaatgagctgatttatagcactattgcacgggcaggcgtttatcaagggattgttagtcctaagcagctgttggatgaggtgtatggcaaccgcaaggtggtcgctaccttaggtctgccctcgcatttaggtgtgatagcaagacatctacatcaaacaggacgttacgctgttcagcagcttatttatgagcataccttattccctttatatgctccgtttgtaggcaaggagcgccgagacgaagctattcggttaatggagtaccaagcgcaaggtgcggtgcatttaatgctaggagtcgctgcttctagagttaagagcgataaccgctttagatactgccctgattgcgttgctcttcagctaaataggtatggggaagccttttggcaacgagattggtatttgcccgctttgccatattgtccaaaacacggtgctttagtcttctttgatagagctgtagatgatcaccgacatcaattttgggctttgggtcatactgagctgctttcagactaccccaaagactccctatctcaattaacagcactagctgcttatatagcccctctgttagatgctccacgagcgcaagagctttccccaagccttgagcagtggacgctgttttatcagcgcttagcgcaggatctagggctaaccaaaagcaagcacattcgtcatgacttggtggcggagagagtgaggcagacttttagtgatgaggcactagagaaactggatttaaagttggcagagaacaaggacacgtgttggctgaaaagtatattccgtaagcatagaaaagcctttagttatttacagcatagtattgtgtggcaagccttattgccaaaactaacggttatagaagcgctacagcaggcaagtgctcttactgagcactctataacgacaagacctgttagccagtctgtgcaacctaactctgaagatttatctgttaagcataaagactggcagcaactagtgcataaataccaaggaattaaggcggcaagacagtctttagagggtggggtgctatacgcttggctttaccgacatgacagggattggctagttcactggaatcaacagcaacagaaactgcctttggtagcgctttgcttaaagcgttactcagagagtgtggaagattatcaaattagacggattagccaagcttttattaagcttaaacaggaagatgttgagcttaggcgctggcgattattaagaagtgcaacgttatctaaagagcggataactgaggaagcacaaagattcttggaaatggtttatggggaagagtga

SEQ ID NO: 400239 - DNA, 1338 bp, Salmonella enterica
gtgactacggctatcactagtagtagctataaatgcatatgcgtttttatttattcaggaacccaagggttaagctcagaagtgattggagagattgatttttgggagaaaagccaaaacaaagcgctgttgtttagagatttagaatctagggatgagtatacaatactatttgaaacgcctaatgttactgacatatctactagcttgagcaatcaatctaccggagctatagatataagtaatgtaatattagagtcgtatggtgagatcactgaaccttacggcgcaatctacggaacgattgctgcaagggtgatacatgattggtggaaaaaatacaagtatgcgcttttcgagaaaaatataagaagtgtcttgggtgattcgacatcagtaaatgcagggatcatgtctaccatcgaaaatagcccagagaacttttggtactataacaacgggattactgcaacatatgaagaggtagatgagagcatagctaatgctggagcatctcggaaaattggaatattcggatttaaaaagttaaacataataaatggggcgcaaactgtaagctctattggggctatatttgatagcatacccgaggagaaaaaagacaaagctcgagtgatgattaggtttataaatgcgaaagatcctgtttttttaggtgacgtaactaagtacaacaatactcagaatagagttactggcagagatttcacaacacaaagacctgaacagcaaaaaatacagagagaaataaactttgttgggggttatacatataagctcttacgacaggaagattcagggatagctgcttctaatgttatcgatatagatgactcattaaatgcactaatttgcgaatcaaagaaacctcaacttattgcaactttgaagtctaatagaggtcgtttttttgatacaacagagggcaatctttacgaacaagtttttaacccaagaaatccgccatccggtatttctgttatcaatgctgttaatttatacagagtatgtttcgatgttttaaaagatacaattactaaagcatctaactcatcagaagatgaatatagtaaaattccatcactgctgacgcatggtaactatgtatttattagtattttaatggggaaaatacaacccataaatacagttaatggcataaaaacctatgacaagaatagcgtctcttttgatactcttgaactagctaaaagcatatttgaatacatccagtctaattatcctaacagctatctggctagatttttccagaacaaagaaaaagtagagcagatcatcactcacttttcatcgtga

SEQ ID NO: 400240 - DNA, 486 bp, Salmonella enterica
atgagcgagattttaaatttggcgaagggcttcgaggagaaatcgaagcagcaggcgcaggataccgagcagagcgtgaagcgcgagttcgcgaggctggagacgtctatcagcgcggaactgcaatcaagctcgcagagcatcagcaacgctatccgcgagcagaacggcaggctgacgggcatgatcagaacctccgtttcagcggcgatggcgtgggtattcctctgcttcgccctgctgatcggcatcatgggggggataatctggtttcagggtacgatcatcacctcgcgcctgagcgaaatggacagctacagccagcagctggcgaacctgaaagcgaaaagcggcgcgggcgtggcgatctacagcgacgacaagcaccggaacacctacatggtggtgctgccgaagcaggcgcacggcgtggaaacctatacatcgacgaccgacaacaccgtagtgaaatacacggcgaaataa

SEQ ID NO: 400241 - DNA, 234 bp, Salmonella enterica; identical to SEQ ID NO: 233239

SEQ ID NO: 400242 - DNA, 333 bp, Salmonella enterica
gtgagtcacgcgattgagtttatcgagaccccgatgtttacccgtcagataaaacagatcgccacggatgaagaactcagggagctgcaaaagacgctgattgagtcgccggacaaaggcgatctcattcagaaaaccggcgggctgcgcaaaatcaggatggcgacgggcaaccagggaaaaagcggcagcgtgagggtgatttactttctggccaccgccgaggtgatctatctggtgatggcctacccgaaaagcaccaaagacagcctgacggacgcggaaaaagccgcgctgaagacgctgacccaacaactgaaagacgaggtgtga

SEQ ID NO: 400243 - DNA, 285 bp, Salmonella enterica; identical to SEQ ID NO: 233241

SEQ ID NO: 400244 - DNA, 903 bp, Salmonella enterica
ttgaataacgcagtactcgaacttttcaacgaccgcttaccgcacaagccgtacttctcggatgatttacactttggtgtacgcattgcagggaaagaacgcgccattctggcgaaatacatccagttcaatcagcctcacgccatgttctggctgggattcgacgtcgatcgcgccggtgccgccatcgactggagcgatcgcaacgcgcccgcgcccacgctgaccatcaccaacccggaaaacggacacgcgcacctgctgtacgcgctggaaacctcgatacgcaccgcacctgacgggaaaatgaagccgctgcgctacgccgctgccgtggagaatgcgctacgtaaaaaattagaggctgatgcggggtattcgggactaatctgcaaaaatccgaaccacggacactggaaaattgccgtatggcagccggaactctacacgctggactggctggctgattttctcgacctgaatgcagcgagcgacaaagacatcgttgctgactacggcttaggccgtaactgcaccctgttcgacaaaacccgcaaatgggcataccgcgccatccgtcagggctggccggagtatgaccagtggctacaagcctgctacgaacgcgcaagtgcttacaatctgcaattccctgcacctctggatgaaaaagaggtgaatgggatagctaaaagcattgcaaaatggactgaaaaaaactttacagcatcttcatttaaagagtacgtaattaactctcatagaagcgatattcaatctaaaagaggtcgtttaggcggattaaaaagcaaaggtggcggcaggccaacaataaactccccgtgggaaggtatggggattagtaaatcgacatattacaggaatattcatggcaagagatga

SEQ ID NO: 400245 - DNA, 315 bp, Salmonella enterica
atgcacacctttagaccatactcactaaggcatagcgatctgttatatgaagatattccgttagaaatacgcgagcaaataatcttattgattatcaatacgctaggaaactgctcctctttttatgatatgacattatactgctatcataatagtcattctgacgaagtttatcgaagaatatgtaaaacgttgcgcaaagagtatggcttattcaccttatatgcgcattcaacgtcatatctggatgaaatgagtaatctgttattaaaaacagatgataaaagaaagcatattgataccattgagctctga

SEQ ID NO: 400246 - DNA, 717 bp, Salmonella enterica; identical to SEQ ID NO: 369840

SEQ ID NO: 400247 - DNA, 144 bp, Salmonella enterica; identical to SEQ ID NO: 372441

SEQ ID NO: 400248 - DNA, 270 bp, Salmonella enterica; identical to SEQ ID NO: 372445

SEQ ID NO: 400249 - DNA, 390 bp, Salmonella enterica
atgtttggcaataatgtattcactcgggtaaaacgctctgaaaataaaaaaatggcggagatcgctcactttctcaaagagaatgatttaagcgtcgataccactgtagaagtgtttattaccgtcagccgtgatgaccgtcttattgcctgcggcggtattgccggaaatatcattaaatgcgtggccattagcgaatcagtacgcggcgaaggcttagcgctgatgaatcccctaatgattttggtaaaaatcattaagttaaggtggatacacatcttgtcatatgatcaaatggtttcgcgaaaaatcaataatcagacaacaagatgtgcgaactcgatattttacacgactctctttaccaattctgccccgaattacacttaa

SEQ ID NO: 400250 - DNA, 633 bp, Salmonella enterica
atgaacagtttaacggtaaataaccgtttgtcgcaacaaccggggatgtatgagtaccggccgttgcgtcatgaatgcagattatcaaatagcctggtcgtgcgtaaccacagggaacacagcctgaccgtgggggatgaatcgtgcaggaacttaaccgctggtttcgggatggaaggggactttatgtccatgtcattcgctgggaaccagaaactgagcgcgttatctatctgcgcaagggctatccgcatgagtgttttagccctttgtggaaattcaggcgtgattttgttgagtgtgaagcgccaggaacacattgattctgcaattccgggacgttacactgttcaggcacctcataaagcgggtgccgggcgtggaaacccggaattcaatatagagcacaaccgcgctcatgcggttttttcttgtcatgagcattgttacgcccaaattatggtggggcgtgcagggccagtttcggctgggccgggttctatgttgaccggtatttccacccctgtacgtctcaccacctataaggtcgtggaaagccttggtggtgagttcattgaattcaacatagaggctgccactatggctactgtcccaaccctcgctcaaccctga

SEQ ID NO: 400251 - DNA, 987 bp, Salmonella enterica
gtgcaccgacaccagcaccccggagcgcaccaggaaggtgcccagcaggcacagcgagaaggcgcagatggacagcagcagcgtccacgccttaaagccggcgcgctgttcggtgaccgccagcgagtgcagcagggcggtgcccgccagccacggcataaaggaggcgttctccaccgggtcccagaaccaccagccgccccagcccagctcgtagtaggcccacgccgagccgagcacgatgcccagcgtcaggaacacccacgccgccagcgtccacgggcgggcaaaacgggtgaacgcgctgtccagacgcccgctcagcagcgcggcgatggcgaaggcgaaggccaccgagaagccgacatagcccatgtacagcagcggcgggtggaaaatcagccccgggtcctgcagcagcgggttcaggtcgcgcccctccaccggaaaggccggcagcgtgcgggcgaacgggccggaggtgaacaggatgaacgccagaaaaccggcgcagaccatccccatcaccgccagcacccgggcgacgatatccgccggcaccggccggctgaacaccgccaccgccagggtccagccgctcatcagcagcacccacagcagcagcgagccctcgtgcgccccccaggtggcggccacccggtaccacaccggcagctgcgtgttcgagttgccggcgacataggccacggtgaagtcgttaaccacaaaggcgtgcaccagcacgaaaaacgcgcccgccacgcagatgaacagcagccaggcgaacaccccggccgacgccatcatccgcgcgtcgccgcgcgccacgccccacagcgggtaaacggacagcagcagcgccacgccgagcgccaggcacagcagcgcgtggccgtattcaggcatcatgatgaggtgtccttatcagcgcgttgcgggcggcggtggttttcctgcatcgccttttccacttccggcggggtgtag

SEQ ID NO: 400252 - DNA, 1434 bp, Salmonella enterica; identical to SEQ ID NO: 371420

SEQ ID NO: 400253 - DNA, 750 bp, Salmonella enterica
atgctttatgccattttacgatgcgaccaagtgtttcagtcaatcccgagtgattctatcgattatgcagttatggagcacacacagcatgcggtggtgataccaatgagcgctggctggtcggatgtgggttcctggtcctcactttgggatatatcgaataaagatcatcagagaaatgttttaaaaggagatatcttcgcacatgcttgtaatgataattacatttattccgaagatatgtttataagtgcgattggtgtaagcaatcttgtcattgttcaaacaacagacgctttactggtggctaataaagatacagtacaagatgttaaaaaaattgtcgattatttaaaacggaatgataggaacgaatataaacatcatcaagaagttttccgcccctggggaaaatataatgtgattgatagcggcaaaaattacctcgttcgatgtatcactgttaagccgggtgagaaatttgtggcgcagatgcatcaccaccgggctgagcattggatagtattatccgggactgctcgtgttacaaagggagagcagatttatatggtttctgaaaatgaatcaacatttattcctccgaatactattcacgcgctggaaaatcctggaatgacccccctgaagttaattgagattcaatcaggtacctatcttggtgaggatgatattattcgtttagaacaacgttctggattttcgaaggagtggactaatgaacgtagttaa

SEQ ID NO: 400254 - DNA, 840 bp, Salmonella enterica
atgatttttaccaaaatcattaggggattcatcagatcgcagcaggcgatcaccgccagtcctatatctgccgccatggcggcgatgattggtttaatggcgccgttgggcgtctctatttcaaccattatgatgatttgcgtgcccgccacgttaatcggcgtagcgatgggggcaatagcgacctttaataaaggaaaagagttaaaagacgatccggaatatcaacgtcggcttgctgaagggttaattaaacctgcgcagaaagaaagtaaaaatacggtagtcacttcgcgcgccaaattgtcggtggcgttatttctgaccagcgcgatcgttatcgttctgttaggactgattccggcgctgcggcccatggtggaaacagcgaaagggctacaaccgctttcgatgtccgccgctatccagattacgatgctctcttttgcctgcctgattgtgttgttatgtcggccgcaggtcgatcagattatcagcggtacggtatttcgggcgggcgcgctggcgattgtctgcgccttcggcctggcctggatgagtgagacgttcgtgaatggtcatatcgcgttgattaaggcagaagtgcaaactctattgcaacagcatacctggcttatcgccattatgatgttttttgtgtccgctatggtcagcagccaggcggcaacgacgttaattctgttgccgctggggctggcgttaggggtgcccgcttatgcgttaatcggctcctggcctgccgttaacggctatttctttattccggtggcggggcagtgtcctgatgaatcccctaatgattttggtaaaaatcattaa

SEQ ID NO: 400255 - DNA, 498 bp, Salmonella enterica
atgggaaatatattatcctgcgttaatggaaaatggtctgttgtcagtaacctgccagttggttcacctgttccttggccttcaaatacagcgcctgtaggttggttaatatgcaggggacaatcttttaatactgccctatatcctcagttagcaaaagcctatccaagaggaagacttcctgatttaagaggagtatttattcgagggctggattcgggaagaggacttgactcaggaagagttattaattcttatcaggatgatcagattcaaaatattacaggtcatatggcggctgatgtatcacagagtggaaacatcggtaaatatgtgagtggcgctttcgcggatagtggtgcgttaggtgaaggtgatgaaggtcataaaagcaatgaagtaaggaaatatacgtttgatgcttcgagagtcgttcgggcaggtaatgaaacaagacctaagaatgttgccatgaattatatcgttcaggcacaatga

SEQ ID NO: 400256 - DNA, 396 bp, Salmonella enterica
gtgattgaactggacgacgaccagggatggcatttatacagccagcgaaatcctgatggttcgattgtctttacggtcaatggcgatatcaccgctaacacgcttcgtgcaggcggggccatctatcagaataacggcgacatctttggttcgctatggggaaatggctggttaagtacctggattaataataatctcgtcttagatgttcagttaggggctggcacatcagtgactacctggaacaatgcaggttcctggcctaacactcccggatatgtagttacctccgtctggaaagattatcagggcgaaaatattgatggtattaattatgcgcctttgcaaaaacgagtcgggagtcagtggtataccgtacaagggggaacggtataa

SEQ ID NO: 400257 - DNA, 219 bp, Salmonella enterica
atgattcacgaaaaaaacgctacttttgaatttcattccaaagctgggaacgagtctgaaattcagactgaactgaacgatatgaaagcaattctgctggcgatcgccttaaaactcgatgaaggttcacgcgcgcagttggtaaaggaattgaataccgttcctaacgcttccatccaggaatgggttaaaaatctttcaattattagcggcaattga

SEQ ID NO: 400258 - DNA, 219 bp, Salmonella enterica
atgaatttggaacaacgagtagaagcgttagaaaaggcggtctctaaactgacaatgcccagtacaacagctgaagaaatggctaatattatgcaggatgttgtggctgaggcgattaagaatgcgcgtcgtccgagtggtacattgcataaactggatgaaaaagcggctcatgctaacgccgcttataatgtcagcttaggtatcaattgccgctaa

SEQ ID NO: 400259 - DNA, 192 bp, Salmonella enterica
atggcaattgaaaccgaagttggcagtatcacagctttcgataatatgaacgggcagggtgttcttgcgaccgtcgaatttaaggactatgaccttcgccatgaaggtatccgcgtctttgttaaactccctctcgataaagacgcatcgctagcggaaatcgaggctcgggcaattgataacgccaggtag

SEQ ID NO: 400260 - DNA, 369 bp, Salmonella enterica
atggccttactaatttcactggttgtagtggcaggtctttactataaattttggtataagccacgtagagcgccgatcttgcgtgtgtgggggatcgcgccaaatggacaaagatttcgattgttgctgacagagcatggagaaaaagaggcagttttactgttcggaaagaaatcttttgttgccgtgccagatacgcagaacctttatggtgggtgttattatctttatttagaggatgctcaaaagaacgagcttttaattgagttaaatgaaagtgatttataccctggtggcgcaatagaatttcaacaaaacggcggtcggaagattaattgcgagatactaaaagtaaggtggagtcgttaa

SEQ ID NO: 400261 - DNA, 1497 bp, Salmonella enterica
atgatcgttaaatttcatccacgcggtcgcggcggtggcgccgggccggtggactatctgctgggtaaagaccggcagcgtgaaggtgccagcgtcctgcaggggaagccggaagaagtccgggagctgattgacgcgtcgccttacgtgaagaaatacacctccggcgtcctgtcgtttgcggaggccgatctgcctcccggccagcgggaaaaactgatggccagcttcgagcgggttctgatgcccggactcgataaagatcagtacagcattctgtgggtggagcacgcggacaaggggcgtctggagctgaacttcctgattcccaataccgagctgctgaccggcaggcggctccagccgtactacgaccgcgccgaccggccgcgtatcgatgcctggcagaccatcgtgaacggcagactggggctgcacgacccgaacgcaccggaaaaccgccgggcgctggtcacgctgtccggactgccgaaaacgaagcaggaggccgcagaagccatcacgcgcggactgctgacccttgcttcgtccggcgagctgaaaacccgtcaggacgtcactgaggcgctggaacagtcaggttttgaggtggtgcgcaccacgaaaagcagtatcagcattgccgacccggacggggggcgaaacatccgactgaagggagccatctatgagcagtcttttaacgctggcgaaggacttagagcagcaatcgaaagcgcagaagcagagtaccggcgagatgctgaaagccgcattcagcgagcacgagcagtctgtcagagcggaactgagcgcaagcgcgaggagaatcagcgacgccatcctcgcccacgagcagagtatgagcgaggcgatggagaaaaaccggctgagcgtactgcggactgccgggcggacatggctcaccatcctgatggtgtcagcgctgctgatcggcacgagcgggagcatactgtggtggcaggggcagcagataaccgacaattacaggcatcttcgtcagcaggaagataccctggcgaaaatgaccgcccggacgtggggagtgcgctatcaggagagcagcgacggccggaggtttcttatcctgccgccggggatgcaaaccgaagccatcccttacgacgggacgacatggatccgcctgaaacaggagtagcggaaaatgacagagctggaaaagcagttgctgagcgcattagagcagctacagcaggactactcgcaaaggctggacgaatgggagagcgccttcgcggaatggcggagcatgtgtgggcttatgcaacgggagaacgcggtgctgaacgagcgcgtgtcggacttgagcacgcaggtgctgagtttaagcgagcagctgcgccgcttgtccgggaactgaatgccatcgagctccggcacagggagaatgagtatcagaaaacactggagctggagcgccagccgcagaaaacctaccgcgggccgacactttaa

SEQ ID NO: 400262 - DNA, 180 bp, Salmonella enterica
atgaaaaactggattcatcataaggccaaaattatttttggatttaccctagctatatacctacttatatggctgacggtctcttatattggggtttatgtaacgtatgtagctgggccgattcttttagtttcaggtgttattttgtggatcactatgccaagcagtacaaatgaataa

SEQ ID NO: 400263 - DNA, 696 bp, Salmonella enterica
atgagcattgcggaaagggtcaaactcagaagggcggagcttggcttaacacaggccgagcttgctgtacgtgcaaaaacatcccagcaggcaatacagcaagttgaagatggcaagacgaaaaggccaaggtatttaccggagcttgctgcagcgcttggatgtgatgtcgcataccttcttggacatagtgatttcattcgtcatgatgatgaaataccaccggaaaataagtgtggggtggttgaatcatgggatagtaaaacacctctcaagaatgatgaggtggaagtgcctttccttaaggatattgagtttgcctgtggagatggacgggtaatggatgaagaccataacggatttaagcttagattctcaaaatcaaccttacgacgcatcggagcgaataccgatggttcaggggtaatctgcttcccggcaaaaggagacagcatggagccattcattcccgatggcgctaccgtggcaataaataccctggataaacgcattgttgatgggaaagtgtacgcgattaatcaggatggatggaaaagattgaaattactgtatcgcacagggcctgacaaactgagcatcaggagttttaacagtgaagagcatccccctgaagaagttgagcttagtaatgttgaggtcattggtcgtatgttctggtctgccatgttgtggtag

SEQ ID NO: 400264 - DNA, 213 bp, Salmonella enterica
atggaaacactttcttcccgaatcaagcagaagcgaatagaacttaatctcacccaggctcaactggctgagttatcaggtactaagcagcaaacaattcagcaggtcgagtctggtttgacaaaacgtcctcgctttcttgttgaacttgctcaggcgctgaacgttaccccgctttggttgctgtacgggaaccgcaaaaaatcatcttaa

SEQ ID NO: 400265 - DNA, 261 bp, Salmonella enterica
atgcgaaaaatcaccgaaatgcacaaagaagttaagcgttcacgattccttcagtccattgacaagaaaacatctttgcgatttgccgcagttgcccgaaccgagcttctgaaggcggaggccagatcgcttttaccgtctctaccggaagaaaaagggtacacattcatcccaaacttttttattgaaaagttgctcagggaagacctttccgtagagcagtttaacgatgttctgaaaatttttcgtcaaggaaggtag

SEQ ID NO: 400266 - DNA, 135 bp, Salmonella enterica
atggtaatttgtgatggttatcacacgacctttttgcttctctccatcaatggtgatcatcccctctttcacaaaaacctgaagcatccgctcaacctgatcgcggcttgctggcttgccatgcctgtcgcataa

SEQ ID NO: 400267 - DNA, 267 bp, Salmonella enterica
atgacgcttaagaaatttgatattgatgagtatattgcgcaggaagaagagttaaatagcgcaattaaaattgaagataatcatatagttattaggataccagataacgacttcaatgaggtatatgacattccgctaagcgatctggtagatgccgctggtattgtggaatggatttttcatcttgctgaaaaacaatggattaacagacatatgcttagaaggtttattaaaattgcaagtgctcacgctggcataaaactttaa

SEQ ID NO: 400268 - DNA, 258 bp, Salmonella enterica
atgaaagacatcgtaaaagtaataagttctagagttgagcttaaggtgcaaggcaaaaatttcattggcttatgtccatttcacaatgagaaaaccccgtcttttattgttaactctgccaaacagacattcgaatgcttaggttgcggtttcaatggcgacgctgatgacttcattgaaatgtacaacattctgaatgatgggttaagcatcattactaatgatgagattgataaatttacaggttcgacgcaatga

SEQ ID NO: 400269 - DNA, 870 bp, Salmonella enterica; identical to SEQ ID NO: 369741

SEQ ID NO: 400270 - DNA, 330 bp, Salmonella enterica
atgagcaatgagaaaacatcagaggaatcatttttcaataacataaaaagttccttgatcgagcgtttcacgacaccattatatgtatatgttatttcagccttctgtattgataattgggataagatattatttattatgtttggaaaagggaacattgagtataggacgtcgatagttcaaatgcagggcattaacttttggcaacctattgtttacggtataatcataaccataataatgccttttttatcaagagcgatagaatttttccatcttaagtcggacagatattatctgtactctttcctccaaaagggactctcgtag

SEQ ID NO: 400271 - DNA, 552 bp, Salmonella enterica
atgaaagatatgaaagctgttgtggtttttaccgggaaggatttgaacataatgagaactgagggggggtcaggctactggcatgccagaacagacaggctcaacaatgccgattacctcatagcagtaagaaacagaagggaaacgtgggcagtaaaagacctagaacacggcacagcattcctgatcgccaaaattaccgggtgttttaaaagccctgattacgacgacaggaacgtcataacctttgatgaatacgcagaaattcacacgccaaaagcatggaaaatgctaaccgatggtcagcgctatccggttgcttacctgagcgcacaggaagcttttttacgtattggggtaacaccggaacaactggaatggaagaaattccatccttcatccccatcggttcctaatacagtgattcctggtctggctgaagagaaaacagaaaaactctcccttaacgaggcaattgaaagagccaaaaaggatattagcaacgcaacagggattgatagctcagccataacaataagcatcaagatctga

SEQ ID NO: 400272 - DNA, 162 bp, Salmonella enterica
atggatagagaaaccctatacctactcaaaacgttagaccataacaatgccttgcttgacaatattatccgaagaaagatgggtaggtactacaacacgaagattttgcgtgattcctgtgatgctattgaagccgaactacgacgtcgaggaatcatttaa

SEQ ID NO: 400273 - DNA, 519 bp, Salmonella enterica
atgtcagagaaggcaaaaaaagtaggtaggcgctctctatcaaaaagaagagaaagtctaataaaagagctttggggggatgagctttccgaacttaatatatggaacaggaaagaacacgatggatttacaacaatcccaagaacattgaattatatcaataggataatcgattaccttgctggcgctggatctcctgtgtcacagacatacctcagtttatggtgtcgagtttttgacgagggattcgtcgaaattagggataaagatgctctggcatttgagtcagggtttagtgggcagcgagcggtgactacttggctaggaagaatgaaaaagctacgggagctgggactgatatcaacgaagcctggtacttctggcgagtttcattatgtaatcatgttgaatccactttacgtaattaaaaagtcatatgaatcaaatggatgggcaagggatgagcgttacaacgctctattttctaggatgcaggaagtgggggcggagtgggaatga

SEQ ID NO: 400274 - DNA, 564 bp, Salmonella enterica
atgaacgacatgaaagctgttcgtcaccgatataagcagagatatgattttgctgcgtcagaagtagtgggggcgtttgatgaacttagaagtttggattggagtttagaaatcgcatctttaagtgacgtggaaatgtcaaagagatggattggggctgttgatcctaacggtgttgcaagactaccacctaacggtggatgggactgggttaagctctacaacggctatttgaagaaccctagcgcattcgtctgtgccattaaatcagaaggcaagctatgcgctctgattggtggcggggtttctgatagtaaagtggtaactaagctgcattaccttgaatcagccccttatgacacggctctttcaggatatgcactggatatttctgttacgtatgttgttactgtcgcgaatgcgatgggaagcgaatactcagccatctatgagccaaatagcaaagtcagagagatagctataaatgattatggatttagcgaggacaacttgtttgggacaagtaaagatttcgctctgtatctaccaatgagccggatttaa

SEQ ID NO: 400275 - DNA, 204 bp, Salmonella enterica
atggaaaaacggcaacgccgcatcctttttcagcccttcctgatttccgctaagtctctttatccagccattcgtgagttggcaacgcccgccgcagtctcacggcaggagcgcagcgaccgagtgagcgaggaggcgtcatatcaccgtaacctccattttctcctgtacgccctgcagctgcatttttcccctgccacatga

SEQ ID NO: 400276 - DNA, 381 bp, Salmonella enterica
atgacttcaaatctcttgaagatattgaccgagggcgtgcggattgttgttaatccaggtggtacaaatcaggactatgttgacaagcatatcaggtatgcagatgttattcgcgaaaaagataatgatgccactctgcagaggattcgtgaacgcagcgctgatgtcatgtttaccgacttgctcgaaggtaattattaccagaacaaagagccaggtgtcttctgcgtatcaaccaggagtatcctccccgacactgccggtaataaagtctatatgatggcgaaggataatcagtatcttcttgacgctgtaaatagctggttatctgatgaaaacagaatcatacttgccagaaagtggcagataaatccagagtag

SEQ ID NO: 400277 - DNA, 441 bp, Salmonella enterica
atgaaaaaagtatattttatgtttgttatcttgttgtcactttcaggtattcattccgcgatggcaaaaccctggcaggagattaaagaaagcaaagagttacgtgtgggggtgcctggtgactatgctcccctcgcatttcacaacagacaaaataaattaatcggttttgatattgatatggcatattcactgggcaaagctctgcacctgaatatcctgtttgtacctagcagttggcctacgctgtcaactgacctggcagcagacaaatttgatattgcaatgggagggattacagaaactcccggcagaagaaaacagttcgcactttcttctccggtacttaaaaatgggaaaatagcgctgacgcaatgtaacaggattaatgacttcaaatctcttgaagatattgaccgagggcgtgcggattgttgttaa

SEQ ID NO: 400278 - DNA, 1257 bp, Salmonella enterica
atgggtattacgtcccgcttaaaagtcatgtcgttcttgcaatattttatctgggggagctggctggttaccctgggctcttacatgatcaatacactggattttaccggcgcgaatgtcggtatggtctacagctcaaaaggactggcagcgattatcatgccgggcattatggggatcattgctgataaatggctgcgcgctgaacgagcctatatgctttgccatctggtttgcgcgggggcgttattgtacgccaccaccgttaccgatccccagacgatgttctgggtgatgttggttaatgcgatggcgtatatgccaacgattgcattatccaatagcgtttcgtactcctgtctggcgaaagcaggtcaggatccggtaacgtcatttccgcctgtgcgcgttttcggcacaataggttttattgttgcgatgtggacggtgagcctgatggggctggaactgagcagtgcgcaattatacatcgcttctggcgcatcgttattgctggccctgtatgcactgacgttaccgaaaattccggtagccgagaagaaggcgaacaccacgcttgccagtaagctcggactggatgcttttgttctgtttaaaaatccacgcatggcaatcttctttttgtttgcgatgatgttgggggcggtgctgcaaattaccaatgtcttcggtaatccgttcctgcatgattttgcccgtaatcctgagtttgccgatagttttgtggtgaagtatccctctatcttgctttcagtttcgcagatggcggaagtgggctttatcctcaccattccattcttccttaaacgctttggtattaaaacggtaatgctgatgagcatgctggcgtggacgctgcgtttcggcttctttgcctttggcgatccatccccgtttggctttgtgctattgctgctgtcgatgattgtttatggctgcgcatttgatttcttcaacatctcagggtcggtatttgtagagcaggaagtggactcaagtattcgcgccagcgcgcaggggctgtttatgaccatggttaacggcgtgggggcgtggattgggtctcttttaagcggtatggccgtggattatttttctattgatggcgtaaaagattggcaaaccatctggctggtctttgccgcctacgctctggcattggccgttatttttacattgttctttaaatatcagcaccatccagaaaaactgtcgaccaaatcattagcacattaa

SEQ ID NO: 400279 - DNA, 756 bp, Salmonella enterica
atggcaactgcttacagtagaacagtgtcaggggtagaggctatcaaacggtctttaggcgctggtcgcgttgcaacggttactacagttactaaagatctcattaggcatcctgaatcaattgtccaggctcacttgtctcttggcctcaaggacatgtttatccgacctgttagtccctatgggtttgcacaaaaagcatcgttcacattttctatggaggaatacttcagtttctatgcctcgttgatagaagaaatccttaagatgaataatgaagggataagggttgtggaacattcggcctccattcatctgaaaaggatcttcaatcccggctttagtggttatgcggatttaaagtcgccaagcggggtcgtgcttaacagtattcttttcaattatgacggtcgagtatatggtagcgatgagagccgtatgttgcagaaggtgaaccctgaaacggagttcagtgcgggtgaggttaaaacgctatcattttctaagagtccttactataacgcagtgttgagttcatcgttcaattttgctctgccaggttgtgatacatgtgcatatcaaccattttgcggtgcagatccatgccagaacataagtgtacagggtgagcctgttggtgataggagtcgttcaacgttttgtcagtatcacaaggggatgttcaggtatctgatgaactgcatctcagaaggtggtccgaaggccgagatgctaaaaggatgggcatatgtctga

SEQ ID NO: 400280 - DNA, 630 bp, Salmonella enterica
atgaaaaaatttaattttgctgctctacttccgggatttttggcacttaataattctgtatgggcaagtgattcatctaccggagcaagtgatttgcctagtatgactcttaatgaacatgatttagtgatagcaccacttaacaccgaagttccattctacattgcagggcatcgcagtcatagctcccatcggagccatagttctcaccgatcatcatcaggcggcgggtactatggtggcagcactccttattatccaaaaacatacagctcaccaagctcatctggttcttcaagttcaggaacaagttcctcatcgtcctcttctgtgcgttcgcttcgttctaacgacaataattctactactacgaattcagttggaactacagaagctaaccgtgcaagtaatgggctgacttctggtacagagaagcgtaagcgcttaatcatgcgggtccaattcgctttgctggacaacggttattacaacggaaatattgacggcataatggggccctccacaaggcagtctataaaaaattaccgaattgcaaagggactaccaacgcctgcaactgaaacactcgatcctcaattattgaactcattaaatattctggctcggtga

SEQ ID NO: 400281 - DNA, 1245 bp, Salmonella enterica
atgaaagggatgcaaaaaatccgcagaggaaagagttttgctggtgtcgtcctctatgcgttaaagccctgttctcatcataaaaaagaccctatcgtaatcggtggaaatataacgatagttggcaatcccgctaaagatctgatcgctgaatttgatagcaccaaacagcttcgccctgacgtgcaaaaggctgtttggcacaactcgcttcgcttacctaaaggtgaatcactaacggctaaacagtggtcctgcatcgcagatgactacatgacaagagtggggttctctgaaacgcatctcagatgctacatcctacatgacgacgaagacggccagcacatccatatcatcgcaagcagagtttctcttgatgcaggaaagctctacctcggcaagaacgagaatctggcaagcacaagaataattcagcaacttgaaagagattacaatctgacaagaactaaaggaccgaaagcttctccagcagcgccctcacctaaaccgaagctcaaaaaatcccgtaatgagctgatgatagaaaagagaactggtgggctatgcccaaaagcaatcatccaaaacgcccttaatgaactgcttgataccaggcaatcgattaccgacttcgctcaacagcttatggcacaaaatatcaggccaatccctaacattgcttctgcgggtaagatgaacggtttttcattcgtatatagggggattgctttcaaagcttcgcagctcggtaagggttattcttggtcagcgttgcagaacaaactcaactatcgaccggaacgtgataatgctttcctgtttgaattgaaagcatctgtcagtgaagcgccttgtacgttcattgctacagatgctcctgaaatcacaacaagagaagttcacagccccatagaagcgcttatccataataaccgtgctggtcaggacgaacacactaacgcttctgtaaagcagtttcacttagaagatggtgctggtgctaaagaatcgttaaaagaagcccccgaccgaagctatgcagtttcagcatttaggtggttggaatacatcccctacctcgatttaatttatcgtatgttgaaaaatctcaaaataccaacccttaaacgccctagaaaacacaaaaccatcactggcgtgagagtggtagaaattatgcctatcccccaaaaaaatctcatcgaatcaccacctcaatccagaagagcatcgctttcgatgtaa

SEQ ID NO: 400282 - DNA, 498 bp, Salmonella enterica
gtgttttggaaagaatatgaaaagcaaaggaaggaagctgataggtattataagggacttaaagataaaaggaatgctaaaaaatacctgacggttttcttttttgggatgccggatgaaaataataagtttctatttaagacaaaccactttaaattagtatatgtggctttcttgggtaaatttgaaagctcatataatgatagtaattattacattgaaaatgatctgtctgtatcatcattgcatgaacaacccatttcattatctgatatagtccataaaaatcatgaatataatattgaaacttcattagattttagttctcctttgcaagagcaagagcaagagcaagagcaagagcaagagcaagagccagagccagagccagagccagagccaataaaatcctctttaaaggaaaatactgagactgtagaaatgaagagtaaagtttgggggaggctgaaaaagataatcactttctttaaaaagtga

SEQ ID NO: 400283 - DNA, 165 bp, Salmonella enterica
atgcacatgtcattttttcaaatatggtttatagcgattagtgttggcgttctaaccgctttattaaatcgaagcttttatatgagaaaaattgaaaagctaagtaaacttaatcaacaacataccaatagtaaaaccagtaaagaagaaaatattccttcctaa

SEQ ID NO: 400284 - DNA, 2826 bp, Salmonella enterica; identical to SEQ ID NO: 371495

SEQ ID NO: 400285 - DNA, 444 bp, Salmonella enterica; identical to SEQ ID NO: 371496

SEQ ID NO: 400286 - DNA, 339 bp, Salmonella enterica; identical to SEQ ID NO: 371497

SEQ ID NO: 400287 - DNA, 357 bp, Salmonella enterica; identical to SEQ ID NO: 371498

SEQ ID NO: 400288 - DNA, 417 bp, Salmonella enterica; identical to SEQ ID NO: 371499

SEQ ID NO: 400289 - DNA, 714 bp, Salmonella enterica; identical to SEQ ID NO: 371500

SEQ ID NO: 400290 - DNA, 1194 bp, Salmonella enterica; identical to SEQ ID NO: 371501

SEQ ID NO: 400291 - DNA, 1080 bp, Salmonella enterica; identical to SEQ ID NO: 371502

SEQ ID NO: 400292 - DNA, 1416 bp, Salmonella enterica; identical to SEQ ID NO: 371503

SEQ ID NO: 400293 - DNA, 984 bp, Salmonella enterica; identical to SEQ ID NO: 371504

SEQ ID NO: 400294 - DNA, 243 bp, Salmonella enterica; identical to SEQ ID NO: 371505

SEQ ID NO: 400295 - DNA, 999 bp, Salmonella enterica; identical to SEQ ID NO: 371506

SEQ ID NO: 400296 - DNA, 1311 bp, Salmonella enterica; identical to SEQ ID NO: 371507

SEQ ID NO: 400297 - DNA, 516 bp, Salmonella enterica; identical to SEQ ID NO: 371508

SEQ ID NO: 400298 - DNA, 213 bp, Salmonella enterica; identical to SEQ ID NO: 371509

SEQ ID NO: 400299 - DNA, 129 bp, Salmonella enterica; identical to SEQ ID NO: 371510

SEQ ID NO: 400300 - DNA, 1326 bp, Salmonella enterica; identical to SEQ ID NO: 371511

SEQ ID NO: 400301 - DNA, 609 bp, Salmonella enterica; identical to SEQ ID NO: 371512

SEQ ID NO: 400302 - DNA, 369 bp, Salmonella enterica; identical to SEQ ID NO: 371513

SEQ ID NO: 400303 - DNA, 2421 bp, Salmonella enterica; identical to SEQ ID NO: 371514

SEQ ID NO: 400304 - DNA, 582 bp, Salmonella enterica; identical to SEQ ID NO: 370530

SEQ ID NO: 400305 - DNA, 198 bp, Salmonella enterica
atgtttcgatgtctgcacacagtccatgtccagcctgtttgcatcaataatgctggttggagtaattatgaaaataatattaatactggatgctatatcagccgtttctgtgagcgtaagcgtggcgtagaaaattttaaatatattagtcggttaaaaatagctattgacattgaaatggtgatggagtgtatatga

SEQ ID NO: 400306 - DNA, 1113 bp, Salmonella enterica
atgtctgaggttattaggaacgatatctttcattttgcttcaaaaaagaatgtgcccacggggttctatcggttatgcaaacaaaaaccaatgaaccctttattctttttgcccaatttactggtagttgctgaaggcaataatgatgccattcaaccatactttgatttctctgttattagcactgaattatatgagtcaattgaagatggagatattgggataatcaacaatggcaatatgatacgcgtaattctgtcccgcagagccaatcataatactgtcttagtaacggaacgctgcaataacttgtgtctgttttgttcgcagccaccaaagaaatcaaatgatgactggctacttacccaatcagctcttgctatagcttcatttggtttggatggagttgttggggtcagtggcggagaacctttgctgtatggagatgatttccttcacttcattgattttatcatcgagaattcaccagatactgctttgcatgttttaacaaacggacgcaaatttgctgatatcaactttactcaggaaatggcaaagcgaagcaaaaagatcaaaatcacctttggtatcccgctctactcatcaagaccacttgtgcatgatcatctggtagggagcgatggcgcatttaatgaaacggttaaggggttaatcaatgcaggaaactcagggattaatatcgaacttagagttattccgacactggctaactatacagaattggatgatattgtagagttcgttggccgagtgttctccaacattaatcagatttcccttatggggctggaatctatcggttgggcacgaaagaactggtcaacaatcttcattgagcacagcagttatagtgagaaaataacctccgccatagacgctgcacacaggtcaggcatacctctaacaatttttaattatcctttgtgtcatcttcctgaaagagcttgggagcttgctgctcagtcgatctctgattggaaaaattactatccgaaagaatgtgatgaatgcactcagaagtcttcctgtgctggttatttcagttcctcaacaggccgttttcatcaaccaccgagaccaattttatga

SEQ ID NO: 400307 - DNA, 201 bp, Salmonella enterica
atgactggctgggatgagatagataaagaggcaaaggaatggcgtctcccggcttgccgtatgaagatgaagcgtgagtacgtcgttctgctttctgaacaggctctggtgattctggaaagaatgaaccccatcactaagcacagagaatacgtttttcctcctggctatcgtaatccacttgaaccgattaacagttag

SEQ ID NO: 400308 - DNA, 321 bp, Salmonella enterica
atgagggctaataaagcaaattggatttgtttcagtattttttttattctattcttcttaataagattcatttcccttagtttaaatttccatttttcaggatttgttttcttagcagcattcatttatgggctttatacatatatagcggtgctcgacaaagttaacaatctcgaatctgataataagattgtcaaatttttacatgccgagaaaatcatagctagcctaaaaaaaggaaatgagattggctttttaggaaggaatattttcttctttactggttttactattggtatgttgttgattaagtttacttag

SEQ ID NO: 400309 - DNA, 198 bp, Salmonella enterica
atgattaagcgcttacgcttctctgtaccagaagtcagcccattacttgcacggttagcttctgtagttccaactgaattcgtagtagtagaattattgtcgttagaacgaagcgaacgcacagaagaggacgatgaggaacttgttcctgaacttgaagaaccagatgagcttggtgagctgtatgtttttggataa

SEQ ID NO: 400310 - DNA, 489 bp, Salmonella enterica
atggatttagacaagattacggaaataaaaagaattgagggttttctatctgatttaacaacagattttttccatatgaaaaattcagtcatgtcaaagctattaaaacgctttccttcaaaattcgatgttagatcagaaaggactaacagctatatagagcttaatgccagaagattcagatatacattagggagtcgactggctaatgaaggagcctcaattgaggtgattgctaaagcgttagatcataaatcagcaaactcttctatgatttatataaaaaataatcctgacagtgtttatgatatcgataagaaactaagtgcattttttaaccccttatctaatatacttatgggcgtagagattgaagaaaacaagaacttttttatcaagtatgttttagattcatttttattattagaagatacggaagaggaatttaaatgtttatcttgtaaaaaattcaacccctggagagtataa

SEQ ID NO: 400311 - DNA, 537 bp, Salmonella enterica
atgttaaaaatagttatgttttttttgatgatttttccctgttattgcttactagggaatattaaaaatataaaagattgtaagttagaggatggtaatagagttaaattaatttcattgcgcactgttgatggtagtacgccatacttaatctttgacaatgttattgttagcgcatttcttgatggtactatctattctggggacattatcctctcaaaatgtatccatcattccctcatttttgcgctgaattacggcgctccttatatgaaaggctgtttgataacgggggtgagtgtcagtgctgagagaaaatatcaacccaatggtttttgttttgcagaaagaaatattccagagtctgtctggtttggtgaagagcatacgttaattattattaaaaatgataatagtgttggagagtggcgtggtaagtatattatctatgatagccgtggggatgcagttcaaacatttaataaattgcctgatgctaaaaattataaaatttatcgattagatttgaataaataa

SEQ ID NO: 400312 - DNA, 177 bp, Salmonella enterica
atgaaagttagatttatattattcgtcatgctattttttctgggagggtcgtcaggttatgcgaattcagaaaaaagcatttctgaagaacttcttagtataaaaaattttcacttgctgagtgtattgaaaaaaattatgaaaaaatgggcgttgtttttactaagctacctttaa

SEQ ID NO: 400313 - DNA, 309 bp, Salmonella enterica
gtgcgcgcttcctggaacgtgcttagcgtgaaggcattacccaccccatcgcgctatcaggttaattttcagggttactggttcggtttaagggggatctacttcggccccaatatcggcgagttctccgcagcggtaacgctggaaaacgataaaaccatcgtggcgcttcgggaaggcgatgacattcactgtgacatttcactggctttttcttctgaaaccattgatgccagcaccgatacgtttgtgagctgcggttttggcgcaaatgtccgcgccgacgggcactatttgcgcgttgaataa

SEQ ID NO: 400314 - DNA, 1287 bp, Salmonella enterica
atggtaccagtaaaccggagttcgttgccggccgacagcatcattgactatacgcttgcccgaatgcaggaacgtctggcaatgcgtaatgatgcacagtcaggtcaggagcgcagcggtctgctctttatggggaatgtgcacgatgcctatccacgggcactgcttctcgacacccgtctgtcaccactggataagatcgcatggatgatgatacgccagtacgccctgcagaatgacggggcgattttcccttcctatgatgaactacagcaactgctggcttcaccggggtcagggctggcttcacgtgatacggtgagtcgctcactgacgatgcttcgactgacgggctggctgagtctgtgtaagcgggtacgcgattcgggggggcgcgtgcgggggaatatttatgctcaacacgatgagcccctgagcgcgaaggatgcggagatgtttgatccgggatggctggatatggtgggtaaagcctgtcaacacaaatacagagaggttcgggatacagcctgtcgggttctggacgggatactggatgacccgatgatgcggcactggcactcacgcatgacggaaatcgcagagcgtctgagtcgcccgtcaacggccactgaagttgcccgcattcagcagagtccgaatgccggactgagtcctgcgcgcctgaaaaatgagcaaaaatcactgcgtccggtaaacagatttagtggcgcgggagggagtagacccccgagtcaggatagcggactcagtatcaaatcaatgagttatgacaaagtccggcaagcggactgtaataacgtacgttctttcacacaaagtgtgattaaaaaaacgtacgtatctccgcaggccgataaaaaaccgttaaccgggatacccgagggttttgtgtggcctgacggcctgcaggacatcctgcctgaaaatgagcagccgatgctggctcaccaactaaaccaactggcacagaaatcaccgtctgtggctgagcagattgccatcagcgtggtgaatggctggcgccagaagcgcatcagcaacccggtgggctacctgctggctaccctcaaacaagcgagagaggggaagtatcacgtggaacctgctgcgcctcagcaaatccctgccagacctgtcgtacaggtcgactcatccactgaggtaaacatccctgcatgttcgaccgaacctcacatcccggcaggtcaggagaccgtaaaagcgatggtggcgcagattcgtcagcggctgaattgttctgcataa

SEQ ID NO: 400315 - DNA, 225 bp, Salmonella enterica
atgaaactattttctctggggcctgtatccttgttcgactttggaattgccactggtgtgatagctgccctgttgggtgtcttttttacttgccgtattgttgtcccgcctgagccggaaagcgtttgtgagctcaaaaacacaccgcagggtaatacggcgcctgaaaaacagatatgggcgctgtgtgagaaagagcgcaagagaatcaagcagacccgctga

SEQ ID NO: 400316 - DNA, 594 bp, Salmonella enterica
atgccaaagaatagtgttttcatctgtggcgttgtcctgatgacgctcagcaccggtgcgttcgcgcagcccacgccggcgatcactccgtccgcagaggttgctcctgcagcgtctggccgtgaacctgcggcagccgccgtgccgtcgacgtcgaccgcagacacctcagatattgtcccgattaaccccggtgatggtctgacgggcgggcaactggaagtgctgcagggtaaaaacctgcttctggaggcgaaggttcaggcggcccggctgcaaaaagaactgacttctgctctgacgccggcggaagtgggcaatgtccctgcggccggtccgtttgctgtgggcatgcctgctgatatgggggcaacgcccgttcaggctgctccggctcctgcccgggtgccggggcggatcactgttctggaggtgagtggccgtggaaacgcgctgcaggccacgctgtcatttccggatggccggcaaagccaggtacagacgggcagtgtggtgccggggacgtcgctgaaggtgaaggcgataacactgtcatcggtcacgctcagcgacggtcagcaactgacgttttag

SEQ ID NO: 400317 - DNA, 168 bp, Salmonella enterica
atgtctgacaccgacctgacgtcagagaaccctgtactcacgccgcatgaccttcagatattgcaggggatgctccagccagcatcagaaggattgctgactttatccagtctggcgccggtaaggcccaaagcgccagagggtatttcaggggaatcacatgtctga

SEQ ID NO: 400318 - DNA, 1086 bp, Salmonella enterica
atgagtccgttttacctgtttcgtcgtgcactggcgcgccgcttttttacgtccggataccgtctgcggttttaccgaatgctgtcgttacaaatgagaaatggcgtgaagctgttagacgcgctggagcaaatcagcaacatgtataccgattttggacgtcggacgcacggtttcggttttctggtggacgactgccgggtggcactcactgataacagcggggataactcccttgaacatgctctggcgaactgggtcccggccgaggaggcggcgcttatcagcgcggggatgttcagcggccggttaccggaggcgctcgctgaggcggagatcctgattgactgccgccggcgtatccgcaacgcggtgctcagaatgtccatttacccgctgggctgcgcgctgatgctgctcggtaccctgctggccataaaaacagagttaatcccaaccctggccggaatgtcagatccacagtcctggtcgggggcactgggtatgctgaatgacgcgctgctttttttttctgagcacggcgtggtgacgggggcaggtctggcactggtgttggtatggataagatggtcgctgccgaactggatacgtccggaccgcctgcggcgtctggcggacagacgcgtaccctgggcggtttacagtgatattcagggtgcgatttttcttatcaatatgggggcgctgttgtgcgcggaggtcaaaaccctgacagcgctgcaggttatccagcgttttgcttctccctggctcaccgttcgtcttgatgcggtgatgcaggaggtggaggaaggggcctctttcggtatggcgctgcgcgaatgcggttatgccttcccttcaaaggaagccgtgaactatctgtctatggtggacggtgacggtgcggcgcagatgattgcgcgctttggccaggagtggctggaagaaacggtgaagcgagttaaccgacggggaatcgtggtgatgctgctttcgatggtgatgttgttctcgcttattggcgtggtggtcgtggcggtgatggaggtgaattcaatgacccaaagtctggggcagtactga

SEQ ID NO: 400319 - DNA, 291 bp, Salmonella enterica
atggccggacaacgttttccctgcggctcctatcccggacttgctcgtgtataccctgggtgtgttttacccgatcttcggggggcttttatccggggatgggataatggacgaggttttgataacggaagaacgattttgagttatcaggctgaccagagcgatatgatctataacccggggggacatcttcagggacatcacagtgggatggcccattattatcatactgacagtcgcgaagtcaggcccaaaaatatcgcttttaattacattgtaaaggccggttga

SEQ ID NO: 400320 - DNA, 468 bp, Salmonella enterica
gtggcgtatgtggtctttgtactggtctgtctggcgctgtactgcccgttctttacgttaattgcgctggttacaccctggaaaggatttgcggtgttcagtgtgaagcaccggcaccgtcagtaccgggctgttcatcttgcattactggaccgggtgggaaccatgaatcgccgtcgtgcaaggcgttatcatcaggcatttgttcaggcgctggaggaagccctgacttcacggccggtgcggcccgttttttttcgctcacaccttatgcggcctgctcaggtggcgcttgcctgtcaggttctttctcaccgtgctgaatatcgctgtcgtattgtacctgtgacgctgccgcggtgggagcgtactgccatcgttgcgcagatgctgttacaggagtggcggtttgttcggttacctcccgctcatgcggtcatggtggtcattcaccgtttgccgcaataa

SEQ ID NO: 400321 - DNA, 876 bp, Salmonella enterica
atgaatgcaacttatacagcgttaattgcattaatgcgatcgggtgagatctcaatggaacccggagagtctttgccggcatccagtgcgcagttttcggtcagaatacgaccagaaagtcgggtgtttctggaccggtgcgccgagcatctgggcatttcccgtgcagccctgtttggcctgtgtatcgatggtattctggctgaggtgcgagggagtatcgcggacagagcatccaccctttatgagcgattctgcctgctgatggatgcgcatgggttgaatgttgtcgagcaggcacagttactggcttcctgggggatccggaccagtgtactggcgagtcaggatcgtacgctggacctgcttaataaacccttactgcagcaattgtcgacctggtttgatgtggacgtcaactggctgctgggtgactcatcttatcccgtcgatatggccgacgggttgcgggactggagtatgcagacgccttcaattctgtgtcgccttcagtcactgcagtcagaagaccctattgagttgatcttcttctggcaacaggggcgccagccccacaatgtgggattgtgtctgcgttatcgccccgttatctcaggagagccagtcacactgctcagagtttatcagtctctcgactggcgggatgaacaggtccggcaggcttataaccagctgcaacgcgtaaccagtatcaccccgtccgggcatatcaaagagaacgtggaaaagtatccgcctgtccggatgcgctgcttctcattttcagcccgacaaatgcaggcattagacaacggggaaattatacctgtcatgatatttaataaaccactgggggaatatcctggaattccataa

SEQ ID NO: 400322 - DNA, 1197 bp, Salmonella enterica
atgaaatttaatgctcgtcaatattctctggcgtctatctctgttcttatcgctttatcaggaaccgcccattcggcaacaacgtatatggaggctcgaaatgatgccatggggggaaccggtgtggcatcgtctcattacggaacggcagcgctggcaaaccctgcgttgctgactcactttggcgcatctgatgatttcagtcttattctgccgtctgttggcgcgcaggtatccgatccggaccatcttcagaatggtgtggatgacgttaaagatgcctgggatcgttatgacaatgaattgtcaccgggttcagcagctgatttgaagcagcagcttttgaaattcaaaaacacgcatgccagtgcgcaggccagcgtgggtattgtggcgaccgtaccgaatcaagtcgtgccttttgcactcatggttaaatcgtggggaacggcatcagtggacggcaaagtcagcgaccatgacctgcagtatctggatgatgtggccaacggcaaaattatcccgactgacgctgaccgtgactcgctgacatcccgtgcctatggccgtgccgcggtagtcagtgatgtggggatttcgatagcccgcgagtttggtactgacggatttaaatactcagtgggcgtaaccccaaaataccagcgcgttgacctgtttaattacaacgtcactgtacagaactatgacagccatgatttccgcagcagtgactatcgcaacacttccaccggatttaacgccgacattggctttgccacagacctgaacgctaactggacactgggcctggtggctcagaatattgttccgcgcagtatcgataccaaagaagtcaacgggttaaaagaaacgttcaaaattcgccctcaggcgacggctggcgcctcatggcacaacacactggtgacaacggcgctcgatgttgacctgaccccggccagtggcttcacgtcggacaaaaaacgccagttcgcttccctgggggctgaattcaatgcctggcaatgggcgcagctgcgcgccggttatcgccagaatatggccacctcagaaggcagtgctttcaccgccggtattggaatttccccgtttgatgtaatgcatcttgacctgaccggactggtggggactgaccgtacgtatggcgcggtggcacagctgagcgtgacgttctga

SEQ ID NO: 400323 - DNA, 522 bp, Salmonella enterica
atgaaaaatacaatcacttttgcacctctggcactggcatgtcttctcttgtctgcctgtagtcacagtcatgaccagacagaacaaccgtcgacagaatcatacctctcattgggtgaattcccggccagtcgtgacgttgcaaaggatatccctgtagcgagatacgatgaaatattcatcacgaaagacgtgagtacggataaccgaaaagacggacagattatccgtaaggcgctcactgagccgtttcgtgtggggcttcaggcggtagcgacgcctgtttttaatgcggacggaacttcaaagatggtactgaaagggactttcaactgttttacaaggcagtattcgccgtcatctgaccctcagatgtcaatacacttgacccgcacctacaacttgttgctcgaggagaaggcacatccgggtgacaggctggctgttcgcattcagggctgtacaaaagacacaaaagaaccgccggtaatgctggtcaaagaggtaccaccgaatcactaa

SEQ ID NO: 400324 - DNA, 273 bp, Salmonella enterica
atgagtcatacagaaaataacgacaatttgctctgtacccgtattgaggcgctgaagctgacagcagttcaggacagtataaagcaggttattacagggtttgtcgttgaagggcaactggatatcacccagttaaaactgcatgcacatttgttgcgaaaaaaactgcaggcggaaggtaccacgctgaaaaccacgcatgcacaggagctggttgcctgtaagcatggtttcaggaactggcaggcggcgattgtcgggctgaagccgtga

SEQ ID NO: 400325 - DNA, 921 bp, Salmonella enterica
atgacgaccacgacggcatctactgtcgatattccgtcagataatgatttaactttatccgcgcaccttactgaacccgccgaaccgaccattgacatgccggaaatcccggtcgcaccaggcaattcagcgcagtctgccgctcagagactgggcggcaaggggggccatagctggccaccttcttcagaccaacgctctctcatgcttaaagtgctctcagttctggtgttctgtgtactgctgggcgcagtcctttttctctggttcaccgtgcgtcagcagcagatacagctgacgacgctggatgcggcatttcgcagcggacagctgcagacgctccctgaccgcatgcaggctattgaagacaggcagcagcagtacgttctcaaatctcagtccgaaaaatggcagcagagcctgagtgagcaggcgcagagcctcaccacgtttcagcagcaactttcctcgctggccacggatgttaaggcagcccgggccgaggccgcaagggctgttgccgggcaggatgacacaggcatgaaactcgacgcgctgcagaacgcgcttaatacgcaaacattgcgcatcgatgcgctggagacctggaaagaagcatggaataaacggtctgcgcctgccacgaccaaaacggttcaggccccgggagggagcccgtctccggtaaaaaaggagtcaaaaccccggccccgtaaacttacgccccccttcacactggtgagcactgagcttcgggggggacagacctatgccgtgattttacctgccggggaaggtggctgggcgcagttgcggatgctgagtcctggagactcagtatccggctgggcactggtgagtgtcagcggtaaccacgcagagttccaggtcaatggtcaggttcagcgtttaacgctctga

SEQ ID NO: 400326 - DNA, 741 bp, Salmonella enterica
atgaaatcggtgatacacaagcgcaattttttattcacctgggggctgttagccacggtgttggtaggcgtcggacagacagcgctggcctctgtcagtaccggcaacagcgtcacggcaccactgcagcagaataccaccacggaaggtcggatgcagacttccggtacggcatggggactcagtgataaagagtggcagcagtatcagcaggtgttaaagggcccacgggccacccagtctccgggcatcgatccgctgatggcgctgggtctggaggcaaaatctgccagtgaacgccgtcactttgcggaaatgtgggtcagggaggagtatgcacgtgttgaaaaggagctggcctttcagcgggaagtggatgcggcctggaaacgtctttatcccaatacgctctccgtcaacatggggaatgccagcggcattgcacatgacacgcagggaaggctggcgttatttgtaaaacaaaactgtgttcagtgcgatgccagactcagtgctgttctggcggataaccgcccggttgatatttatctggtcgacagtgccggcagtgatgacaccattcgccagtgggcactggcacaccatattcccgttgataaggttcgtagccggcaaataacccttaaccacgataatggtaactggctgaagtacggtcaggggcgtatgccagtcgtgcttcagcagggagcatcaggatggcaaatagcagcgttctga

SEQ ID NO: 400327 - DNA, 690 bp, Salmonella enterica
atggcaaatagcagcgttctgaatacgtcccgacaaatacttcctgttttgagcctgctggccgggttgctcggcagcacagttactgcagcaggggaggggcctggtttgcagactatccctcccggctaccatctggtggccagtgaaattggcgttccggctgaggcattgtattcggtctctctcgcagaaacgtcccgaaagttacctcatggtgagcgcccgtggccgtggaccctgaacgtcgccgggaaagggtaccggtataacacccgtcaggaggcgtatgacgcactgttgtccttcatgcgtcgctatccgttaaagcgcatcgatgtgggtattgcccaggtcaatctcggctggaacggtgcctatttcagcagttactacgaggccctggagccctacaccaatctgcgcgtggcagcccgtattcttaaatcctgctatgacagcaatccggggagctggatgcaggcagccggatgttatcaccatcctgccggtggaaagcctgccagaacctataaggccatcgtgaaacgcaagctggccacactggatttgagcacacccgtctcctacgccgaacttcagctggcgcggataccgtctccacaacgtcatttattaccccaaaaccgtgaactgcaatgggttgaacccagggagtctcgtcagtga

SEQ ID NO: 400328 - DNA, 531 bp, Salmonella enterica
gtgaaattgtattccgttggtttttatctcagaactctcgttgtcagtgtgcttttgaccacatcatcgatggcggcactcaatgtaattgctgatctgggcggtgagtcaacggcaccgctttttgatgccatcaacaatgaaaataacgagttcacaccaccccgctccctgagtgctgaacctgccccggcacctgctgatatcagtgacatgctgccggtgaccacgccagagatgagtgcagggaaggtggtctcctgtgaactgcatcttgccggtatgacgccggtctttctggtgggcgatgatcagttgtcgcgtgaatggctgacattgcgccatgacgagcttaagcgacttcatgctaccggtctggtggtgaatgtcagcgataaagccgtgctcactgaattgcagcagcgggttcctggcgtgacgttgttaccggcatccgccagcgaaattgcgcgccggcttcagctcagtcattacccggtactgatcacctcgaccgggctggcgcaatag

SEQ ID NO: 400329 - DNA, 528 bp, Salmonella enterica
gtgtttcatcgttgtcgcggcgagggggggcggcgaacggtatcaacccgtgtccgccggcaccgacgttaccgcaaaactgcgcagcgggtacttggacgtctgccgcaactgtcctctgacggggcgcgtctgagctatctgcggaaaatcaacccgtatgtgtttgaagagttgctgttactggcactggaaaaacagggactggaggtcatcagaaatcgttcctacagcggtgatggcggtctggacggtcaggtctttattaatggtgagcgctggctgattcaggccaaacgctatagccggagtatttctccccagcatattcaggcatttggcaagttacttgcccgggagggctgtggcggttttttcattcacacgggacgtaccggccacatgagtcggacgctctgttcagcctctccacgtcttctcatcatcagcggtcagagattgctggatctgctgtccggggggctgacgggatgtgagacgcgacagaccgtgtgccggaagcgttaa

SEQ ID NO: 400330 - DNA, 234 bp, Salmonella enterica
gtgaaaattacaactattgctgttttattgatgggcctgtcagccactgtttcctgggccggcgatctggctgcacaacaagcagcacaaatgcatcaggaactgaggacctcaatgcagaaaatgcatgatgatatgcataagggaatgatgagcaatgatccggatgcggcatttgcggccgcgacgttaactcatcatttaaatctactaaatagatttgggcaaagttaa

SEQ ID NO: 400331 - DNA, 1134 bp, Salmonella enterica
atgaatatgtttaaccaaaccgaaaatgctgccgacagtacaaatgttcaagtagaattagttgatacatctattgccccctctactcaatactggatggttggtattggtttattagcagtcagaattattcaggggtttatctactggggaggggggagtcggcggtttatttatgctcctgataaacttaatccggatgctcctcactggatggcgtacaagttccagaccgcgatgccaggtgctttgttggggctggagcatattatttcctttatgttgcaacatttctggctattatatgctggagttatcctgtttagcgcagctgagcttattgcggggttatttctaatgctcgggctctttacccgaatctcagcgttgctttctatgcttttctctgtgttactgatgctgatgtttggctggcagggtgccacttgtatagatgaatggacaatggcggcgtgcaatcttgcaatgggaacgacgatatttctctgtggttcacatgtttatgctttcgataatatcattctgaagaagaagccacatttgacaggtagtcgggtatttaactggtgctgcggttcgcttcccctgcctgtaagtcctgtcgcttataaaaaactggcgttaggtctgttggtatttgtcgtggttttcgatgtagggacttacagttactatcgtggctctgtagtgacaccttatcatcacggcccggttagccctacaacacatcatattagtctcacgaatggaaaacttctgtcagacgggcgggtcactgtgcatgcttatctagatgcgggaacaccagaggctcctgaacacattatggaagcgtggcttaaaacatccagtggggaaacgattatgtactgggatacggcgatgttgtcttcattaccacaagacagcttccggaatgattatgattataatcagttttctgtaagtcattatgggatacaggctgtagtagggtctgcggcaacgattgtttttcctgccggaatactaaatgaagatctggacagattgccggatgaaccattgaaactcgttttgattgatacagaggggcatacattcagcacaatattaagtcgggggaatgagtaa

SEQ ID NO: 400332 - DNA, 1800 bp, Salmonella enterica
atgaaaagtctgattaaacgggcgtgctttgctcgtgctaaaaacgtacgacgggctactttcctgttctcccccttggtcctgctggtgtactccggtatagcctcagccgtttccccggtttccgtgcccggtgcggggacgctgggcaaccagttacgccaggagtctgtactggctccgaaagcgcccgtgaacgccccgctggtcctgccggaagaggggacagcccgccggtcgctctcgggggataatcataccatggttagcgtgaaacaggtggtgttcaccggtaatccgccgggactgaagggcctgagtgagactgacctgcagcgtgaactggccgtcgacctgaaccgcccgcagacctttgccgggctggaatccatggcacaaaaaatcactgccctgtaccgccatcacgggctgctggttgcccgggcggtcctgccgccgcagacgttgaaagacggtgtactcactatccggattatccccgggcgttatgacagtgcgcatatcagcaatacctcttctgttagcacctctgttgcgcagcgtctggtcagcaccaccacaccgcggggtgacgtagtgacccgtaagcaactggaacgtgaagcgcttctgctgggcgaaattccgggcgtcaatgcacaggtggctatgaagagcggcagtcagcctggtacgactacgccagatatcacgctgactcaggggaagcagtttgggggttacgttgggctggataatcagggtgatccgacgaccggacgtagccgggtgatgctcggggaatatgcgaacaacctattaggactgggcgaccagttgcgggttgacctgctggatgcgtacgaaaaaagcgacctgttcaacggctcgctggactacagcctgctggcgggcggcgggtatggcacgcgcgtcggcgtcaactacagccatctgaactaccactacaacctgagcgggctgggctttaacggctattcggataactgggggctctatgtcacccagccgtggatacgtacctcgcgggcgcgcgtggatgttcgcctgaatgccgggcagcagttcctgacggataaatatccggacgtttttgcgagcaacagcagcccgcgaggacgtaagcaggtgaatatcggcagcgctgccattaccggttccgtcgcggaccttcccggtggcctgaccggttttggccttgtcgggaccaccgggaatgtcgggttgcgtagtgagttctcccgtgatatttccggtgatgcgaattcaggtggtcagtttgcacgttttaattaccagattaaccatgaccagcaggtttggggtccgttttcgttttatgccggggtgaatggccagttggcgaataacaacctggacgcgtcacagaaattcctgatgggcgggccgtctgcggtgcgtgcctatgatatcggggacgggtcagtggatgagggtgtggtggggacggcagaagtccgcagccactggtctctgcctgtactggcgtggctgggtaatgacccgagcctgacactcgccaccttttatgaccagggctggggtgagcagtggcggaataacgacaatggtcgtggtggacgcctcgctgacagcaacaacctgaacctggccggtgccggtctttacgccacggtggcggatgcgggtaactatgccctgacgatgacatgggcgcaccggaccggcaatgcagacccgaacgcggtgcatgacgacaacgaccgtttctgggtgtcggcggtaaaaactttctga

SEQ ID NO: 400333 - DNA, 6252 bp, Salmonella enterica
atgaataagatatataaacttaaattcgacaagcgccggaatgaactggtggtggtcagtgaaattacggcgggaatggggaaggaaaaaaccaccgggcagttggctgacctggtggcgctgtcgccgttcagaaaactgctcggaaccttaacccctgtcgcgcttctgaccggactgattgccgggcttctgccggcgatggcgctggcggcagacctgccgaccggcggtcagattgtgggtgggcaggggagcatcagcacgtctggcaaccagatgaccattcatcagcagacgcagaacatggccgccaactggcacagctttgacatcggcaaaaacaacaccgtgcagttcgtgcagcccaacagcagttcggtggcgctgaaccgggtgacgggcgccagcgggtcacagattatggggaccctgaaggccaacggccaggtgtttatcctcaaccccaacggggtactgttcgggaagaatgcccgggtggacgtgggtggcctggtggcctccacaaagaacatcagtaccactgactttatgaaggggcagtacaccctgagcggcagcggtaatcccggcgcacaggtggtgaaccagggcagtctgacgacgtcgaagggcggctacatcgtgctggccggagagcgggtcagcaacagcggcaccgtcaccaccccatccgggaaaaccatcctggcagccggtaaaacggtcaccctgcagctcgataacggcggactgacgtcggtgtcagtgaacggcagcgtggtgaatgccctggtggagaaccaggggctgatatcggccaccaacgggcaggtgtacctgacggcgaaagggcaggacatgctgctgaacacggtggtgaacaacagcggcaccgttgaggcaaaagggctggcgaaccggggtggggaaatagtcctgaacggcggcgacagcggggtggtgagccagtcaggccatctgctggctgacagccagaccggccagggcggaaaaatcacgctggaaggacagaacatccacctggcaggcggcagtctgaccacggcgaccgggaaaactggtggcggtgaggtgtacgtgggcggcggctggcagggtcaggacagccacatcaaaaatgcctcaaaggtggtcatggacaaggcggccacggttgacgtgtcggccactgaaaacggcaacggtgggactgcggttctgtggtctgacgattacacgaacttccgcgggacggttctggcaaaaggcggtgcaaagtcgggtgacggcggccgggtggaaacgtcgtctcaccgcaatcttcaggcatctggtgcggtggatgcgtcagcacgcgccggacacggtggtgagtggctgctggatccgacggatgtgaccattgtgggggccggagctgacacgggtatcgactccgccaccgcggacggcaccgacattttcactccgacggccagcgggggacaaatcctcaacagcagtatcgtgaatcagctgaacgccgggacgagcgtcaccgtcaaaaccagcgggacggatacggacggagagaccggcaacatcacggtgaatgcaaacatcataaaaactgccgggacggatgcgaagctgaccctgctggccgataacaatatcagtaccggcgacaatgtcagcattggtgccacgaccgggaagctgaaccttgatttactggcggggaacacgacgaacaacgcctccatcagtctgggcaagtttatcaatatctcgctcaacgggggggacctgcttgcagatgcggggaatagcgccagtggtgtttcattaacattcgtgaacaacgggaagatcaagggaggaaatgtaacgctgaacctgtcccgggggcttggcggatatgcttataacgtgaatgcagataatgacctgacgatcaacggttcggtgaccggcagcacaggctggggcgcagtgcttggctttaccgccggcggtaagcttgcaatgaactcgccgggcagcatcagtctgcaggccaacgaccccggcaacggcggtggacgcgtactcattagtggagataaaggcgtcacgctgaatgcggcagccggcaccgtcacactgaatgccgcaaaggccgccaccaatggcgtgaatatcaccagtggcaacggtgcggtgagtataaccaacatggtgcaggacggcagtaacggcatgacgctcacgaatgccaacatctcatcgaaagatggcatcgtgctcaacgggaccaccttctggggacaggcagtggtgatgtccggtgtgaacctgacgaccggtggtgatgtggatattaccggactggcgaaaaatctgaccaccggaggactgggcgcagcctcctcctccggcgtgcagctgtcgggcagtaacatcagttccaccgggggtaacatcactctgaccgggactgccggcaccgacgtatctcacccttccatcagttcgctgcaggtcagcaacagcacctttaccacgaataacgccctcaccctgaacgggaccaccgaaaccactaccggcgttaaggtgacgggcagtaccctctcagcggccacacttaacgtcaacggggtggcgcgcgttcagggtaccggcttttcgctggccacaagccagttgctgggcggcctggcggacctgaccaatgtgagtctgagttcggcgggctcggcggccggcgcccagaacgtactggacaacagcatcgtgaatgatgctaaccgcgacacgctgctggcgaagcgcatcgagaacatgacctccgtggaaatgaacggcacggcgatttttgacgacagcgcgaaatcagacaagggctggacgcacgactacagctcggtggatacgcccaatggcggctggatatttaacaataccagcgtgacggcgggcggggacgtgaacctgaagggggtggcgttcaccaatgcgacggtgacggtgagcaacggcagcctgacgctggataacggtggtgcggttccgctgaccggtacgacggtcacggttaatgatggtgcggtcagcgttcactccggggggggtaacatcgacctgacgaagggcaacatcagcgcgaaaagggatatcaccctgaagacggataacgggacggtcctgatatccggggcaaacgctactgtgaaagccaatatcacttcatctgatggcgatattatgattacaggcaatagtggaacttccatgggagttcgtctggtcaacgccaacctgacttcgattaatatgagcattaatggaagtgctatcggaggaagtaatgacgatatggcctcctttggtgcggtatcgttattcggtgcggatgaattccatgttgcaaatactggacatggagaaatgaatggctatgttaacaactaccttgatcttactcggaatggggcgattgttattggacaaatttttgcggggggtgatacaaatgtagtttttgacggaagtttcgatattaaaggtgatgcttttaccacgggggctaaacctagttctacctatgatatcttctttaataatggttcttcatcgattacatttaagggtgggaaatcgtccttgacatcatgtagtcatggtgtttataccaggttttcggcgtactcggctacacatacaacaaattttatccttgatggcgcggattttgtcttcaatgttactgctgggactgctccccaccaagggttaagtatgcttggtactattgagtttaataaatatacttcagggtttgctttttctggtaatggcaatgcacagctaaatatacatacgagttctcaagaggaaggaatctatcttaatcgactaacaaataaagatttattaggtaatttttctcttaacgttacgaatgatattggcgatgctattgtcatgctaggtcacacagcggttaatctggttaatgccacgattaccggaaccagcggaactggggcgggttttcggctggaaagtactgataaatctaatgtcagtctgggtaacaatacgattacaggcattagtaaaacgggttcaggtattaagttaatcggtaataacatcacgctgagtaatggtaccctgaacggtacgtcaggtaatggttccggtgtggtgctgaccgggggcagtaattacacccttgatggcgcatcggtcaccgggactgcggccgctggttccggtatcgcagtgaatggcacgcttaccgtgaataacggaaccgtagtgaaaggccttgccacaggtggcgggaacggggtgacggtttccggcgacctcgtcaccgacagcggtgacggcatctcgatttcaggtacagcatcctctggtgacggtattaaggttgatggtgacaccacgctgacaaacgcgacactgaacgggggcgctgacagcggagtcggggtgaacattgccggtaacctgaccacagacagctccactcaggtgagtggacatgcagccagcggaacaggcgtcaatctgggtgcagccctgaccggtgcttcggttaaggggagttcagacaccggcacaggtgtgcagttagcggataacgcggtggtgacagaggctgtgctgaacggaacctccgcatccggtgacggagtgacttttaccgggaatgtgaagatggatgataccagtgccgcgaagctgaatgcctcttcgacaagcggtacagggctgaagcttgcggataacgcgaatgtcagcattcagaccatcaccaaagtgacccaggagaagaaggactcggacggtaatccggtactggatgcagacggcaatccggaaacggagaccatcaccacacaggctccggtcaccacgccggtgacgctgacgggaacctcagagcagggctcggggattgccaccgagggtaacgtcagtatcagcgggattgtgctgaacggcagcacaacagcagatacggggacgggcgtgagtctgggcggtaacctgaccattgcggatgacatttcaggggtgacggcaggagcgactggtaacgggacggcgctggtcgtgaacaatgccagcattcactcagatggttataccgatagcgggaaggactttgtcatcaatgcctcagtgtcaggtaacggcacagccattaaaactcagggcagcagtcaactggatgaagttgtactcaacggcaatgccacgggcggcggcacggcggtggagctcggcggtcaggtgtcgggggcgaacatcacgggcacgtcagacagcggcacggcggtacgggtgactgacggggccggcgttgatggttctgcagttaaggggcattcggacagcggtacgggtctgcaggtgagtggcaacgcatccctgaacaactccgacctgagcggtaccacgcagaccggaaccggggccgcggtgacaggcagcctgacggcggatacatcttcgcaggtgaccggctcggccactcaggacggcggtactggcgtcacggtggacggttcggtgaccggtgccacggtgaccggggacgcaaccagcggagacgcggtccgtatcgcggatggttctcagtttaccggcgcagacatcaaagggacttccgtcactggttcaggcattaagacgcaggggaatgtcagcctggaaggcggaactcaactggcaggtggttctcaacagggcgccgcactggatgtctccggtacactgaaccacgacccggattcctcagtgacaacgacaccggataacaccggaagcgtcattggtaacgagaatatccacgaagtcattcctgttgtgccaccggtcccggatgagggtggcgacaccgataaaccaacagtaccatctgagcctgaccagaaaccggggggcgataccgataaaccaacagtgccatctgagcctgaccacaatcaggaacatgatcacaatcagtcacataatgcgtcacttcgcaaacaggctgaagtaaacagtctccgccagggggcagcaaatgcgcaggtgacgcagatgaaccgggcatctcaggacggtttccatgccgcaggctcgccgtcggtgccggtaagcggttatcagccggcagagcagacggtggatatcagtctgtgtgacggcagtgactgtcagtcggagtcgctggacgccgggacaccgtcgcagggcagggcgaaggcatccggtcgctga

SEQ ID NO: 400334 - DNA, 2025 bp, Salmonella enterica
atgatgacttcccggactgaaccggccgaaaaaaaaactacctgtgcaactgaccgcgtggcgtttgttggtgtccccgtggaccacctctctcagccggataattttaatctggagcagtttgagtatcaggtgacgcagccggataccgaatcagccgccaggatgctgctgtttatgctgacgcagcttgactgccactacggccagtggggaccgcagttttcggcgtatacgccgggtacgtccctcgaagggctgaaccctgttctgtgtacccggattgccggggccgttaccacactcttctcccgcccggactttacggtcagcgacggtggctatgtacagctgatgaacctgcaccgctggctggcgctgatttttgccgtcagcctctacaggcacgccgaccatatcatccgcaatatcaacgcagcgggggggggcgtggttgaccctctgacgctcaacagccataacctgcgtctgttctgcctgtgttacttcccggactcgcagattgccctgcagccggatgtcctgtggcagtatgaccgccggacggtggctcgtcttttccttgcgcttatcagtggccgtaccctgccgacatctgccgcgcacggcaagcgggagctgctgctggcctggttaccggaccggcttgcagaactggactccctggattttctgccgaccgctgtgctgcacgatgtgtacatgcactgctcctatgcggacctgacagaaaagcaccgaataaagcgtagtctgaacgaccttatccgtcgctcgctgctggccggggactttaaggatattgcggtgggggataaccgggggcaaacggccactgacaccccggaggttcagggaccgcccaaaaaaccggtgctgctggttgtactggagtggttcaccagtcagcacagcgtgtaccggactcactcccgggcgctggcggccctgcgcgggcatttcatcgtgcatgcggtgggcctggacacggcggtggatgccgtgagccgccaggtctttgacgtattccacccggtcagtaccgacactgccctgccgcaggcatatgcccttgccggagaactgcgtccggacgtggtgttgtacgccgggataggcatgttccccttcacgatttacctgagcaacctgcgcctggccccgctgcagctggttggtctggggcacggggcatcgacgttctgcgggcaaataaacggttttgtgatagaggaggacctggttggggaagaacgctgcttcagcgaaaccgttatccgggttcctgccgatgctatgccgtttgtgcccccggccgatgtccgtcgcgtaccggtcacgcgtacgccgttcctcacccgccagcaggcacagtggcgtgagccgctgccggtcagggtggcagtgtgtgcttccgtcatgaaaattaacccgaactttctggcaacgctggcagaaatagagcgccgtagccgggtagctgttcggttctgcttttacatgggctttgcgcaggggttaacgctggactacctgcggaacgccatccatgcggtgctgccgggggcggaggtgaatgcccacatgccagtacaggcgtaccagtctgcgctgaacagctgtgaactgtttgtcagtccgtttccctacgggaacatgaacggcgtggtggatgcggtccgtcaggggctgccgggtgtgtgcctgagcggtcctgaagtgcacagccatattgacggaggactgttccgccgtctgagactgccggaggctttaattgccactggatatgaggcgtacatccgggccacgttgcgtctggtggaagagcatgactggcgcgagatgctgcagcaccagttacaagacagtgacgtggagcaggtgctgtttgagggacacccggagaaatttgccgacgtcatcagtgatgtgtggcaacagcacttgccctttgatgcggcttctgaacgggtagggacaagccaaaggttgtcatcatga

SEQ ID NO: 400335 - DNA, 555 bp, Salmonella enterica
atgaagcacttacccttctgccatcccggtgattttgatgataacggcctgctgaaggctccggtgcttttctgggtcggactggttgtgatggcgcgggcctggtggctgatgggggcggcaatgacgacacagcagggagggcagtggctcgcgcagttgtatcccggagatgtgtcgcagtggctggggctattttccggtctgccatcactgctgatggtgttctgttatccggtacggggtcagttgccttttctggcgcgcggcctgtacctgctgatgctgatggccgtgttcgtcaccggggcgggtgactgcctgatgatgcggttatctcccgcgcagtgggaggtgggctggttttttctgtgtctggacgtggcctgcatggtgatgttatggcccgaccggtggctgcgggcggtgttttctggcccggggcggtttgcagcgaatgaagggggatgtgccacgggaggcgatgaagatgtcagaaagtcagtttattcaggaggtcagacaccgggcctccctgctgaccgggagttttaa

SEQ ID NO: 400336 - DNA, 495 bp, Salmonella enterica
atggcggggaaaccgcatagcagcgataccgtatttaccgggaagaaggaggtaaagcagagtaatcatgatgtatataccatcccgccctgcatggcaccgtgggctgatgagcccctgtacctggtggtggcgcgctggggcctgcaacagaaaagatggataaaccgtaatgacatcgccgcagtttttcatataccggaccggcgggcttcatttcagctgtcctatatatcaaggaaaaaagatcgggtggcctgccggacgcgctacgtgccagccgaaggcagcgggcgacagagagtggagatatttatcgaccatgtcctgcccgcacctgatgtgagtctgactcatgcaccaccgcgcaggcgtaacgttccggctaagcaggccggtcccacatcacgtggggtgggcagtggtatggccgataatatcgggttatgggaaaaactgctcaggggatgcagagaaggacgtgacgatgagtga

SEQ ID NO: 400337 - DNA, 741 bp, Salmonella enterica
atgagtgaatccctgatcattttctgccgagaatgggcagtgacggtggcgctgacgggctatctggcaccggcataccaacatcctgtcatgccggtgcatggtctggcacaactgacccggatgttgcaggcatatccgcgcatgccagtgttactcggcctgcgtccgcatgaacatgtggtggatctgtaccggctgcggccgttgctggccggccgggcggtactgtttgtggggcgctgtttttactggacggattataacctgccggagtggctggcactggagcggtacgggttctgtacgtgggatgccatgcaggacccgttctcccggcggatggagctgcggcgcttcagtcgtctgtgtgtcgatgtaaaggacgaaggggatgacaggggggggcgtcctgcgattcctcatatgacagagacgcaggtgctggaaagggcgaaccggtggctgtaccgggagctgtcggcgaccggcctgaccgggtatgaagtcagggtgctgtcgctgatgaccgaaggtcgcaacgggaacctgccttcccggacccgtagtctgcacaagaacaacgggctgtacaagctcgggatgacaaaacgcctgaccgatttgttccggggtgtgaaggtgcgcgcggcgttacagagcgggctgtcacagcagacagaagacagctcccccgagacgggggatattatcccgttaagacaggaggtcaggcggtga

SEQ ID NO: 400338 - DNA, 345 bp, Salmonella enterica
gtgagcagaacagatccagctggcagtcgtaaaattcccctgggaacagatgtactgacggcggcccggcagcgtgttgccgacacctttgaccagtttgaacgtctctgtctgtcgttttcaggcggtaaagactccacggtgatgctgcacctggtggcagaggaagtgcgtaaacgacagcgtaaattcagcatcctgtttatagactgggaagtgcagtacaacgcaaccctcacccatgtggcagccatgcgggagcggtacagcggctgtaccggacagttctaccgtaactatatggtgcggctgaaacgccagcgggaggaatgggggctgatatga

SEQ ID NO: 400339 - DNA, 189 bp, Salmonella enterica
atgaaagacacgatggaggagagcctgctgtgtctggaagcggcactcggagagatggacgaggcgacacgtacgctggcgctgaacaccatccgcagacgtctgcatgccctgagtccgtttctcagtgagccggtggactgtgtattgtggctgcctaccggaaaaggtgcgggcaaacgattataa

SEQ ID NO: 400340 - DNA, 372 bp, Salmonella enterica
gtgggggtggcgcaggccggccagggatacagcgtggtggacggttatcaccggatgcaactgggtaaacacaagccgcgcctgcgtgaacggctgaagggatatttgccggtggtgctggttcatcaggagagtgggggcgatgctgagcgccgggcggccactgtccggcataaccgggcaagaggacagaatgcggtaacggcgatgtcggacctggtgcgtgacctggcccgcctgggctgggaggatgggcggatagcgaaagaactgggaatggacgcagaggaagtgctgcgtctgaaacaaatcagtgggctggcggaactgttcggtgatgaaacattttcacaagcctggaccgtggagtga

SEQ ID NO: 400341 - DNA, 327 bp, Salmonella enterica
atgaaagaaggtatctatacggtggtgtttgagagcagccagcagtcggtgggggaaggtgtggtggtgataaacaacggccgggtacacggcggagacatggcctttactattcggggaataatgaaacgaccggtaatggagctggaggtgcattattacaatcgggatattccgtcggtactgggtatggaggaggactactggctggagatgagctacagggaggccggggaagggcgctacgtttttagcggtcatgtgaaggggcatccggaaagaatgctgaaggcctgtgcggtatttctgacccccctgctgaaatga

SEQ ID NO: 400342 - DNA, 384 bp, Salmonella enterica
gtgaaacacatcagaataatattctttatccctgtggcattgttattctcagcaaattcatactccgcttctcccgtcggttgcgccgctaaaaaacaggaagtggaaaaccagattgcttatgcccgggagcataacaacatataccagattgccggccttcagaaagcacttcgtgaaatagatgagcactgtaccgatccacaattgctgaagcagcgtcagttaaaaattgcacaaaaagaaaaaaaggtggctgaaagtcaggcagaactggagcgcgcccgtgaaactggaaatcctaaaaaaatggcgcagaaacagaaaaaactcgatcgagctcgcgaagaacttcaggacgcacagaacaccttgtaccagtag

SEQ ID NO: 400343 - DNA, 279 bp, Salmonella enterica
atgaaagtcatgaagttgtttgtggcatctctatctatgttgatctctttttgggggtgtgcggcggagcaggtatcattgaaggaggtcgagcattttaaacttgaatatctggggaatattagtgtcagtgcaacaaatgagagcgtgacctcaccttccgatttgcagaagaaattatcagaactcgcagataacaaagggggagggtattatcatattattgcagcccgtcagcatggccccaattttgatgcagttgctgaggtgtttaaataa

SEQ ID NO: 400344 - DNA, 384 bp, Salmonella enterica
atgtcgctgaactcatggctcccaaaaactaagcctacaccgccatggctccggcagtttatgcggctgtccctgcagatggttatctggggagcagggctgacggttgtctgcgctgtccttatcttcgtcgttctgcaggatccgcagagtatgaatgtaacgctgtggcttgataatgcccgctttcctctgctgacctggcgcctgatgctgtatatcattctggctggcacatggtttggtggagtacgaaaatcgctgatggctcagataagtactcggggtgacagcagttcactctcgtcactgcgccgtctggagattatggccatcgcactgatagcgctgtctgaatataacgtctggctggcgccacgatga

SEQ ID NO: 400345 - DNA, 495 bp, Salmonella enterica
atgagtaatgaaggatttaatcccgaagacattgaggacaccctgtcccgatttggtcgtggccagaagaaaatcatacgttcctcaacggccggtattccggattttgtgcctcgcaaggctaagttacagagcagtcccgttgaattatccaccaaagacgaggcgctctgggctgcagccgctgatcgtgcagaacaacagcaagcacaggaactcccacctgccagcccttgttttagtcaggctgatatcgacgaatttctggcgaggaaaccgcagaaatatcagatgaccgaaagggactacaaagaattagggcgtaatatggttctgggtatcggcgatttgattgtcggtacagctcaggccgtagcggtagtaaacgaggttttgcctgaaaataaagagccaacctgtggctggggatatgatattgatggtaacttcgatttttatggtccctatgacccatgggttacatataaaagatag

SEQ ID NO: 400346 - DNA, 624 bp, Salmonella enterica
atgaatgaaaaaaatgatgcgctcgaaaattttacctggtgtgcattggttgcattaaaaattgcaaggatagataatagaatccattcatcattttccgaacatatctttatttataactggctggtagtggcgaagaaaagaaagttgttctctaagttagttgctcaggatatcgactggttattaatggaggggaggagtaaaggagtgaatgccaatctcaagtttaaaattgaatatctccgctctgtctgttgtaaaaaacttttttcacagtctgtattattccgatttacacgcgcgtttgaaaatttaaaattgataggctgggaaagttattttattgcactgggtaaatggaacgcgcttttgaacgctgaaattaatacgcctggaaattttatctatatctctgaacaaaaagtcagagagtgtttcggtaaaaacggagcattgttgtgtcagctaaaattacgcgtttgcggtgatgttcaaactgctgagcaggtattcaatgataacggactgattctggatatagagcaacatactgagcttaatcagactttttttgttttgcgtccagagaaaaacaccatgacttgtgaggatctgtcttga

SEQ ID NO: 400347 - DNA, 921 bp, Salmonella enterica
atgagcaaaaaatcggcaagatcaaaagttgaaatattcaggaaaaacttcatcacccacgcccgtgatgtgtccggaggctatgctacaaaagcggacaggatgcgtattgcgaaatattttctcaattacctccgggataatgggattaaattacgacattccgacagcattaagacacgtcacttttctggttatcttcttagcaggaaagaaaaaggcatttccgccagaacggttggtaatgaacgagcagccctccggggagtatttggtagcctgggaaagcaggctttagccgatccggataatccgttactcagtaataaaacacttgggctggagaacagtagccgtaatggaacaaaatcccccctgacggcagatgaattcagacaggcatttgtcaaggtagagaaaaaagataaaggggtggccgcaacaatgttacttgcctataccctaggattacgaacgaaagaagccgttgaatcctgtaaatcgatttcaacctggaaaagagcactggagaccggtcagaattctgtcaggattatttttggctcaaaaggtggacgtccaagggataccgttattttggacagggatgccctaaaatatgccatcagttatgctgaaaaagttatacgggaaaataacggaaaacttatcgataaacctgacatcagaaaagcgatcgataaataccgttatcatgttcgccgtgttggattaacgggaaaaaaagcaccacacagtatgcgttatcagttctctcaggacgcaagaaaattttatgaagaaaaaggattttcggaaaaggaaatttacgcgcaggtttcgatggatttgggtcatggtgatggccgggggagatatgtgaaacaggtctatttcagaaacgatgcggatgaagagtga

SEQ ID NO: 400348 - DNA, 417 bp, Salmonella enterica
atgatttctattttaatgaatattgaatcagctaagcatgttcgggatatcaatttaaaagatgacgtgggagacattattgtaaaatttagttgtgaaacgccgcttaatgaaatggatacctgtgacatgtttacttttcattttggcaatatttattatgaggtcagcgatgaggattactttatccggaaaggccctctgtcagaaatgggtggaaatatgaggcttgaggtttctgaaaaaaatctttgtctaaaagccggtgattctgtacttatacctattgcttgtgatcttgaggatgaaattaaaaagggaatatataatcctgataatgacacaagtataaggacattagtagaaaggaactttggtgatttatttgattccaatggtgattttatttgcaagtaa

SEQ ID NO: 400349 - DNA, 1605 bp, Salmonella enterica
atgttccagaaagttaagttatggatacagtcgaaaaatagcacgcagccgacggtaaatccccctgagaatgccactaaaatatccgaccacagtgtggatggatattttgagcccctgtcggtttctgatttgttacagcgtgaacggcgtcgtcaatgcttaagaacgctgtgggaatacagcgcgttacctaaagagcgttttgagcgttattttttaccgccattacacggagtggttaatttgtgtcaaagactccctgcttcggctcagggaaagtttgcctataccgacggtatggtggactacgttttgcagacgacggtctttgccgttcgtatatcaaaaggatatatgctacctcggggggcaacagcggaagaacagtctgcacagtctgtcagctggagcgcggtcgtctattatgcagccttattccactcgctgggtagcttatggaatattgaaggcgagctccggagtggtgctgtatggagcccggggttaagtgttccggaagagccttatcgatttaggtttaaagcagaaccagatgtggcaggcgctcaggtttttggtgaaatgatcgctattcgatttttacctgaaccggtacttcagtggctgggtaaaaaccctgatattctgaggacgctgttggctttcattagcgggcgttacattgatgcgacagatattcaggatatcgttaatgaggcaattgtacatgcgggaggtaacgcccttggttttgctgctgttcagggacagtcgtctcctgaattaccagaaacactcaaccccgccgtggaatcatctcccgcattgatgcaaagtccttcgccagttcctccggttatccctgacgtggcagagggagaacaggagactgcgtcacttttgtcctctctcggttctgctgttgaacctgtagggggggaacgtcagctttccgctgagactgacccagatgttcttcaggtcatgtcgattctgggggtattgagcgatgttgacacgcaggtgtctgaaaatgagagcagggatcctgggactgatattgttgctggagagcctttgcccgaggtggtgaggcctttaatcaatacgcctgaagttgctcctccagaagatgatagccctgaagcagaggtgcaggaatgcactgaattatcaacggactctgtatcatctctttccccggcagaactgggtaacctgttctgggcatggctgcgggatggccttcttaaaggtgatatacccgtgaatactgctgatgccagtgttcatctcacttgcggttttattttcatcagtgtgccggctgttttttttctgttcttgaattcacattcatacccctgcggttcctccggtttgagagaaagcatgaggaaagagcaggtgcagtcggcattcgagagaatgcgaaaacaccggataagtgacaaccggcgattctggcagtgttgtctttatgaggaatctggttgcagggggaaatacagaaagttaacggggtatctgataaaaatgtcagagatttatgctgctggtagctttccttgtgatagtttgtttctcaaggttatgaattga

SEQ ID NO: 400350 - DNA, 459 bp, Salmonella enterica
atgaaaattacccggcttgccattctgattaccctgacattttccgtcctgaagtcgcaggccacggagttcaatgccagcctgctggacagcgggaacctgtctaacgtggacctcacggccttcagccgcgaggggtatgtggcgcccggtaactatattctcgatatctggctcaatgaccagccggtacgggaacagtatccggtcagggttgtaccggttgccggactcgacgcggccgtcatctgtgtgacaacagacatggtggccatgctgggtcttaaggataagattattcatggcctgaaacccgttaccggtatcccggacgggcaatgccttgagctgcgctccgctgacagtcaggtacggtacagcgctgaaaatcagcgtctgaccttcattattccccaggcctggatgcgttatcaggacccggactgggtgcccccttaa

SEQ ID NO: 400351 - DNA, 936 bp, Salmonella enterica
atgcaagaaattcaaaagaatacaaagaaagagcaatacaacctcaacaagttgcaaaagcgcctgcgccgtaacgttggcgaagcgattgccgattttaatatgattgaagaaggcgatcgcattatggtttgcctttctggcggcaaagatagctatacgatgctggaaattttacgtaatttgcagcaaagcgccccgatcaatttttcactggtcgccgtcaacctcgatcaaaagcagccaggtttcccggagcatatcctgccagcctaccttgagcagctgggcgtagaatataaaatcgtcgaagaaaacacctacggcattgtgaaagagaagattccggaaggaaaaaccacctgctcgctgtgctcgcgtttgcgtcggggtatcctgtatcgtacggcgactgaactgggcgcgaccaaaatcgccctgggccaccaccgcgacgatattctgcaaaccctgtttctgaatatgttctatggcggaaaaatgaaagggatgccgccgaagctgatgagcgatgacggcaaacatattgtgatccgcccgctggcttactgccgcgagaaagatattgtccgttttgctgaggccaaagcctttcctatcattccttgtaatctgtgcggttcgcaacccaacctgcaacgccaggtgattgccgacatgctacgcgactgggataagcgctatcctggacggatcgagacgatgtttagcgccatgcagaatgtcgtgccgtctcacctttgtgacactaacctgttcgatttcaaagggatcactcacggttccgaggtcgtcgacggcggcgatttagcgttcgatcgtgaagagattcccttgcagcccgctggctggcagcctgaagaagatgacaccgccttagaggcgttgcggcttgatgttatcgaagtgaaataa

SEQ ID NO: 400352 - DNA, 228 bp, Salmonella enterica
atgatgatgttacgcaagaagaaagcaccgagccattgccgcacatctgccaaatatctttttgcccgtgccttttttaagaatgtcagaccgggcattcaaattggcgttattgctgggcgagagcaggttaaaaattacatgtcaggtgcatggtggaataacgatccggttactacagcccgcaatattcatattaactggggaggaattcatcatgatggctga

SEQ ID NO: 400353 - DNA, 270 bp, Salmonella enterica; identical to SEQ ID NO: 145483

SEQ ID NO: 400354 - DNA, 1794 bp, Salmonella enterica
atgaatccagcgctgacgcaacggctcgtcagcatagccgccgccgctgacgcagccggacacggtgaaaaagaggcggtataccgggcggcgtgtgaagaactacagatgtcacgcgccaccctgctgaaaaagcttaagggggtacggatgagccgaccacgcaaacagcgctcagatgccggtaaaactacgctgacccacgatgagatgctgaccatctccggggcgtggctggcttctccccgtcctggcaacggtaagaaaggctacagtctggaggatattgtggacggattacgcgataacaacctgattattgctggtcgtactgatactgagaccggggagtttttcccgctgtcaattgacgccatcagtcgcgccctccgccagcatcgtatgcaccccgaccagttgcgggcaccatctcctgccctagagctggccagcctgcacccaaaccacgtctggcaactggatgcgtccatctgcgtgctgtattacctcaaaaatccggccaaaagggcaaaaggggacaccggtctgcgcgtcatgagcgcggcagagttcaacaaaaacaaaccccgcaaccttgaccgtatcgtcaatgaccgggtgtggtcatttgaaatcaccgaccacactacgggctggatttacgtcgagtaccgctttggtggggagagtgccgtcaactttctggaggtgatgattaacgccatgcaggaacgtggcagtgctgacgtgctgcacggtgtgccgaagattctgtttactgaccccggctctgcgcttgtctcggcctcccttctcaacatgtgccgggcgatgggcattcgcaccattcagcataaggctcacaacgcccgcgccaccggttctgtggaaaaggcccgtgacattattgaacgcaagttcgagggcggtctgcgctttctccgggtggatgatattgatgagctgaaccggctggcgcgtctctggcgtatgaagtttaaccgcaccgcaatccacagccgccacagcatgtcgcgtaccgatgcctggctgagaatcaccgaagagcagctggtaaaagccccggcacccgaaatctgcagagaactggccatctctgcacctgaagagcgcactgttaccggcaagctgcgagtacctttcagaggcaaggaatacgatgtgtctgacgttccaggtgtgttcgtcggtgacaaggtactggttgcacgtaatccgtggtcagacgaggaagtgcgggtcgttatcgtcaatgatgaaggttttgagaccttccacgttattcacgcgatacagaaagatgaactctggcagtacagcaccagcgcgccggtgattggtgaagaatatcgacagctgccggaaaccgttacccaggcaaaccgcgatcaagtggaacagcatacctacggcaccgccagccaggaagaaaccgaggcagcaaagaaaaacaaagccctgccgttcggtggtcgcttcaacccttatctggatattgagcgcgatgaccacccgacctacctgccgaagcgcggtcaggcttcagacgtgcgcggcccgcgtattgagcagcgtccgctgacccatgtggaggccgcgaaagccctgcgcgagaagttcagcgcgaacggccatacctggacgccggaatgttaccgccagttaacagcacggtacccggacggcgtaccggaagccgcactggatgaagtgatggtcatcctgaccgctccggcccacaacagcgttatcagcatcgttaacggcaactga

SEQ ID NO: 400355 - DNA, 264 bp, Salmonella enterica
atgactaatcccgtgatggactccccggaggcgttggggcttgctctgtgccttttccttcctgagatgtctcagggtttcattattcagacccgcagcggcgaaatgcaggtatcagcggcaaactccttacctttcctcagagagatggatcgcctgttgaaaaaggagattagccaggcgcagagagaagcatacaggaacgctggagaaagcacatatggggtacccgaattttcatcgctgtacgagagtcagccatga

SEQ ID NO: 400356 - DNA, 936 bp, Salmonella enterica
atggctcgcacaaaatcacaacctgctgaacttgcacctgacgtggagctgaatcccgaactggaagtgactcaaaatctgatggcaacagtttccagccaactcagtgatgaacgtgatctgctgaatcagcttcttggtcaagcgcaaatggccgatgcatttgcgcaattttccctgaccgtcaggacatctaaactagcatttgttaaggaaaacaagctatatcgggcactgaaaggaaagaaaactcctgacggtcaggagttatcaggtacatgggatgagttttgtcgtttactcggaaaatcatcacaacatatcgacgaagaattattaaacctgcgcgtgctcggcgaagaagcactcgaatccatgtcccgcatgggtatcggctaccgtgagttgcgccagttccgccgcctgccagaagaccagaaaagcgccctcattgaagtagccaaagaaggtgacaaaacagcgctgctggaactggccgaggaaatgatcgccaaacacgccaaagagaaagaagacctcaaaaccgaccttgaaatcagccgccagacgctggccgaaaagaaagatgagatcagcattctcaaagatcaggctgatgaactcaaggcgaaactgacgcgccgtgcaactacagagacgcctgatgaagaaggtcaggcgcttgaaacggaagctactggctctaaaagcggtgtactcagcgctcttgtcaacctcaaatgcggctttgaggcactggccgaacacgcagaacgtaccggcatcaatcacacccacatcatggcaggacttcttgatgatatcgaagcccgtgtaatcgatatgcgtcatcagtttgacctgcctgattttcgtgagattgacggtatggatgattgggtgaaagaagcgcttgaggaaaatgcaaatgactaa

SEQ ID NO: 400357 - DNA, 306 bp, Salmonella enterica
atgagtaaggtaaatgtatccagttccggctcccgcattctgcgcgtccttaaagctctgcgcggccacgccctgaacggcgtttccaacggtgaactggcatctgcactgggagagtctccagcgaatatcaatagggcactgaataccctcatcgaagaggggctggcactcaagcttgaaaacgggcgctttgctccgggtgtgcagcttttacagattgccatggcccataacaatgaaatgtcccgcgcacaggggcgcatcgatgaacttaaccagcgtgtactggctggtagccgctaa

SEQ ID NO: 400358 - DNA, 189 bp, Salmonella enterica
atgacatctgaacaagttaaaacactcttccgtcagcgtgggatcacttttacccgctgggcagaagaaaacggctacagccgcaacgaggtctaccgtgttcttaacggcttcaccaaaggtcgctacggcaaatcacacgaaatagccgtgaagctgggtcttaaaccagattcaaatgcggcataa

SEQ ID NO: 400359 - DNA, 426 bp, Salmonella enterica
gtgaattttgattctctttgtgcgtcgcgattcaaatctgagcgttcgcggttatcactcaaacaagcggaagtagcagccctttgtggcgtatcaagagaaatgtgggggaaatatgaacgaggagttgctgttcccggcggcgaattgcttgctgcctttgcaagagttggagccaacgtacagttcattctcaccggagagtcatcaggtataacgttatctcgtgatgagatggagttgcttaagcactaccgtcaagctccgttacaggtcaaaggttccgtcttgtcagcattgactaccggctcctctaaagaacgggcggaacaggttattcagggagatgttctcgggaacgttatcaagggtaatgtgaccataggagcaggtggaatcatgaataaaaatacaaagagaaaatga

SEQ ID NO: 400360 - DNA, 978 bp, Salmonella enterica
atgagtaaagaaaagcaaacagttaacggcgatgtgggcaacgttgtcagcggtgacgtaactattcataactattctggtgaagttactcccgctgcccagcagcccatgtcgttgctacaaaagcgtgctcttcatcgcttaatggacgaattggttgatgctggggagtctaagcgcgaactgtggataatgctccatgcccggctcaataccacaaccgttagtgaaatgaccgccgctgattatcaccaggctgttgaaattctcgaagagagcgcccggaggataaagtaccttaaggacagcaatatcctgatcagtaagattatgggccttacagacccggcgtaccgcgttgacagagacagatactgcctgaagcatttcggtacaactcaccttaaggggttggacaaagagcagcttcagggagtatttggttatttcgatgacttgcttaactctggtagagaagaaaaatcggccccctcagaagtatcttcaccatcaccgggtcaatcaacacagtcaggaaacaaaaaaatttatgtcattgttggtgtccttatcatcgtaatcgctgccacaatgctgggggttacacgtttctctggtaatggttcggctgccggacatcgctcagagaaccccacggtcttcactgccgatacaagtgacagcgtaatcgcgtcgtcaattccggctttgcgcagcatatttcctggactgaacaagtactctggggacttcatttcggtatcaacctataagcaaaaaacaggctggcacaccctcaagttttcggtgtcgtcacagtcagcagttccagaaagctacgctgtcagagggaagacctgctacatcaacataaaccccgatggtagttatgcccgtgttctgactgctccatgcaggtcactgttactggatcaacaaagcacacctggcagtaaatataggtttattttgaagtga

SEQ ID NO: 400361 - DNA, 270 bp, Salmonella enterica
atgaagcaaacatctgctgaagagtttattgaaatctggaatcgacagaaaaaaaaggaaggcgatgccattcagcaggcagcgccttcaatgattcctaatatattgggaaaagctgttgttaccctggtcagtcaaaaccagcaactcacaacggaaagccttattaactatcttgaggatcaagttcagcgcacgcagggtaatttacttgaaagctggaaccgaacggctctacagttcctgaaggactcagcttcgccgaaataa

SEQ ID NO: 400362 - DNA, 255 bp, Salmonella enterica
atgagctgggaacaaacgccaaaaggtaactggcattttgtccataattcggatgaaacttatgaggaatctctaaagcggtgcatgtccagccaggtatacaccgctgacgaaggcgactggctggcattactggtcatagcaacggacattatttcggcgaagctgagtccttcaggaactgtagagccgttcggttccagctttcaagtaaattaccctgcgtgcgctgaacttgatcctcaagatagttaa

SEQ ID NO: 400363 - DNA, 543 bp, Salmonella enterica
atgtcagagaaaagggattttaaagcgcgttacgagtgttcacaggggataagcggccagaatggtggcatatacaatagcctggaggcaagcacgatgactgaaccaaaactgactggccgtaaaagcggatttctctttgggatcagaaccgaagaaaaagataaaacctatacattgaatgtggaggcattaagcactgaggaggctattaataaattcagtctcgccataactgccatcaaaaataacaaactcgttgttaatcgtgattatgaaattgccggatgcgatttcaccttctacatacagaataccagcgttcaacattcagccggtaacaggaatggttctcttgtcgaagtaagaaaaaatatggtgagccaactggtgaatatcatgtcatccggagagcaggcctggtgtcttcctgatgccgttcatgcggtagtagcggcactgttcgtgctctacgatcaggatctggttgcaatggaattacgcaaaacaccatcatttaacgctggactatctggcaaataa

SEQ ID NO: 400364 - DNA, 336 bp, Salmonella enterica
atgtcacagatccaacccgctgttttcacgttaacccacccatttactaccgctgctggtacgcgagttgagcgtattgaactcaagcgcctcacagttaaagacctgaaactggttcgaaaaatctctaatgacccggctgactgggatgaaccgttgattgcccgcagtaccgggttgccacctgaagacctggacaatatggatttagctgattatctgcaactgcagcgtcgatttcagctcgtcactgggatgggcaaaggcgacgaaaacactgacacaggtacaggggctgctggcgaggtggttccggttccagccgggggaaattga

SEQ ID NO: 400365 - DNA, 2478 bp, Salmonella enterica
atggccagtaacttttccgtcggcgttgttattggtggcatgattggcagcaccttccgctcagcgatgagcggtacccgacgcgcccttgactcactgaatgacacctcccgccgcctgcaggaacgccaggacagcctgacccagaaaatcgctcgctatggccatcttggcacctcatccatgcagaatctgaataatgcccttctgcgcgtgagccggacaatggagcaggttgatcgccagcagcgtcggttgtcggccgcatccgctaccagcgatgcactgaaggctaaccgtatggcgctttatggtcagggagtggaggcatatgccatggcgcaaacggtataccagacggtttcacccgctgtgcagcaatcaatgtccttcaaggacaaaatgattgatatgtctattacggccaaatatgacgacaagaccagagataatctgggtttgcaaataaagggctgggcgctgaaatacaaccagtatcaggatgatcttcaggaggcagtaggttcactcatcagcgacaatatcgataatgtgtctgatattgggtatttaatgccggacattgcccgtgcggcaaccgcaacccgcacatcaggtcaggactgggccaaagtggcggcggtctggcaaaactcattgaaaggtgctgccaaagattttggtgccgtccagaatattatggcttatgccggtgaccagggctcatttgaaattccggatcaggttaaatggattcagtcactggcaccaatgatggacggcgttgcgagaggaaaagaggctgtagctgaaattggggccagcctgcagatagctaaaattggcgcaggttccaccgatgaagcggctaataacttcaaaaactttctaaccaaaatatttgcccgtgatacccagaagcaatttgctgatctgggcattgatctgcagggttctattgagagctataaggctgcaggtatctccccaatcgaaggaatgatgagtgtcattgagcggtatctgaaggctaaaagcccggaagcgctttcaggttttaaatctgcaatgaaaattcaggatgaaacagcgagagacgaagcactgcaggcgctggccaagaattttggtctgggggaaatgtttgcagatatgcaggtaatgggctttgtccgccccatgctggccaatatggaccggtatcgtgaaatccgtgccggtgcgctgaaagctgcagataaggatatgctggctacgtcgtacgatcagcgcctgaaatcaccccttgaggcgaccaaagctttgatggtcaacagccgcgatttggctatcactctcggtgatcaactagccccttcctttatttcgctggcagaagagttgatccctctgattcagggggccgggcgttggattgcagcacacccacaatttgtcagcggtgcttttaaggtcatcactgcactaattgcttttaagatagcgaccattggtctcaagctggggctgaatctccttatttcccccttcgtcagcgtctggaaaagtgctgtgttattgcgtactaactggttacgtctgaccacggcactcggagaaggcggcaaattacgctggctcgctactggatttagtcgactggccagtggtggtctgaaacttggtagcattctggcaggtagccttgttcgcggttttatgattgctgctcgcgctgttttgtggatggggcgggcgctgatgatgaacccgattggtattgctataactctaatcgccggtgcagcttaccttatttaccgcaactggggcgcagtcagtagctggtttaaacagcgctgggcagacattaaaacggcgtttaacggcggtatcgtggggattagtaagctgctgattaactggtcgccggttggtctgctctacaaagcctttgcggctgcgctgaaatatctcggcgttgatctgccagcgaagttcacggacttcggtggtcatcttatcgacgggttaataaacggcatcaaaaacaaatgggagtcgctcaaaaccaccgtcacagacatgggcgacagcgttggtggctggttcaaggaaaagctgggcatccattcgccgagccgtgtgtttatcggttttggtgacaacattgcgcagggtgccgctatcggcctgcagcgcaccacaccactggccgcactcgcggggcagcgtctggccactgaaatgacaccggatgttccccgtatcccgtcgccggaaatcatggcggcgggatattcaggtcgtggcgcagctgcttctggtggcggagcatctggcggtattcaggtcagctttaatcctcagttttttctcaatggcaaagaaaccgcagcgcctgccggactgaccagcgcactgaatatgagcctgcatgaactggagaaaatgctggagcgtctgctggctcagaaacaacgtcgggggtacgaataa

SEQ ID NO: 400366 - DNA, 438 bp, Salmonella enterica
atgagtgaatattattacagtgcaaaggaatcaggtttttattttgccgccgataaagaggtttacgaagcgggaaaaggctggccgaaagatgccattcctgtttcggatgaggattataaaaccctgttttcaggtcagcaggcagggatggtaatcaccgcagggcgtgacggctatcctgtgttgacagaacgccaggcccctacggaaaaagagttacaacaacaggctgattcaaagaaacaaagcctgatgcaggaagcaaatacaatgatttcaacgttgcaggatgctgccgattttgcaatggcgacggcagaagaaaccgccgcgttaactgagtggaaaaaataccgggtgctgctaatgcgagtggatacatcaaaagtccccgaaatcaattggcctacccctccgggggaacaggccagttaa

SEQ ID NO: 400367 - DNA, 426 bp, Salmonella enterica
atggccgctaattattcgtatatttatgatgcttccacgaacgccttttttgcgctggcgctcatgagcgaatataaaaaatcagggatttggcctgataattgggtgaagattacaaacgaacagcaccaacgcttaatggctggtcagtccgagggaaatgtaatttcagccgatgcagagggtaatccggttctgacgcccgcactaattgactatgtagccattgcggcagatgaacgtgacaaactcatggcatcggctacagcaagaatcaatcagcttgtagaagctcaggacgatgacgatataacggctgctgaattatccgagctcactgctctacgtgaataccgaacaaagctgcgccgactggcgctggatgttgcaccagatattaactggcctgttcccccggaggggtag

SEQ ID NO: 400368 - DNA, 264 bp, Salmonella enterica
atgtgtaacgcgggtttagggattaatggctggcaccgggataatgcaaccggactgattacacagtgggggtctggtggttttaccagtggtcagcgtattaatttcccggcggtattcccgaacgtctgcactgctgttgtgggtaatgataccggcgtggggacgctggcaatttcaatgacagataccgatacgcatgggtttactgtgcgcggttcgtcgtcgaatttcggtctgaactggattgcaaaggggtactaa

SEQ ID NO: 400369 - DNA, 177 bp, Salmonella enterica
atgagccatgaaatcaacccggcagttcttgtatgcatcgcattcatgatcttttttctgggatgggcttttggggctgcaattaacgcaaatccaaataaaacgacaaccatcattgccgcaatttttggagttgtcttaatcgtattcatgatagcgctggctttaatcgtgtga

SEQ ID NO: 400370 - DNA, 216 bp, Salmonella enterica
atgcacacgctaactaactatatcatgagtccattgctgacgatgttcatattttattccggcgtgcttgcaatatatgtctggaaaaaacacagcaataagcgcgtgaaattcggcgacatacgccgggaatatgaagcggcattagcaaaagggttacacccaatacttttagcggcgatcgcttacttactggtgttttggttactcaaataa

SEQ ID NO: 400371 - DNA, 387 bp, Salmonella enterica
atgaacacattaattaaaaacgtccccatcgccagagcgggaaagattattgacggtcgcgaaatcacgcagtcaatgcttgagagttgcgtaaagacgtttaacgctgattattatcagccaaatataggcgagtttattggcaatccaatggtgactcgcgatattaaaaatcaggggaaaatagaacgtctgacactgaaagacgacacgttatttgctgatgttgaaatgtatatgcccatagccgatgtaaaaaagttgtgcccgtttccggctattgcgtacgaccccaaatttagtgcattaatgtacgtaattcttgataaaagacccaaccgtgaagactgcatcgcccttaaagattgcgaaatgagagagatataa

SEQ ID NO: 400372 - DNA, 441 bp, Salmonella enterica
atgattaactcaaataaaaccctttcccaaaaagcattagccggggcggcatttttgcgtatgcacgccaaagcaatggctggcgacgatgatttttttgtcgcgataatgtctgagcctcacaccatcgccgctaacgccatcgaacagctcgttaaagaaaacgccgaactccgcgcccagctcatcgcctttcagaaagcggataaccccgctgttgccgttgacctggcaagcggcccggataccacagcctgttacacgcctttcgtaataggtactcgcgtatgcctgaaagcgaaccctgaccaacgcggaacagtagtcggtagctctatcagttcatacaccgagcatcggtattacgtccgcttcgactccgaatttgaggataaccgctgggtaaaggccaggaacctggaattagcccccaacaaatga

SEQ ID NO: 400373 - DNA, 531 bp, Salmonella enterica
atgctacagatgaaattcaaaccccgctttgttgaggcattcgccagcggccagaagacaaccacgctccgcatgatggactttcgctgcttcccgtctgaccatgatacagacaagtttttccatcaggaaaggctgtcagaagatattaccatccctgattacagcgctggcgcaaccctgatttttgataaaggaacggtatttacccgcgtatctgaccttgacggcctgttaaaaagacagccctgccagcccctgagcaatatcgaactggtcacggaaaccgaagacggcgaatgggttccgttcgccatcgccttcatcgcggacatttccgtcataaagggcgaccagataaccgaccaacacgccatcacagacggctttaacccggcaaatcatcctcgtgccgaactcttcgtattcatgcgggacgtttaccccaacaaagacccgctaaacgaaatgtactggctgtacaccttcaccaacattcagatgttgccacagtggggaggtgcagtatga

SEQ ID NO: 400374 - DNA, 237 bp, Salmonella enterica
atggcaaaccgtaaacaacgccagcgccgcgcacaggcggatcgcatccacactcaaaccgaaatcaaccgcagactgcaccgcgcccacacgctggcgctattcctgccgtccgatctgcatcgtctgccatacggcccgatgccgttatggttgccgtcagccctggactacatcgccgacgatatcggcgacattcaggcgctacttaacaagccagcgcacaccgcgcaataa

SEQ ID NO: 400375 - DNA, 408 bp, Salmonella enterica
atgcgtaatttctttctgacgatgatgccggaacagtgggaaaaactgaaagccagccctcagaatttcccgatcgttgaggattattttccgacacgaccggagccaggcgacaagctgttagtcaggcaacaactacggcacacgtcatatgatactgaaactatcattgaccttggcgaatgcgtcattgccagcgcagaacccgtaactaggcaccctaaccgttaccggctgaaagtgacctgcaacatgacgccggaacaggtgaagcagcgctacggttgcccgtttacgccactatctgacatgctacgtaaataccgggaagaaaaagagcgcgtaaagctggaaaaagcacgccggatacttgcttctaaggtaaaggttgctacaaaaattttatag

SEQ ID NO: 400376 - DNA, 183 bp, Salmonella enterica
atggagggcatggcggtcctggaggtaatggagggcgaggtggcgatggcgggaacgcgtcttcaggacataacggaggtaatggtggtaaaggtggaaacggcagtggtacgggtcatggtgggcgaggagggaatggtggacatggataatccctgcaacaacatccccgggtggaactga

SEQ ID NO: 400377 - DNA, 174 bp, Salmonella enterica
atggttcaccgggtgctgacggtggccctggtcagaatggaggcaggggcggggatggaggtattggtggaaatggtggaagaggagggcacggaggcaaaggggcaaatggtggtgatggtggtaacggcgggattggtggtaatggtggcaacggtggacatggaggaatga

SEQ ID NO: 400378 - DNA, 345 bp, Salmonella enterica
atgagtaggtcagttgttattttattgtcgttatgttcattttttatcgggactacctttgcggcagaggctcaaaaaattattcatgagaataaaggcactcaccatatagccgttgatggaaaaaatggtgcagatggaaacggccatcatggtggtaagggagggaaaggcggtaaggccgggggaacggcaagtaatagtggcaatggtggtgatggcggtaacggtggtgatagcggcgtattaggtcatggtggtgccggtggtgccggtggcgatggtggttccggtggaaatggtgggcagggtggaaaaggcggaagtggtgggttatgggattga

SEQ ID NO: 400379 - DNA, 273 bp, Salmonella enterica
atggtggggcaggtggccccggaggaaatggcggcgcttttggtggacatggcggaaatggtgggaatgggggacatggtggtaatgacggcaatggagccggaaacagcagtcataacgggaatggtaatgggagtcataatggtaatggctcaaataagggaaataatagcggtaacggcacaggtaatggtaacggaaacgggaacggaaatggtaatggatccggaaaccataatggcggaaaagggcatgggggcagattatgagtag

SEQ ID NO: 400380 - DNA, 1755 bp, Salmonella enterica
atgattcaggatgcttttgtacggctgcgggctaaacaactttactggcagggatacccgccagcggaaatcgcgcggctgatggggataagccagaacacgatctactcatggaaaaaacgcgatgaatgggacgaaacgccgcctgttgcgcgcgtcacgcagtccattgatgcccgccttgttcagcttacaggaaagcccgataaaaccgggggtgactttaaagagattgacctgcttgcacggcaactgaaaaagctgagtgacggccagcccactgacgtgaatggcacaaaaaagccgcgcaaacgtaaactgaaaaatcacttcaccgaagagcagattatcgcgctgcgggaaaaaatcatgggttcgctggcgggtcatcagcgtacctggtatgacgcactgagggagcttgaggacgagaaagagcgccgccaccgcatgatcctcaaatcccgccagattggggcgacatggtatttcgctcaggaggcgttgctcagggcgctgcgcaatgacgtaaaacgggattaccagcgcaatcagatttttttgtcggcgtcacggcgtcaggcactccagtttaagcagatcattcagaaggttgctcatgaggtggatgttgagctgaaagggggcgacaaaatcatcttgtccaacggggccgaactgcattttctggggacgtcagcggcaacggcgcagtcgtacacggggaatctgtattttgatgaatttttctgggtcagcaacttcgccagtctgcgtaaggtcgccggggctatggccactctgaaggggctgacgtgtacctatttttccacgccatcttctgaaacgcatgaagcctatccgttctggacgggcgaccgctggaacgggaggaaagcaaagggacagcggcagatgtttgatgtgtcctggaaaaccctgaaaagcggactgctgtgcccggacaaaatctggcggcagattgtcactctgaaggacgttgtcgaacagggctgggaacacacggactttgaagagattcaggatgaaaacagcgaagacgagttccgcaatctgtacatgtgtgagtttgtccgcgacggtgagtccgccttcagcctgaactcgctgataggctgtggcgttgacggttatgatgactggccggactggaagccgtttgcgccacggccagtgggaaatcgtcctgtctgggtgggttatgacgccaacggcagtactggtaacggcgacagcggcgcgctgtgcgtggtggtgccgcccgccgtgtcaggcggcaagtttcgcaccattgagacaagacaggtgcaggggctggagttcgaagaacaggcacgggtgattgaggatatcaccctgaagtatagcgttcagcacatcggtattgatgtgacaggtggtaatggtgatgccgtgtaccagattgtgaagaagttcttccctgctgcggttccctacaatttcacgatggcgtcaaagcgtgcgctggtcatgaagatgcttcaggtcatacgcgccgggcggtgggaatatgaccgcagcgaacgggcgcttgtgacggcgtttaatgccgtgcgcaaaatcaaaacgcagggcggatttattacctacgacactgaccgctcgcgcggtgtcagtcatggcgatctggcatgggcgaatatgctggctgtcatcaatgaaccgcttggcgatgaagatggcgcggtcaggagttttgttatggagttctga

SEQ ID NO: 400381 - DNA, 492 bp, Salmonella enterica
atgaaccgcgcaacgctcgcttttatcgtcttcatggtcgccgccgtagccgttctcggcttcacggctgaccactggcacagccaatacaccaggacagaaaaagcccgtaaggaagcggtagcgcttgccgacactcgccagcagaccattgacgatatgacgcagcgccagcgccagaacgccgcccttgacgcgaagtacacacaggaattagccgatgcaaaagccgaatccgaaaagttacgcgctgatcttgcttctggccgtcgccggttgcagctccacgccgtctgtatgcccgctgccgcgcatgataccaccgccaccggcacaactgatgcagccaccgccagacttactccggacgctgaacggaattatcagcgtctcagagccgaatccatagccgttacagcacaggtgaacggcctgcaacagtacatcaccgaacaatgcactaaacggaaggctgatcatggaaaaaattaa

SEQ ID NO: 400382 - DNA, 489 bp, Salmonella enterica
atgagtatacgagaattgaacctcactaaagagcagcatgactggcttaatgggtggcttgagctatggggggcatgggtttattcaggaagactcgaaaaacgcatgagcagcgttatagcgcagtttatggagagggtagaaccatcaagagtgatgacaaggccaatgtgcaatgatgatgacggaatgttgatttctcaggtcgtcgattccgtcatgtacattgacaagaaagcctttggcatcctcctcagctactacgcccacggctcttccaagcacgccattgcatcttactatcatcgcgtcgcaagacctcgcaagatgttatgccggggcggcgggcgcattcaaaaaccatcactcgcaacctgtcgacgggaagttgacgaaatcctcaatgcctcgttgtttatgatttacccggttctggatagtgcgtttaaaaaccggaaacgtgtagagaaaattaaacatgtagcatag

SEQ ID NO: 400383 - DNA, 207 bp, Salmonella enterica
atggttgagttgattgtttcggcattgaggcttctcagtacgttgtggattgtggcgacgttcattgtgactgttagctgttttgtccggttggtcggcgaaggtaaagacctgttgaatatgcttttcggtagcattctcctgtgggtgattatcggtgttatgcctgttgccgtagcaaaaatggcgtggcgttttgtcaactaa

SEQ ID NO: 400384 - DNA, 1074 bp, Salmonella enterica
atggcgactatacgcaaacgtggtaactaccaatgggaagctcaaatccgtaaacgtggttttccctctcaaaccaaaacctttaccaccaaagtagaagcagaagcttgggccaaaatgatcgagtcagaaatggcgagaggagtttggcttagccgcagcgaagcggaatctacgacattgtatgaagccttaacgcgatatgaaaaagagattgttcccgacaaaaaaggggcagtgcaagaccgatcattggtgcggatactaaaaggcactcagctggcgaaaaactatatggccagcatcaggagtgccgatgtcgccaagctgagagatgaatggttgaaaatctatgctcctgcaaccgttttaaggcgtttggccttactttctcatgtattcaatgtttcgcggaaagaatggggcatggagagcctgctgaaccccgtagaggccattcgcaaaccccaacccaagaactccaggaccagacgcctggaagcgctgcctgtagtttctgagaaaaccggtgttacgtcaggaaaggaaatagccaacgagatcgaacatatcatcgccgcaacacattcattagtattgccagcaatcattcttctggcgttagagacagccatgcgccgtagcgaaatcgcagagcttcgatggcgctttatcgatcttgatcggcgagttgcacatctgccggatactaagaatggtaatgcccgcgatgtccctttatcaacgaaagccattacgatactgtccagtctcaaggaacattctaagccagcttctgataaggtttttgatatgcgtgcagacgcgattacccgagcttttgaccgagctgtaaaacgagccagagaacgatacgagaaaacaaactcattatgtgatgaatctttccttaaagatttaagatttcatgaccttcgacatgaagcaacttctcgactagctgaaattttccctatgcatgaactaaccaaaattacaggacatagagatccaagaatgctaatgcggtattatcatccaaaagctgaagatttggcgttaaagttgaaataa

SEQ ID NO: 400385 - DNA, 891 bp, Salmonella enterica
atggattataaaaataagttagttgatgcatcacccaaattaaacaaccctcaactattggctataatatacttaataccttttggatacttgattgtagaaaacccattatggctagaaaatatatacattgccgctccaatttttctatcatctatagctttattaaccagtgtatacataggatatcgtgatttattaaataaagtatttaataatacagtggttaaatggggcgtaactggctttacatattcagtatgcttatggatcgcaaagtttaagcttgacatagcttatggtatagccccagaaaatcttaattactcaacattagcttatgctttcatgctctcatttccaataggagcaataatttgtgcaactacagtctatatatacatatttttgcgagatgtatccccagcaaaaatagtaatatcctctatgatttcagtatatataggaaacttggctcaacatcatatacaggtgaacaatcttcctgaaaaaataatattaataggactcataattatggtcccctacaacatggtcaatctagccagttcattagttattaaaaggaaatttaattttaatcgtttagtatcaggcttatccctttttgctgtgtcagttgctctttttattattagcatgacagcaatgaaatatattgaaagatttcaagaaaagtttatttttcttgatgcaagaacatctacgacatgtggtagcccagaaagcaaatctctttatattgaaaaaaatgaaaatcagtgttataaagtatcaggaaataaattctcggagttaagactaactcttgtagataaaaacatcccgaatataaataataagggcacttcaacttatgaacaaaaataa

SEQ ID NO: 400386 - DNA, 228 bp, Salmonella enterica
atgaacaaaaataaccctgctaattcattttctatagaagcaaggaaagaagcttttcggagagctgaagccagtctttttttatcaagtaaagatcccaaaggctcctcattttttaatgaaataaaaaataaggtaatcaatggagagctaacctatgaagaggcaaagagagaagtattaaattatcacattgaacaatctaaaaatcaaattaaaaaaggctaa

SEQ ID NO: 400387 - DNA, 213 bp, Salmonella enterica
atggctgattataatagctttgttttggaaggaataaaaattatttttgccgataacaacaaagagtttattaaagagatttgtgaaccattgataaatattctatgtatcgaagaatattattctgctaccggaatttataattatgatgatgctgatgagcaaactgagttacttaaaaatgcgctaagggactataaaatggctcactag

SEQ ID NO: 400388 - DNA, 1395 bp, Salmonella enterica
atgagaatagtaagcaagctcacttttttaggcataatttttttgttttctgtaaatgcttacgctggtcaattagatagtagcggattacttgatacgttattagataagtttcagcaagtagccagcgcatggactttagtaattggtgattatgcaaattggctcttctgggggatggtattgataagtatggtttggacatttggtatgttggcgatgcaaggggaaggtttaaccagtgcacttgcagagatagttcgtttttttgccgtaattggatttttttattatcttttaatcaacggcccagccatatcacaatctataattaactcaatgagacaacttgcagcaaatgctttaggaacaagtactggtatttcaccctcaagcatagttgacatagcctttgtgatattaacaaaggtcagttcagcagcatcaatttggtcaccaatgatttcgaccattatgataaccgtcgcgataatagtattagtcgtaatggcacttatcgcgataaatatgctagtaatgttagtttctgcatgggtgttgtgttatgcaggagttatattacttgggtttggtggctcgaaatggacttctgacattgcaataaattacttacgcactgtattatcgattggcattcagctgtttacgatgacattaattattgggattgggcaatcatttatagatcagtatttttctattattaaaaatgatattcctgatcttaatagtcttattgttttacttctggcgtcaatcattcttttagtattgactaataaattaccgttgttgttatcaggcgttgtaggaggagcgtccttacaagggattggtggttttggagcaggtatgattactggcgctgctactactgcaatgagtggcgctggggcaatggcaatgagcgctacagctcaagtcagtggtggtgcttccgctctaaaagcagcatttgaatctgcacaagcggcgatggccgaagaatctggttctggtgatagaggcggttcgggtggaggatttggcggcggggaagataccggttccgtagatacttctggaggacaaccatcaggcaattccggtggttcgtctgcagggagcaatacaggtagcgccagcggaggaagccaagggtttgcttcatcattctcacgagctggccgcatggcttctcacatggcgagcgggctgtctaatggagctgcggagtatcagatgatgaaaggaagtactaattctatccgatcacaacagactgttggtggggaaatagcgaatcaaatacgtaaacacacagccgatcgtcagagtaaccacgaacaggatgagtttgagggtgatagtttaactggcagtaaaaaatcttga

SEQ ID NO: 400389 - DNA, 174 bp, Salmonella enterica
atgaaagataaacttttggtcatttttattctaatcatttcattaattctatgctcttgcgataaaaaagatgaagattgtttatcaacgccagagaataaattgaacgaacataactatgataaatgtgccctgcgtggtaataacaatcctagtcctaagcgagaatggtaa

SEQ ID NO: 400390 - DNA, 795 bp, Salmonella enterica
atgaagttaatgctccgagtattttcatcacaaggaggaattttagcagctaaaaaagctttagtagtttctttcgtggtgtcaatcatggcattaccggcgacagccggtatcccggtcatagatggtactaatgtggtgcagaccacaatcagcgcagtcaacaacgttcaggctgtggcaaaacagatccagcagtaccagacgcagctgcagcagtatgaaaacatgctcaaaaatacagtcgcacctgcagcctatatctgggatcaggccaattcgaccatcaacaaattgttgcaggcgcaggacacccttaattactacaaaaatcaggccgggagtcttgattcatatctgaaacgttatcaggacgtgaattactaccgctcatcaccgtgctttaacagtaatgttgaatgtactgcggatgaaattagcgcactgcgcaaagctgaacagaacagctctgaggcacgtaaaaaggccaatgacgctgtatttaaggctctcgacgaacagcaagaaacgctgcaaagcgatgctgacaaccttgcagatttgcaaactcaggcaaccggcgcacaagggcaaatggaagctattcaggccgctaaccagcttgccagtgctcaaacgaaccagttgctgcaaatccgctcgcttctggtagctcagcaaaacgctgcagcaacacttgtacaggctgaggctgataaagaagcccaacaaatagtcgctgatgaaaaagcgttagctggcgagaacacaccaagcccgaagcgaatttggtga

SEQ ID NO: 400391 - DNA, 294 bp, Salmonella enterica
atgaggacgataaatgctgcaccttcaactgtcggcgagattttatacgaagaattcttgaaaccattggatatgcctcccgcaagacttgctgaactgatggatacgacatatgaaaaaatttgggaaataattaaaaatgagcgagatataacccttaaagaagctactcaactctcgataattttcaacacagatgcatctttttggatgaaactgcaagagctacatgagacatggtttaataaacaaaagcaagggcgttcaattagattacttaatcctaatacataa

SEQ ID NO: 400392 - DNA, 1053 bp, Salmonella enterica
ttgaaaaatcatacaaaaatcaaggcagtggatcttttttgtggagccggggggctaacgcatggtctccagcgttcaggcatatccgtgaccgccggatatgatatcgaggaatcctgtcgttatgcgtatgaaatcaataacaacgccagatttataaaacaagatgtaactcatctttcaggaaatgatgttgcaaagtatctggctggcggcgattacaccctccttgctggatgtgcaccttgccaacccttctcaacatattccagagcaaatataaaacgaactacttctcctgacaaacgatggaaccttctggaaagctttgggcgcctgatcaatgagatcactcctgatttcgttacaatggaaaatgttcctggcttggcagaacagggagtttttaatgcgtttttagcaactcttcggcataacggttattcatttgattataaaatcgtattttgtcctgattatggaatgcctcaaactcgaaaaagattggtattaattgcatcaaaagttagcgagatatcaataataccagctacgcatactgcagataaatatgtcactgtaagagatgcgattgagcatcttcctcgcataacagcaggcgaaaaggataaagttgatcctatacatcgctcatcaattctaagccctataaacttaaagcggattcaatattcaaaacctggcggttcttggctggattggccggaagaattaagggctagctgccataggaaaatgacaggaaaaacttatccaagtgtttatggacggatgacatgggatgagccatcaccaacaattactactcaatgtaatggttatgggaatggtagatttgggcatcctgtgcaagatcgagcgatcagcctaagggaggctgcattactacaatcatttcctttagcttataagtttcatgatgatgaaaacccgctaagcgtcgctacattagctaaaatgatcggaaatgcagttccggtcaagttgggagagattattggccaaagtataattacctccttggccaaataa

SEQ ID NO: 400393 - DNA, 726 bp, Salmonella enterica
atgcaactagtaaaagatgtttttgatgaaagagttgctgatatcgagagctattttgaattggtgaataatgttgagcttgcaattggctctggaggagctatattcagcgttaatggaacaccgtaccaaataaatcctgatcagcagaagataatgtattctggaatatatcttcatttgtataatttggtcgaatcgacgatctctatgttaatagatgctgtcgaacggcacgcggcgcaaggaattaatgggcagctggttctactaactgaaaacatgaagaagctgtatgttaaatctgtagcagccccttttgaatcaataaataatgatttacggttagagagagcgctagaactatttgaccaagtattaaatataaagcctcttgaacttaggatcccgccgggaggcggaggtaattgggacttaaaagaaatagaaaggataagtaagagtataggtgttgatatcactcttcccagagcgcttaggacaaaggtaaatgctccatttagagacgataaaggacctattcggctagttaaagaaataagaaataaattagctcatggttctctttcatttacacaatgtggtacgaaccatgtagccagtgattttaggcggttgattgatatagtcaaagaatacttagcccatataatcctatcttatgaaaacttcataaccgcacaaggttataagattgcacaatga

SEQ ID NO: 400394 - DNA, 1050 bp, Salmonella enterica
atggaaaaggaattacagctcaaagctgatgaacaaataaaagcgtactccaaaaaaatcgatttttacacctcagaatatactgtagagatacttgcacaaaaagtgagcgctggtgagtatacggtacctgaatatcaacgtgagtatacctgggatgaaccaagaaaatgtaaatttattgagtcgctaatcataggtcttcctataccattcgtatttttctggatgaatgacgataccggaaaactagaaattgttgatggttcgcagaggcttagaacccttgatgaatattttaaaaatcgtttaacccttgatgggctagagcggctggatcttcttaatggtacaaaatttgaagatttaccattagcacgccaaagaaaaattttaaataaatctatccggggtatcatactatccgatgatacagatatggaagcaaggattgatttatttgaaaggataaacaccggtagtaaagttgctaatcctgcggaggttaggcggggggttttacgtggtccatttatggatttaattaatgaattagctgctaatgaattatttatcaaactagcgcctgtttctgcaaagcaaaaaaaagaacgagagccagaagaactagtaactagattttttgcgtactccgatgggcttgaaggatatagagatgatgtttcaccatttatatttagatatataaagagaatgaatgaatcattcaaggataatgcagatctggcccagcaatatagagagcgtttctctcggatgctatcgttcgtagaacaaagtttccgtctcggatttaagaaaacagttaaaggttcaacaacgccacgtactcgtttcgagtccatagcgataggctcgcatttagcattagaaattaatggtgcgcttcaagtaacgaaggaacaaactgacgaaatactagaaagtgattcctttaaggctgaaattcgttctgatggtgctaacgcaataagaagattgcagggaagaattggttatattagagatgctcttttagagagggcttga

SEQ ID NO: 400395 - DNA, 681 bp, Salmonella enterica
gtggtggtggatgagaccgccgacctgccgcgcgccgcacaatccatcgtcaaaggcgcatcgtttgataacaacatcatctgcgccgacgaaaaagtgctgattgtggtggatagtgtcgccgacgagctgatgcgtctgatggaaggtcagcacgcggtgaaactgaccgccgctcaggccgaacagctccagccggtgctgctgaagaatatcgatgaacgcggcaaaggtaccgtcagccgtgactgggtcggtcgtgacgcgggcaagattgccgcagccatcggcctgaacgtcccggatcaaacgcgcctgctgtttgtggaaacgccagctaaccatccgtttgccgtcactgaaatgatgatgccggtactgccggtggtgcgggtcgccaacgtcgaagaagccatcgccctggcggttcagcttgaaggcggttgccaccatacggcggcgatgcactcgcgcaatatcgacaacatgaaccagatggcgaacgccatcgacaccagcattttcgtcaaaaacgggccgtgcattgccgggcttggattgggcggagaaggctggaccaccatgactatcactacgccaaccggcgaaggcgtgaccagcgcacgtacctttgtgcggctgcgtcgatgcgtgctggtggatgcgtttcgcattgtataa

SEQ ID NO: 400396 - DNA, 135 bp, Salmonella enterica
atgatgagcagcctgcatatttgcaggatggtagtaactggcaaggtacaaatctgtactaataccggggaggagaggcacagcggcgggtattcgcccggatatgatgcagggcgcggcatatggcggctttag

SEQ ID NO: 400397 - DNA, 510 bp, Salmonella enterica
atgaagacaaaaagatattcgagaagggttgaaaagctgatgctccacgccctgaacgaagcaacaagaattggttttattccggtaaaatccggtttagaaggtgtaatcgagtcagagggaacagaaataacagttggcggtaaaaacacagttattaactggagcaactcagggaatgaagattttaggttcaatgtctggtgggactacacaccagaacgatgcaggcgttatttcaggaaaggcgggttacgtgaccttacaggaacaatgccagatgtgtctgtttcaacccgacgtaccatagtgggggtgtgcgccagttgttatttatgcgttctggagggcggaagcattcagttaagcaggtacagcgaatttattgttgagtatatccgtaacaatacagtacatcttcttgatgatctgcctgatgtggaaccgtctggttattctgctcccggctggcgtaaatctgatatcaccaatgagcagcatttaccttga

SEQ ID NO: 400398 - DNA, 216 bp, Salmonella enterica
atgtttattgagagtaatttaccggaagatccggtattcagggatcacgttctgggctgggtggtattccgcgaggcaccatggcgcattcagggtatttattcctcaaaagagagggcaaaggaagaagcctttcagtccggggatgaatatcaggttatttatgcgtctcactggctgggaagccaagagataaagccccgcacgccgctataa

SEQ ID NO: 400399 - DNA, 213 bp, Salmonella enterica
atgtctgtgaagaaaacatcttttaaagcacagaactatgaccgtctgttcctgatgatttttagtgttcttattaatctgattcaggttatctgtctagcggttattgtagtaggcgtttgtacgatactgctttttaacttgagagatccggttcagggttcgttagggactcacgccagagatttagtagtcgccggggctggtggttaa

SEQ ID NO: 400400 - DNA, 972 bp, Salmonella enterica
atgaaattcaacgatgatctcattgaggaactaaatcagttatcagatttgaataattaccgtggtattatcgctgttgcaagtgactggatagttatttttgctatcatcgtattatctttatactttgataatgttctgctatatattttagcagtagtaatcattggtacaagacagcgagcattagcaacgatactccatgagtcagctcatcgtgttcttgccaaaaacacaaaaataaacgatgtattaggtaaatactttagtggttattttatattccagacattccagaagtacgctaaaagccacgttatccttcatcacaactatctgggcaagaaaaataaagatccagactatgattactatatagaaagcaacctttttgaagaggccacaaaaaggagatttgttaaaaagcatttaatattaccattattttttagcaaaaccccctcctttgttaattacttgttaaaaaacaggttgggggattataaagactctgaatttaaaaaagtagttatgttatggattgctatatctgccgtgtttttctatatgaatacatttcatctgttaatactgtactggtttgttccacttattacaacattcccaatggtcggatggtttattgaaatggcagaacattttccaatcattgagaatgatgatgatattgataaaacatggaaccgcttcagctccaagttcgaattaatgtttactggtatgcatagcgaaaacctacacctgacacatcatctgatgcctaacattcccttctggaaccttcagaaagcacattgcattatgatgagggatccgatttataaatcaagaaatgataaaatgggtggaatatttctttcatctaaaggccgtaaatctctttggaataaaattattacaaacgactttaataacacaaaagacataaaggttaacaatgaaatcagctaa

SEQ ID NO: 400401 - DNA, 921 bp, Salmonella enterica
atgaaatcagctaagtatgcagggattatatatgcacttcttgccgctatttttaatggcacagttggagttatgagtgtcaagctctttcagtctggtctttcagccaatgagattgcattttacaaatgtttaattggactgtttattttattcatcattgttatttgtaccagaaagctcagacaggttgtacattttgcaaagtcaaaatggctcgctggactgatttgtgcattcttcggtttttttatgctttatcactttgaaaccaaagcatatgcaaccacgaaagtatcaatcgtcgtatttgtcctttttgggagtgctacaattttttcatttctactttcagccattactgaaaaacgtctgttatcgtttaaagagattgtgacaattattctgtccatatgtggcttatacatgatttttacccaagacgggagtatgaaaatagattttaatgaagggctggtttctgcaatcattgcgggcttcggatatggtagttttttgtttctttcccgtaagctcaggtttggcgcaggaattcctcaaatgcttatccttcttttctttggttcagtctgtttatttattcctttcgaaaaaaacgtatatattcattcactgagcatgtggatcgttacgttactgatacttctggcaatattgccaacgattggtggtttctggtgtacaactaaagccctgactcttacttccagtcaatcagttcagttaattgaactttcagaacctatatttactcttgtttttagccttctgttcttggggcaacaaccaaccttggtacagatagcagggggagggttaatttttgtgtcaatattcattcacgaattcaacataatcgaacgcttggtatccccccgaaattttaagaaaacagtctga

SEQ ID NO: 400402 - DNA, 183 bp, Salmonella enterica
atggcgttgacgctcaacattatgctcagtcacatgcatatgttcgcctcaaggttccccgaagtaagacgatgtcaccagccgcctgtatgctgcatttgtgctgtcatagtttgcactccccccggctttctgccgtcgtatatgatgaatttttcatgttacccctttgaatctttttag

SEQ ID NO: 400403 - DNA, 1497 bp, Salmonella enterica
atgagcacgactgaaagcggagatcagaccaccaacacgccggaaatgaagcctgttaagcgcggtaaggggaaaccagaactgaaggctattgatggaggtaaaaaaagccgaaaaaaagaaacaggtaatatttcgcagatggcgacaagccagaaagcgcggctattgtcggcaagatgggaaaggctagcagtaaatccgggcagcggcgcggtgtattgctacagcaatggagtatgggaaaagctggctgacagtgagctggagcgcgtgatggcgtcggtctttgaataccatgaagcacactacacagagaaaggcatcaaatccgtagttgccaccatgaaattacagttacccgcgctgggtgagctacacggggatttgattggttttgctaacggcgtttatgacctgacctcacagacattcagcccgcactgtgctgataactggctgatgaatcacaacgggataacctatataccacccgtgcagggagagagcatcgctacccatgcgccatactttacccgctggcttaatcatgccacaggcggcgacagtcagaaaggtgagcgcattaaagctgcgttatttatggtgctggcgaagcgtcacgactggcagttatttattgaggtgacgggggaaggtggaagcgggaaatcagtgttcagcaatatagctaccatgctggcaggtgagcacaacaccgccagcggaagcatgagtacgctggatctggctcgtggacgtgcgcagtttgtaggcaaaagtctgataataatccctgaccagacgcgttacgttggcgaaggctcagggattaaagcgattacaggcggcgacccggtggaaattgacgggaaatatgagaaacagttcacaactgtattaagtgctgttgtcatcgcgaccaataacgagccgatgacatttaccgaacgtaacggaggtattgcccgccgtcgcgtcatattcccgtttaataaccctgtatcagaagaagataaagacccggaacttgcgggcagaattcgacgtgaaatcccggtaattattcgccatttactcaatgaattttcagacccaaaccgcgctaaagcgcttttgcttgaacaaaggcagtcactggacgcgctgaatgtgaaacgagggactgatccggtgatagatatgtgcgcagcgctgtacttcatgagcgaacctaaggggatgatgatgggaggtggtacatgggcgggacaaccggaaccacgtaaatatctctatcatctgtatctgtcttttcttgaatatcacgggctggggaaaccactttcagtgaataagttttcccgcgccataaaattcgccgccagagagtaccgtgaaagctacctaactcgtaccatcaatggcagagcgcaaacaaacgtaggtatcaacgaactagctgaggagtttataccgagggcgtatggagtcgggacagaaggtggggatgaatag

SEQ ID NO: 400404 - DNA, 234 bp, Salmonella enterica
atgcgtaacgatattgcggacgtcactttagacgaagctactgaaagtgcttttcatgccgaaattatctgtagtctgatgctggacagcgattatgaaatgaccatcggcgaacttaacgcaatgcttaccttgttgaagcagctctccgccagtgctgcaagctggcttatcggtgaacagggcgaacggatgtatcaggacagacaagggagacagaatgagcacgactga

SEQ ID NO: 400405 - DNA, 204 bp, Salmonella enterica
atgcttaatacctgcatcgcacatagttacgccattaacaaacatagccttactatgggtatttaccacggactacaggccaccagtcacgaagaagccttaacaaccgtacagcatgagatgcaaaaacggggatatacccacgtcaaaatcactcgcctgtacacgtcacctactgagattacgggggtgaaacatgcgtaa

SEQ ID NO: 400406 - DNA, 456 bp, Salmonella enterica
atgaaacttcaaaataaccccactcaggggtgcggcattctgctccctggaaaaaatcacaacggaaatttcgcggaaattatacctgttatttccggcgtgattggcaaccagaaagcaggaattacgagagcaaaggcgctgcataatgtgcggggtgtgaagcgcgttttctcaagctggtttaattccagagtagaacggtacagatttacgtatggtacagattttgaccaaccaacaccggaacgggtggaaattaccagagccggacgccctgaaattgattatgtaatttcgctggatatggctaaagaactggcgctttgtttccggccagaactccgcatatttcaccactaccgccgccagagaacgagaaaaccgtttatagcttcccgccgttcgtctggtgtttgctgcacgtattcgtgtagagggagacatcatgcttaa

SEQ ID NO: 400407 - DNA, 747 bp, Salmonella enterica
atgataactactgagaatcttacgccgcttgatgagctgataaatgttaaacatgagtttatctcgttacgggatgtaatcaggactgttgaaagcgtatatggcatgaggtatgaagatattgctgagtggcttatcatgaaactatgtatcagaaataaaatacttacagttgagagtaaaggtatcgccggggcaattgataaatatagtgaaggcgaagataacgtaattctcatccaaatgctgagtgatgttatggtttatggtgaagatgttatggagccatattttaatcaaatgggatatgaaaatgaggatgttacaccatatgaaatgttccagtatattggttttatgcgtgaagacattgaaaagattaccgggattacatttgacataggtttttttagtgataattatgaagatgagtattatgaatctgatagtgaaccacataaaacagcagaagataataatattgttgcgatgtgggataataaatacggcatgaaaaccgcactgaaaattatagcgggtctgtcgattgcgattgccggaaatgacaaaagatatcagcgaaaaggcgggctcaataagtcggcagtctcacgccttgcaacaaatggcctggctaaatatggtggttctgtcggtgtgtctgacaggcgaatgactgaactcattggtgaagccttgaattatgtaccagatcttaaaggtggcgcggacggcgggcaaccatga

SEQ ID NO: 400408 - DNA, 207 bp, Salmonella enterica
atggcgatgaaatactcctggttccatcatcatgactgcacaaccgagcaggccgacacgctgatatcggattatcagaagcggggcgtaaggacagaaaagagcctgaactctgacttcattacctggactgtcagcgcccggctgcctgaaggcaataaaccaccgcgtataaatcgccagtggcaaaaccggatatgggggtga

SEQ ID NO: 400409 - DNA, 264 bp, Salmonella enterica
atggccgtgggggccgttccggtcttcgctaatatcgacagttctttcaatatgcttccggatgaagcggagcgcctcagaactataagaactaaggctgtgttaccggtctgtctttatggctcatgcatgtatattgatgccattcaccgaattgcccgcaaagccgacattcctgttatcgtggatgcagcccagtgctttggtatcaggtcactcatcggtcactgtgatctgctggcgttgagttttaatccgtactga

SEQ ID NO: 400410 - DNA, 183 bp, Salmonella enterica
atggataacctgcaggctgccacgcttagtgtcaaacttcgccactttgagaataatgccagaaaacgctgcctgcttgcagcccgttaccatctgttactggcagacctgtcacataaaatgacacttccgtcagatatccttcagaatacatggcatcttttcccggttctgctctgctag

SEQ ID NO: 400411 - DNA, 447 bp, Salmonella enterica
gtgcttctgaaagaatacattctgcattattccatctgccactgcataaccatatgtcgttccaggagcagaacattattaccggggtattgtatgactattttaaataaagactggccggttgaattaccacggacaaaggccagaagtgttacgcaagtaccacctcagccgcttttctatttcatgtgcataaagttgaacttgaaccctgtggtaaatagtggaatgctcgacattcacgccacgttcagccagcatttcctggagttctcggtaactgatgccatatttgcagtgcaagcgtaccgctcacaggatgatatcgcgcatgaaaatgtcgaccttttaatagactcatactctgtttccctgaaaatggataaactagtctaccatcatcggctatttacaaaagtgccactcatactggctaattttttttaa

SEQ ID NO: 400412 - DNA, 159 bp, Salmonella enterica
gtggtttcctatacctatcccaaccggagtatgcgatacgcttggggctgcatgagcatgatctgcaatattaccgccgatattagaacctatacggcccataccgccaaaatcacctatttccgcaccaatagtaccaccgatggccccgccaactga

SEQ ID NO: 400413 - DNA, 171 bp, Salmonella enterica
atgctgttataccagtttctatgccatatcagcgaaatccagtcagtctttaccctagagaaagttgagctacagagtaccacccaaaatgttataccgcgcgccggcgcagtggtgatggcagatttaggttatccgattaaagtcaagtcccctgaaaacgccgtatag

SEQ ID NO: 400414 - DNA, 444 bp, Salmonella enterica
atggaaactttaacacgaaaactttctaatggtatcgttatgacgcttcgctgtcccgccgacagtacaaaaagcccagcgataattttgtgtcatggcttctgtggtatcagagaaactctgctacctagttttgctgaagaatttacccaagcaggattttccaccatcacgtttgattatcgtggcttcggggacagtgacggcgaacgtggacgccttgtgcccacaatgcaaattgacgatattatttctgttgttaactgggcaatagaacaaccctcgattgatgcgcagcgtattggcttgtggggaacatcatttgggggatgccacgtatttggtgcggcagtcacggcagtcaggggggggattaccgggaatcaaatatctcaatttagctactacaatgtatgtgcgcataatctatcttatgttaaataa

SEQ ID NO: 400415 - DNA, 4533 bp, Salmonella enterica
atgaaacataataacttcaggctttcagcagctggcaagctgaccgccgcgcaggcaatcattctcgccgcgtccagcagcgcttacgccgctgagattgtcgctgcaaacggtaccaacggccctggcgtttccactgctgccaccggtgcgcaggtggtcgacattgtggcgccgaacggcaacgggctgtcgcacaaccagtatcaggacttcaacgtcaaccagcccggcgcggtgctgaataactcccgcgaggcggggctgtcacagcttgctggccaactgggtgccaaccccaatctgggcgggcgagaagccagcgtcattctcaacgaagtgatcggccgtaacccttccctgctgcacggccggcaagagatattcggcatggcggccgactacgtgctggccaacccgaacggtatcagctgccaaggctgtggattcatcaataccagccgcgcctcgctggccgtcggtaacccgctggtagaaaacggcctgctgaaggggtacagcaccttcggcaaccgcaataccctgagcctcaatggtaacctgaacaccagcggtgtgctggatcttatcgcgccgaagatcgacagccgcggtgacgtgatcgtccaagactttaaacacccgaatggcaaagtgacccctgcggcaatcaacgccatcagcggcattaaccgcgtggcgcgcgacggcaaggtgctggccagcgtacagccgaccacggctctggacagctactacctcggcagcatgcaggccgggcgcatcaacatcatcaacaccgcgcagggcagcggcgtgaagctggctggcacgctggccgccggcgacgagctcagggtgaaagcctacgatattcgcagcgaaggccgcgttgacgacgccagcagcaaccgtaacggcggcgacaactatcagaactaccgcggtggcatctacgtcaacgaccacagcagcagccagaagctgaccctcaccgagctgaaaggcaaaaacatcagcctggtggcggataaccacgcgcacctcaccgccaccgacattcgcggcgaagccatcacgttgcagggcgacaagttgacgctcgacggtcagcagctgaaacagatccagggccacaccgacgaccgctggttctactcttggcaatacgacgtcacccgcgaatgcgagcagcaacaacaggcgggcagcaccgtcgccgccagcggcagcgccaaactcatcagcacccgggaagacgtaaacctgttgggcgcccacgtcagcgccgaccgggcgctgagcgtcaaagcggcgcgcgatgtgcacctcgccgggctggtggagaaggataagtccaccgagcgcggctatcagcgcaaccacacttccagcctgcgcaccggcagctggagcagcagcgacgaaagcgaaagcctgaaggccagcgaactgcgcagtcagggggcgctgacgctggaggccggcaacaacgtcgcgacccagggcgccaggctgcacgccggccgtgatttgacggtcaatgccggtaaccagatccagatcgggggacagaaaaccgccaacgccaaagcggtgcgcgatgacaaaacttcctggggtggcatcggcggtagcgacaacaaaaacaacagcaatcgccgcgaagtcagtcactcttccgaactgaccagcgacggcaccctgcgcctgaacggccagcagggcgtcatcctcaccggcagcaaggcacgcggcaaggaaagcggcctagtcaccgccacgcagggcggcctgcgcatcgacaacgcgctgagcaccaccgtggacaaaatcgacgcgcgcaccggcactgccttcaacatcaccagcagttcgtacaaggccgacaacagctaccagagcagcaccgccggcgagctgaagtctgataccaacctgaagctggtcagccgtaaggataccgacgtcatcggcagccaggtaactagcggcggcgagctgagcgtcacgtcgcagaccggcaacatcaacgccaaggccgccgagcagcagccaaaaatcgatgagcagaagaccgcgcttaccgtcaacagctacgccaaaggagccggcgacaagcaataccgtgccggtttgcgcatcgaacacacccgcgacagcgaaaaaaccacccgcactgaaaaccgcgtctcgaccctcagcggcggcagcgtgaagctcgaggcggagaaggacgtgaccttcagtggctccaaactggtcgccgacaaagggaacgccagcatcagcggcaacaaggtctcgttcctggcggccgacgacaaaaccacgtcggacaccgagcagaccaagatcggtggcggtttctactacaccggcggcatcgacaagcttggcagcggcgtggaagccggctacgagaacagcaaaacgcaggcgcagagcagcaaggcggtcacctcgggtagcgacgtcaaaggcaacctgattgtcaatgcccgagacaggctgacccagcaaggcgcgcagcacagcgttggcggcgtctaccaagagaacgccgccggcgtcgatcatttagccgccgtcgacacgagcagcagtaccaccagtaaaagcgacgttggggtgaatatcggtaccaacgtcgattacagcgccgtgacccgcccggtcgagcgcgcggtcggcaaggcgaccaggctggacgccaacggcgctatcaaagacatccgcagtataggtacgcctaacgtcggcctggatgccggcgcgcagggtggtagcagcgaaaaacacagcagcagttcgcaggcggtggtcagcacggtaaaagccggcagcatcgacatccgcgccagaggagaagtgcgcgatcaggggacgcggtatcagacgagcaaagggtcggtcactctgacggcgggcagccatcatagcgaagccgcgacaaaccggcaggaagagcagaaccgcgacacccgcggtagcgccggcgtacgcgtctatacctccaccggcagagatctgaccgtggacgctaggggcgaaggcggcatccagcgcagcaacagcagcgccagccaggcggtgaccggctcgatcgacgcggccaacggcatcaacgtcaatgtgaaacaatacgcggtctatcagggcaccgcgctgaatggcggcagcggtaaaaccactgtcgacgccggcggcgatatccgcttcgatcaggccagcgataaacagagcgaaagccacagcggtttcaacgtcaaggcctcggcgaagggcggcttcaccgccgacagcaaaaacttcggcgtcggtttcgacggcggcacccgcaacggtgaaagcagcggcagcatcgcacaggtcggcaacgtcagtggccatcagggcgtggagctgaacgcaggccgcgatctgatgcttaaaggcaccgacgtcaagagccagagtgacgtcaccctgagcgcaggcaacaaggtcgcgctgaaggcggcggaatcgcaccaaacgcgcaaggaaagccagctgtccggcaatctcgatctgggcgctggcagcagcgacagtcaggaaaaaaccggcggtagcctctccgcaggtggcgccttcgacatcgccagggtgaatgagtccgcgaccgaactccagggcgtcaatctcacttcagacggcaaggtcaccctgtccgccggcggcaaaggcgagactgacgcgctgcatctgcagggggtcagggtcagcggcggcagcgccgcgctcgaggcgaaaaacggcggcatcctgctggaatccgccaagaatgaacagcacaaggacaactggaatttgggcattaaagccaacgccaaaggaggccagacgttcaacaaggacgccgtcggcaaggtcgatccgaacacagacaaagacacccatacgctgggcgccggtctgaaggtcggcgtggaacagcaggataaaaccactcacgccaactccagcatcaccgcgggcgacgtggcactcatcagcggcaaggacacccgcctcgccggggcacgcctcgatgccgacagcgtacaagggaaggtgggcggagatctgggcgttgaaagccgcaaggatgtcgagaaagacgtgaaggtggatgtggatgccggtctgagccacagcaacgacccggcaggtagacaagggcagctaaaggtcaacgtagatgtggtgaacaacgacgcggttggtcagcaatcagcgattgctggcaataacggagtggtgattcagaacgatggtcagactcaactgacaggcggtgaaattcgcagccagcaaggtaaggtggatctgggtggtggcaaggttagccaacaggatatcagcggccagcgctatcagagtggcgtccgcgtcgatgtagctaccacggtagatggtttgttagacggcgggatgaaacaaagcctcgaaggtaaagtgccgttcgcaagcggtcacacctcatctaaacaggtagaaactaaagctggcatgttcaacaaccagtga

SEQ ID NO: 400416 - DNA, 1671 bp, Salmonella enterica
atgatgaaaagaattaccgccttgatgctgttggtcagcacggccctttccgccgaaactctgccggactcccacatgatgcgggatatgtcgatgggggaatcgcgtcgcgcgctacaggacagtactcgtggcgtcaaccagctgattgaacaacgccgctatcagcagctgaaacaacagcacttgctggctgaacctgaaccggttgcgcccgctctgccgcaatccgcgcagtgtctaccgatcgctggcgtttatctgcaggggataaacctgctctcaccggtcgatttatccactctaagtgcgctgccgggagagtgtatcagcaatagtgatattaaccgcctgacccgagaattaacgcggctttacgtgcaaaaaggctatattaccgcacgtatacaaattgttcgccctaattcacaaggagaattggggctgagcgtgaccgaaggatttatcgagaaaattgaaggcggcgatcgctgggtcaacaacaattttttattcccgggcctggaaggcaaaccattgaaattaagtgaacttgatcagggcctagatcaggccaatcgtttgcaatcgaatactaccaagctgaatatattacctggtcgacaggttggtggttcgattatcagtttgcgcaatcagcacgacaggccatggctaatcaccgccgatatagataattacggtcagaaaatcaccggtaagtggctggcgcgcgctactgccacgctggacagtccgtttggcctgtcggatttcgtcagcctgaatatcaacagcacgctggaaaacccgactcaccgctacagtcgcgcttataccctgctctattcgctgccatatggcgcgttgaccttcagcggattcgccagcgtttcgtcttatgacgctcatcagttgcttcagagcaccgtgagtaaactgaacgggcgcacccaacaatacggactgcgcagtgactacgtgtttttccgcgatagcgaccagatagacagcctgagcggtcagctgacctacaagagcatcgataactatttcaacaacagttacctcacagtcagtagtccgacactgaccctagccgagctgagcgccagccacctgcaaattctgcccaacggggtgttcagcgccagcctcagcgtcgaacaggggctgagtgctgctcataattcggactcgggggacttcaacagccagttcaccaagggcaagctgttcgccaacctcagccagcaccttcacctggacgaaacgacctatcagctcaacaacctgttctacggtcagtatagccgcgccccgttgccgggtgtggagtggcttaatctctccgatcgaggtgccgtgcgcggctttagccgcagtaccctgtccggcgacaacggctggtatctgcagaacacgctgtcgcgcagcttcactctgggcactgctacgctgacgccgcgcctcggcgccgatgttggccgtatcctgccgcggcaggacagctcaggctggagtagcagcgccggtctgaattccggcgttacatggcgatatcagcaggcgttggtcgatctcgaggtcaaccacggctggatcttgtcgaatcacgccacgcctgaagagcctgttcaagtgctggcacgcttttcttataccttttaa

SEQ ID NO: 400417 - DNA, 162 bp, Salmonella enterica
atgtcatactttttatgtgatgttatttttccatttatcttattcgcaacgccttcattcgactttcgactgcactaccccatcgacgttattgctcagtgttttagctggtttctgactgattcactgagcctgcatgatatcgaagagattattcggtaa

SEQ ID NO: 400418 - DNA, 489 bp, Salmonella enterica
atgaggaagtatatttcattattgagtgttagctttattttacttaccctaagtgcatgccatcagcagccagtaaagagtgctgtgacacctcaggctataacagataaacaaacgataccctcttttgaactgctgccgctaagcgaatcagctcattccgggtgggctgaggttgagcttactggcagaaaatggtacatagatgctgacgccacattgacccggaatgaactgggatctttatcatttgttaaaaacaccaaaggtgagttatttctgaatattatacctaatcaacacgggcaagccaaaattaataatgcactgatgaataagagtaattatatcttaatggtgttaaatggccgagctctttcactttcgaaaatcaactcttcacagactatacctttttatgttgggagtgaggaggttaccattaggacagcagaagatatcactcaaaagaagattattcgcaagtaa

SEQ ID NO: 400419 - DNA, 828 bp, Salmonella enterica
atgaaaagacatacagttaaattattgttgttagccgttgtagcagccttatccggttgtcaccagaatccaagccatcctgaaaatgacggaagtattaaagaagttgtctggccgtcaccaaaaagagcaaaactagggacggggctgggagtgttccctacgccagaaagtatttctttgctgaataatgggatgactaaagatcaggtgtatatccttatcggcagcccgcacttcgatgaagggctttttagggtcagggagtgggattaccttctccacttcagaacttctggttatggaactcatggagtaacaacgtgtcagctgaagattatttacaattccgatctattagtttcaggtatatactggaaagcggttgacccgaaaaatgatttttgcccaccaaaatctggtttacataaaggattgcaacactatacattgagtgcggatatacattttggactgaatcagtatctgataaaaaaatataatcaggatacattgaaaaatcttgataaaatcatttcagatattagcgaaaggggtgagtataaaagtatctctgtctatggctacacggattttcagggtgggcgaagatataatatggagctgtcagcattacgagcagaatctgtggcaaactatctcatatctaaaggctttcctgagaaaaaagtattctggaagggaatgggggaaactatcccggagaccagttgccctggtttaataaatgaaaaattgactgagtgtttactgccggacaggaaggttgtgattgttgttaacccaacaagtagtgacatcaaataa

SEQ ID NO: 400420 - DNA, 5040 bp, Salmonella enterica
atgaataatatgaagattacacctattgcactaatgctaatcaatgccattggattgagttctgtacatgcagacacatcagtcgttaattgcaacacaacagaccatgatagtgatttattttgtgggaataacatcaataccaacggggcagtaaatagtgtagctattggtaatagcgtgttaattccaaaaatcagtgttcctggaaaaacaggcattgagcaggctgtggcaataggaagtaacgtgcaagcgacaggagataattcgctggtgataggtaacgaggctatcacagggaaatccgggtctattgccattggaggtgatgatgctgccggaacgtataatgcaaacggcaagggttatatattaagagcatttggttcgaatttttttgataataatataactgattacagagctaatgctgcaatcggtaatggtgccgtatcgttgggatctaactcgcaagccctcgctgacggtgccgtttcgatcggtgctgcggcgaccgctggcgctggaactcaaagggggaacgaatgggacagttcatccggaaaacagtcaatagccctgggggccgaaagctcggcgctaaatgataacaccattgcgttaggttatcgcactacatcaacgggaaactcgagtacagcgattggaaacagtaccgttgcgaccgctaataatgcacttgctttaggaagtcattctcatgcagacgctgatggtgcagtcattattggaagtgacgcaaaaaatacaagagatactctgacggccgtgggattgccggctgataacggtgttaacgccatcggtattggtagttccgtaagaagtgccgctaatggcattgccattggccgtggggctgaagctaaaatatccgaagcaacgacaatcgctatagggaatggcgccgtaagcgcgggggggattgcactgggtcaggattctgctgtcgtaaaaggaaataatccttcaggaacagcgagtgcttccgtttctattggacggcaaacaacagttgctgattatggtgtggcattggggtcaagagcctctgttgggatgacgctcactgcagatggtattcctgaaagactgacgtcgggggggctgtacggtaccgcggttgggataaacagtggcgtttattcgaattcggcgctggccgtgggacataatgcaaaagtcagcgaaaatgctgatgccgctctggctgtaggctataactccctttcttctgcacagaatgcaattgcgatagggaacactactaaagcctcggctgaaaacgctattagtattggttctgaaaactctctgactacgggttctgttgcgataggcgtcggtgccagggctgggcgagaagatattttgagtctgaagagttctgatcaaccagaacgaacatggattggaaagcaaaataatattgcccttggagctggtgccgttgcagatggtggacgggtgatttcaatcggcgagaatgcgggaagcggtacgcctgataactggaacattcataatgtcaatatcgggactaatgccggaagtcaggcaaaacgtgattacagcgttgccctgggatatgaagcgggcatggttccagtgggttctcaggacggaacagaagatagccagcgttctccaagtattaatatcgggaaacaggcaggaaagaacacggtgtcttacgggaatatttccgttggagataatgcgggtactgatatagcggacagcagaagtgtcagcaatacgatgattggtaacggtgcaggagcgggtcttgcatccaatgatggcaaaaatgcgatttttcccggatttggcccaggggggaatacacttattggaactgactcaggacgccagttatccggcgatagcaatgtagcgctaggctctattgcgggtgatcgggccacgggcgataataatatttacgtcggtcatttagccgggcagcaatcaacatcagatcgctccgtcataataggctctcaggcaggacttgggacaaataacgacagaggtgtattgattggtaactttgccaatggtggagtaacgacagcaaccagaaatgtagtaggccttggctcatcggttaaagcgacaggatttgagagtattgctgttggttttaatgcaaattcatccgcaaataatgcaacatcaattggccgctttgccagtgcatcgggtatcagtgccgtagcgttgagtacgggggctcaggccaacggagaaaattcagtcgctattggcaatggtacgaaggcaacggccaccaataccatcagtattggtaccggaaatacagttagtggcgataattcaggtgcaataggcgatccaagtacagtatcagggatgaattcttattccttaggtaataacaatactgtgtctgcgaataatgcttttgtgcttggtaattcagtgaataacgctgttgacagttcagttgttcttggcgatggctcaacggtcatggccgctgtcgcaactcccgaatatacggtcaatgggactactcataaattcgctggatctttgccagtgtcaacggtcagcattggggactctgggaaagaacgtacgttaacgaatgtggctgccgggcgagtttctgctgccagtacagatgctattaatggtagccagctgtttgcggttgcatccgaagttgaaaaaggcaatcagtttgccgggaataccggggcgttcaaccggcgcctgggtgaaatcaccaccatcagcggtggtctggtagccgatgccaccgccagcaacaaaaatatcaggacggtggcgaaggatggccagatagacattcagatggcggataatcttgacgtggccagcgtgaaagcgggcactacgctgctcaatgacgacggactgcatatcacaggcggaccttcagtaacctcgggcggtattaacggcggaaacaagatcatcagtaacgtgagtgacggcgtcaccgatacggatgcggtaaacaaacgacagctggataatatggccgcgaccgccagcaggggctggaatatacaggcgaacggtggtgatactgagactgttgcgccgggggacacggtgaatgttgcaggtggggataatattgaggtgacccgcaccggcaggacgctgaatattgccacgggcagaagagtcagttttgataatgttacgatcggtggccttacccttgataaggatacgggcaaaatcagcggtctttcagacggtacgctgtcagcagacagtaaggatgcggtaaacggcggtcagctgtttggtaccaatgtgaacgtgacggcaaatacccgtagtattgccgctaacaaagcactgcttgacagtggtttgaacttcgtcgggaataccggggcgttcaaccggcgcctgggtgaaatcaccaccatcagcggtggtctggtagccgatgccaccgccagcaacaaaaatatcaggacagtggcgaaggatggccagatagacattcagatggcggataatcttgacgtggccagcgtgaaagcgggcactacgctgctcaatgacgacggactgcatatcacaggcggaccttcagtaacctcgggcggtattaacggcggaaacaagatcatcagtaacgtgagtgacggcgtcaccgatacggatgcggtaaacaaacgacagctggataatatatcgtctgttgtggggcaaggactgacatttgcagccaatgaagggagcgatattacgcgtaagcccggggacactctggttctgaaaggcgatgcctccacaaaaggcgattacagtggtaaaaatattaaaacggttactgatatttcttccgggatgatatcaattcaaatcgctgaaagtccgatgtttggcagcgttgtgatcaacaacaataacagcggaaaaataacaggcgtgaatgacggggccatttcggcggaaagcaaagatgccgtcaatggaggacaaatccatcgggttacaacgtctatcagtaatattattggtgggaatacccattcaggggcggatggcagccttgttaccagtaatattggtaatactggtaaaaatacaattcatgatgcaattgattctgtcagaagtactgctgaaaccgccagttcaggctggaatttgtcagtcaatgggcagcaatcaagtgcggtaaaaccgaaggaaacggttgatctgaataataaagacgggaatatcagtattgctaaaaaggataatcaggtgagttttaacctgtccgattcagttaaagtaaaagaaagcatcggtattgaaaatggaccgtcgttgacacgaaacggaattgacggtgcaggcatgaaaatcacgaatgtagctgatggtgtgattgcagcgggaagcaaagatgtcgtaaacggaggtcagattcatgattttgtcagcggcgaaatcgccagacccattacattttcggcggacagtggcaccccatatgatgcaagaatgggaacagtagtaaacgttaagggggataataaaaatattcatacgacggtaagtggtaatacgcttagcgtcagtctgaatgagagtattaatgttaaatcggtcacggcaacagaatccctctccgtggcaaatggtgcgagtgtcgatatggggggaaatgctattcataatgtaggaaatgcgacccgtccgggagatgcggttaactatgggcaattccagcaggctttcggtaacctgggaaatcagattaaccgtgttgagcgcagagcaaacgcaggtgctgctgcagccatcgccacagccggtttaacccaagcctatattccgggtaaaagcatgatgtccatgagtgggggaacattccagggcgaaagtagtctggcaattggcatgtccaccatttcagataacggaagctgggtgttaaaaggctcattctcctcaacgacaagaaatcagaccggcgcatctgtcggcgtgggattccagttctga

SEQ ID NO: 400421 - DNA, 135 bp, Salmonella enterica
atgccaaccgccggttcgctgaaactgggcaccattcatgcttcagaactcattcgctctttgctgaaaagcttgcgcccatcagggctggcacaggcgatcatggaagtggagcgtgtcaacattctaaattag

SEQ ID NO: 400422 - DNA, 495 bp, Salmonella enterica
gtgaaacaaaattaccttcgtgcagaaacgctggtcagcgccaatgcccggctggtagattttcagtccacgctggagcttgctggtggcgaagtggcgtcagctgacggcatgcgctttgtcacgtcggtgaaaaccatcaactccggtcctaacagaaaatattttggttccggacgtggtatcacctggtacaacttcgtctcagatcagtactctggatttcacggcattgtggtgcccggcacattgcgggattccatttttgtgctggaaggccttctggagcagcagaaagggctgaatccggttgagatcatgacagacacagccggaaccagcgacattatttttggcctcttctggctactgggataccagttttcccccggcttgccgatgctggtgaagcggtattctagcgggtggataaatcggcaaattaaggtcacgtggttgtgccgatctgtcgaaagcctaggatcagtgggatga

SEQ ID NO: 400423 - DNA, 687 bp, Salmonella enterica
gtggagagcagacgctctgaccagctcggtatcgactgggatgcggtgttaaacctcagcagcgtgaaggccaccttcactaacacgtttaccagcgccaacgacgcaattgccagcggcggcgcgatgatcgtcgacggcaagggggccgggacaaaagcgctggtcaaggcgttagccgaacagggtaacgtcagcgtggccacgcagtcctcgagtctcaccaccaacctgagtgccgtgccgattcaggtggccctgcagcaggactatatctctgacgttaccagtgaacagaccgccaacgtcggcagcagcatatcttcaacacgttccaccatcacgaccggcttcaacatgacggtcctgccgtacctgatgccggccagcagcaatatgcagctgcagttcagtgtcaacatgtctgacgacccgaccatgcgcactgttccacagggcgaaaaaagctccgtggaactgatgaaaacccgtctgaagaccttcacgcagcgcgtcaatatgaagtccgggcagacgctgattttaagcgggtatgagcagctcaataacaccgctgatcatcagggcgtcggatcatcccgcaactatgccatggggggcggtgcaagcgggtcgcagaaccgcacgcagctggtcatgttcgtcacaccaatcatcctgggatag

SEQ ID NO: 400424 - DNA, 1116 bp, Salmonella enterica
atgtttaacattatccccatactgacccgattcatccctctgctgtcacctttaataaaaggatggacgtacgcagagatctggctgggccgaaaaaactttaatgccagcgatcgtttaatgatttatgaggatctggcctttttgctggataacaacgtcaaacttgaagacgctgtcaaaggcatgagggataacagacgggaaggcacgttacgccccggcgccagcgtttactgtctgcaggaggtggcacagtctctgactcaggggaaacctctggacatggggctgcggcgctggatacccaggaatgaggctgccattattcagtctggggtaaaggaaaaacgtctggcggacgctctcagacgtgctatttacctggtgcaggcggtacgggagattcgcacaacagtagtggaacgtctcactcagccgttaattttgtttatcagcctgatcgcgatggcctgcatgatgtcatggtactttgttccgaaactggaaaccctgaaaccacgagaactgtggacagggagtctggtatggatggctgatatttccgatttatttggccagcacctaagcctgtgggtcaccggtatcctgtttttcaccgcatgggcttactggtctttcgggaatcttaccgggcccgcccgtcgcataatggatcgatatcctccctggtcaatttatcgtgaaattcagggagcgacatttttgctgaacttctctgcactctccagagctcaggtcaaaaacgaagatgcactgagccagctaagcctgcatggttccccgtggttacgccagcgcctcaatgccacacatcgtctgacgagcagtggtcgttcactggggcaggcactgtatgaaaatggctatcagtttccctccagagaggcgatcaatcgcttaaaactcctgacacagggggatggcggggagacgattatagacagtttcgcccacaatcagcttgcccgcacgctgaccaacatccggatgctggccagctggctaaatctgatcatttacctgctttcaggtctgtatctggcgctggtcgcctattcaacgcaaaacctcagcgctgttaccggcgtttaa

SEQ ID NO: 400425 - DNA, 594 bp, Salmonella enterica
atggacaacattatgttatcccgacgccccacgtccgttaatcgtggagaagtaaacctgctgggactgggtctttctattgcaataggtgccgttctcatctacggcgtcattagttatgccaccggcgtttttagtgctaatgatgtgcaggccgaatacagcaacggcacgacaatcatcacgaatgcccgcgcccgtctgaaaacagacggtatttatgatttcagcggtgctgctgacatgaccggcacgttcatacagttaggtggtgccccgaaaggcatgattgtgggtaataaagcttcgggttctgcaacactgaaaaatcagtttggtggctcagttaccctcgcgcctgcaaccagcaatggtgcagcaaaagcggcctttacggtgacctataatgccattccttacgaagcctgcacgcagttgtcgacacaaatgagcggcagtccaaatgtggccacgacgtcgattaatggcacctcaaacagtggcgtggtatctgccgctaacgcagggaagcagtgcgtggctgacagcggcagtacggggacaaatacgctggcgttcaccaccaacagctaa

SEQ ID NO: 400426 - DNA, 612 bp, Salmonella enterica
atgagcctctggatgggcattctcacgttctcgttgctgtgcttatgtctttttttgcaacttcggcaggtcaatagattcctgcgtgaacacaacgccccggcgttacccacccggttgtccgacagcgtgtcactgctgtttctgctgctcgggatgtttcttgtttatcagggcaatatgcatgccctgcttatgttcaccgccctgctgccgctgctgtggctggatgcctggcagcactggctgccgcttcgttttaccaacgcattctggtgtgccggtctcctggtccggctgctgcccgacgggcagtttctgtcgctgcagcaggcattgttcaacagcatagtgatgttctgtctgatgtggggcgtgtggtggagcgtgaaaagactttgcggacgtgaagcgctgggacggggtgatgttcaccttatcgcagggttgtttgcgtggctcccggcgaccaccgcgctctacagctgcggttttgcatttttaatgatgatcgtggctgttatcagaaaaccccagccgctggctccctggttatgcctgtccttactggccggtcagtttaccggggacgccactcttctccggagttaa

SEQ ID NO: 400427 - DNA, 1338 bp, Salmonella enterica
atgaataaaatcaaccagggtaacgcacaactgatgtctctggtgctggtactgggtcttgccatgatggcagcgccaagaggaatcgaaatgatggcccagcaacagtcagagcgtatctgggatgtgacggccggtcagtttaataccgttcagatggccgcccgccagtatatcagtgacaacctcgatacactggccacacaggtgagaccaggtaacccggtctatgtttcggtaaacacccttaagactaccggccaccttcctgctggctttggcgcaaatgaccataatcaaaactatctcatcgcggtggtcagtaaccccaaaatgacgagccagctgcaggcttttgttatgacgactggcgggcagccctgggattttggcgcgctccgtcatatttccagcaatatatcgggtctgggggggtatgtctggcctgataatcaggcggttggtgcaggcggtggctggaaaatgaaactgtcagactacggtctgagcagtaaacagggttcacttgttacctttattccttccgaccagttaggcaccagtggtcaggggaatgaccgtttgtatcgttacgccgtcaacggccatcccgatttcaaccgtatgcacactgctatcgatatggacggaaataacctgagtaacgccggcgatataaccggtaaacaggcgataatcagcggtggaatcagcggtcagagcgcaacgataaacggtgaaattaaaggtcagcaggccacgataactggcgatattaaaagtacgggcggatggatcaccactcagggtaacaagggctggatgaatgaaacccacggtggtgggttttatatgtcagacagcagttgggtacgcagtctgaataacaaagggatctataccgcgggagagatcagaggtggtcagttacgttctgatggtgacgcttctgttgcagggatactcaagctggatcaaatcaatgttgcagacacttcatgtcccacgaacggggctgtaagccgcactgtaacaggcgccccactttcgtgccaatccggtgtctggattaagagtaattccaacggtatcaaagcacctccaccgcaagacataggatgcagaatgctcggtggttcatatgcatatgcccgcgttgacaatgaaggacagttttggactcgttggaatacaaccacatggatcaaaggatctagtgaaacaacaagcaaacgttttattagagtctatgccggtggcatgtatgccggaacaccgggaggaagtacaagtgcttcaaaggaagattatgtatgcactgcagtgtggtcctggtaa

SEQ ID NO: 400428 - DNA, 2601 bp, Salmonella enterica
atgccggtcgtcatggccattgactccggtaacctggtcaaagtggccgagcgcctgcatcagaaataccccgacagcccgatgctgttcctgggggacgatgacccgcccaaaccccacagaccgggtaaccccggcaaagaagccgcagagaaagcggcccggctgacgggcggaattgccgtactaccgtcgctcaccccggacgaaaaagcacaggggctgacggattttaacgacctgcaccagtcccggggactggcggcattaaccgaagaactggcccccctgcgtcagaaattgttatccgctcccacgcctgacgcctcccccgaattacaaccgactgagactgttatcatgaacgaaccggatagtgtgaataatgaacctgccgcgcgggatgatgaaataagccagatggcagcctatgaggactggatggcatccggacaggatgccatacctgagaccgtccagcctgaaccggtccctgcagcgcctgtcgcgccagaagcagcggtacctgagactgccgagcctgagaataccgcgccgaaaacgctgacatcggacagcgctggcggaggtggcacagcgactgcggtgaaaaaagcccgccggactaaaaaaacggcgcctgccgatgccaaagagaaaggcagtgcaaaaccggcaaccgcccccaaaaagccccggcagaagaaagtcaccacggacgataaaccggaaaagccacaacaggctgcacccgctgcggctgacagccagagcgccacgcgggcagatccaacgccatccctgtcgtccctgctgaaacaggaatcgtccccggcatcgccgatacccgccccagaagacgaggagaatcagccggtcaccccatccatgaacgagtcagcaccgccgttacgcaaagcagacacttccgggacagacgagaatgggacaccggacaatgacgccccggtcaccgacgccatgccggagcctgatggaatccgctttgaaagaagccagcaggcgcgcgagcgcatcgatctggttgcgctggaaggcgcgttgttacacaagccgggaaatgagcgaggcacccagcagtatctgctggacggggagcgtgcgtttacccggtacctgcagcagggccgcatcattatggccacaccgcaggccagccagaatgaccgcatgatcctcggcgcactcctggtggcaaagcaggacatggttctgcaggggaacatcgaactcaccggcagcccggcgtttaaacagcgcgccatcaacctgatagcggagtacgacctgccgctgaagctcactaatccggagcaaataaaaatgcttgaggacgcgcgtgagaagttgcgctccgagccaggtctgccggatgaacccacgcccctgggcagcgaggcctccgaaattctggtccacccggtcggaaacaacacatctgctccacggtcctcagcgcctgtggcggcgcaggcggccagcactcagcgcgcatccaccgacacactcccgccagatattctgccgcaaaaggccccggcccccgtccccatgaacgccagccatgacgaagcttcggcgggcttgacggggacactgctggaacacggtgccgcgccgtataacttccggaaggatgaaagccacagctattacgcccggttgcgtaccgccgagggtgagcgcgtggtctgggggatcaccctgcgtgctgccattgccgacgccgggctgaaaaataacgatctggtcacgctgcagatgacggggaaagagaccgtcacagtggatgtgaaacagaaaggggaggacgggaaaccgctgctggatgggaaaggccagcccatctaccgcaaggaagaacgggaacggaataaatggatcgccagacaggccattgatcccaccgtcgtcaatgccgacacccggtcgatgaccccgcctggcgaactgctcgcgtattcactcaaggactggaataccctccaggccggggtggaagaactggcgaaaaaggccggggtatccctgcctgactggccgggcctgcccgatgctctatggatggagccggcggggaaaggtgtgcccagccccgaccgacgacctgacaaccccgcactccctgccccgtcccgcgatgccgggaaggcgcttttccaggcgatggatacggaacaacagctcaaactgttgctggtcaaagcccacggcgactatgtccagggcgttgtacttcatgacgatgtgtacaagccggtactcgggagactgtgtaaaaacgcccggggcgcgcctcacatgacgctcaacgaaatcacgcctgacggacttaaacccctgggctacggcaacccaattaacaacgacacgggcagctttaacgactatgtcttccgtctgaataacgaacctcagcgtttatatgcgcagggccttgaaccggaaaagcgtccggcggcactacagcagcagctgggatttgacagtgcaccggtggcacctgatcagctggtagtccgccgtgaacctgagtccggccaccgacacaccccgaccatgccgcgtcccggtcattaa

SEQ ID NO: 400429 - DNA, 153 bp, Salmonella enterica
atgaataccagtactcaattgttcaccataaagagcatggaatgtcctgatttagaaactacttttcttgatggtagtttcagaaacgcagtgatactgcagtcttccgttattggtatttccggctgtgttcgtgccggtaaattacagtaa

SEQ ID NO: 400430 - DNA, 465 bp, Salmonella enterica
gtgataccggtattgttttatgtggggaaacgcagtccctacccctactccacccgatggctggatgaatttgataaccccgaactggcgggtaaagtctatggcggggcttatccactggttgatgtgaccgttattccggatgatgaaataatgaatcatcgcagcatggcggcactgacgttgctgcaaaagcatatccatcagcgtgacatcgccacgctgaccgatcgtctgaccgtggagaagccggacaggcaaataagcaggctgaaaaagatgatttgtttcatacgggaaaaactgttgatttatctgccgttcaacgtcgagaacgggagggtttccagtgaaagcggctcattttctgagcgcgcagcactggtttttatcctggttattgcgttcatcctgacgggaagcgagaaactccgccacgacggttcggcgttcataaccacttga

SEQ ID NO: 400431 - DNA, 2205 bp, Salmonella enterica
atgaataagataacaaaaataagtccgcgtcctctggcgctgttgattgccactgtgttaagcggaaatgtctttgctggtgatgatgacatgatgaacgacggtgaaattatggtggtatacaccactgcggaagaggcgcttaaacagcagccgggcgtgtccgttatcaccgctaaagatattgaaaaatcacctccggtgaatgacctctccgatattatccgcactatgcccggtgtaaacctgacgggtaacagcgccagcggcagccgtgggaataaccgccagattgatatccgtgggatggggccagaaaatacattgatcctgattgacggcattcccgtgacgtcaagaaactccgtgcgctacagctggcgcggagagagagacacgcgtggtgataccaactgggttccggctgaaatggttgagcgtatcgaagtactgcgtggccctgccgccgcacgctacggctctggcgcggcgggcggcgtggtgaacatcatcactaaacagcccaccaatgactggcatggttcattatcgctgtacactaaccagcccgagaatgacaaagaaggtgccaccaggcgcgccaatgttaacctcagtggtccgcttattgacgacgtactgaccatgcgtctgtacgggaatatcaataaaaccgatgcggatgccgccgacatcaacacgcagcaaaatggatcatacgccgcaggccgcgaaggtgtgcgtaataaggatattaataccctgctctcctggaaactgacgccggagcagattatcgattttgattacagctatagccgtcaggggaatatttacgccggggatacccagtacagcaacggtaaccttagtccgggcgatttagtcagctctttatatggcgatgaaacaaaccggatgtatcgccagtcctggggattaacgcacaacggcatctgggactggggacagtctaaattcggcgtctattacgagaaaaccaataatacccgcatgcaggaaggttcgaccggtaaagtggaagggatgattaacaataccgattacgccacaagccgccttgaatcttatcgttcttccggagagctgaatattcccctcttctggatagtcgaccagacgttaactctgggggcggagtggaaccgcgatgagcttgacgatccggcctcaatgcaggcaacggataacgccggtaccataattggtgacgtttcaggtgatcccgcgaatcgcagcacaaaaaatagcgctaccctgactggcatctatctggaagataatattcaggcccgcccgggcaccgacattattccgggtattcgttttgactatcataacgaattcggcagcaactggagtccgagcctgaatatgtcacaagaattaggtgatatgtttaagctgaaagccggtatcgccagggtctttaaagcgccaaacctgtaccagtccagcaaaggttatttgctttccacacgcggcaatggctgccctaacaccatcacgacaggcagttgctatctgttaggtaatccggatctcgacccggaaatcagtattaataaagaggtcggcctcgaatttaattatgagggctgggatgctggcatcacctggttccggaatgattataaaaataaaatcgttgccggtaccgacattcttggttatgcctctaacggcaacaatattctgcaatgggaaaacggcggtaaggcggttgtcgaaggtctggagggcaatgtggtgatcccattgttgccggagaccttaagctggcgaaccaatgccacttatatgatcaagtctgagagtaaagataccggtaatccactgtctatcatccctaaatatacgatcaatagcatgctggactggcaggttaacgacaagctatccgccaacgtgcactggacacagtatggtcgtcagaaaccgcgtgaatatgctgaaattcgtaatgaaaacagcggaatgtcagacaaagagatcggcgcctattccattgtcggtattggcgctaactatcagtttacgaagaatctgcgactgaatacgggcatcagtaacctgttcgataagcgaatttatcgcgagaacgacggggcctctacctacaatgagccgggacgtgcctactacgcgggcgtctcccctctgttctccatgtttaaatcgtag

SEQ ID NO: 400432 - DNA, 198 bp, Salmonella enterica
atgaccatcgcacaacagcttgaacagaaaggcatcgagaaaggacgccttgaaggtatccagatcggcgaagagaaaggccggaatgaaggcaagctcgaagtagcccgtaccatgctgcaaaacggtctcgaccgcagtaccgtcatgaagatgaccggtctgacagcggaaaacctggaccaaatccgccattaa

SEQ ID NO: 400433 - DNA, 312 bp, Salmonella enterica
atgacggataaaaagtggtacagcatagaagacatagagctggctaaagcggccctgagtgagatgcccgatttgacgccaactcgcctgaccaagtcggctgttcttgaacagcttaaagagcagattgttgaactctcactcaaaaagggttatagcgtggaagacattcgaagcgcactggatactgctggcattaaggcaagcgtgaaatctgttcgtgatgttctgaattccgcaaagaaatcaccttcgcggacggcaagaaataaaaattctggcgttcagtcgaccgataaatctgctcagtaa

SEQ ID NO: 400434 - DNA, 123 bp, Salmonella enterica
atggcggtggcgcttgaggctttttgcctcatgacgtttcagatgttgtgtggcagaaagaagaaagccccgagtaatttttcaattaacccgaggctcaatcttgatactagacacatctag

SEQ ID NO: 400435 - DNA, 561 bp, Salmonella enterica
atgagagcaggggcccgccgcaacgtcggggcgcggcaagcgaaacggcgttgcgccttacagcccggcgtcagtttgccgggatgcgaaaagcgcaggccacggcgcgccaggggcggcgtgaccggaacggtcgcagcaagcctgccgttgacgttgcgacagctgggatggaaacccgctgccccgaaggggccgggcagagacagcgcagctggctcggtgcgaagcatgacagccccggttcccgtcagggaagtcgcccgtagtcagcgaaatcagaaggggaatggcagaagcaaaagcagaatgcgaaggcacaggcacaggcacaggcacaggcacaggcacaggcacaggcacaggcacaggcagcgtattattaccggcaggaaaaaaaccacacacactggccagaaaaaaccatcacccggcatgagaaaaatcaggccggcgacaggcagaatgcatcaggaatggcgctattttttaacctcatcctcttttctggcatattccggggcatttttatccgggagctgctcactgaactggcggtaa

SEQ ID NO: 400436 - DNA, 423 bp, Salmonella enterica
atgtacggaaccgtcagtgaaatctgtattgccttgctgaaacagcatgaaagcaacaaaaaaatcgccgtcattacctggacgccggaggacgtgcgggaagcgggcgcggagtacagccctaccgacgacgatgtgtcttacgtgctccgcgtcatcggtaaagcgggcagtgccggcgtgtggcggtacgggttaggactggaatttgttgccgatgaactcagcaaaattgctgctgcgcggacatctcgccagattgctgtacccgaagatgcactgcgtgtccttttacccctgatggaagccggaatgaacatcccgcgttatcagacgccggacacggccgccggagaattggccgcgctggatacgctcaaaaccctgctggcagtgccatttacgccgcgtccggctgaataa

SEQ ID NO: 400437 - DNA, 510 bp, Salmonella enterica
atggaacaggttaaaagaagcaaaagatatcttaatcgaatagagaaaatctactcaggtattttctcttcttcaggacataacaaagaagactacgatgatgatgttatttcatttttcatccattgctatcatatcagagattggatcattcaccttaacactttgaatatcagagcaagtcatgtagatatattcatcaatgaacaccaagcattgaagatttgcgctgatttagctaatggttctaaacattgcaaattaactcgctcaatgcgaactggtcgccaacctcacatcgcagctaaacaaaaacaaacatctacttggtattcaggaacaggtggtggtgaagtaatgacatgcaaatatactattttatgtgatggcaaattatatgatgccttacaattagcaagagaatgcattcaactttgggactcttatatttcagcgcttgatgctttgaaaacaatagtggttgataatgacccgacgaaaactatataa

SEQ ID NO: 400438 - DNA, 396 bp, Salmonella enterica
atgggctgggagcttcacatagtaagaacggaacattggttcgatagcgcaagtgttccaatcagtagtgaagaatggctccagcttgttaatgatgataaagaactatccatagataacaagaacggtgattttttcgccatatggagtggtcaaagtgaactcgatgaaccttggcttgactggagtgatggaagaatttcaacaaaacatcctgacgaagccctttactataaaatgttgcagatagctgagaagctacatgctgtagtcgttgatgaggatgatcataaatattcgctaccaagtgaccttatgaatccttcatgggcgaattcatcaccagttggtaaaaaacaatctttatgggaaaagttaatttcaaaactaaaataa

SEQ ID NO: 400439 - DNA, 243 bp, Salmonella enterica
gtgattgatgaatttcatgtgatgtatatgtataaaaaaatccaagcggaagccgcaactaccgacatcaaaacacttgaacaacttttgaaaaagttcaggagcgtggtcaacgaacgtcgtgaagaatactatcaggagattggtgagaaaaaagcgcataagttgaaaatgaaaagattacaaagaatgcttgagaaaatggcatgtgaccgagtctcgccagaagatctcattgactga

SEQ ID NO: 400440 - DNA, 351 bp, Salmonella enterica
atggcgagcatccattccaacaaccggttgctgcatctctttttcaacatccgccatccgctcgccgttgacattaaattcccaggcagggagttcatcagtggctgtagtggttgtctcagcgtctacgccttcagtactggtgttggctgctgcgttggcagatccagcggtatcggtggcactgtcggaatcagcggctgcggtagcggcgatagcggctcctgtgtcggtactggtgttactggcggcacgggtggtatcgccggaatcggtgttgtcggtagcgttttcatttgtatgcccctcactgatgctgtcgctattttctcccgttccggaatcagttga

SEQ ID NO: 400441 - DNA, 1038 bp, Salmonella enterica
atgatgttcagttgcagacaacaaaaaatgtgcttgattaaaatgctgaccgggtgttatttttctcctgctgccacactgctggcagtcgggcgtgagaacccggtaaacacaaaggcgactacaagcgcctcatgcgctttttttattgtcgcaaccttattcgccttagtgccattttatggtctggtgcgccgtctttccctggacagtaaagggttcaagatcacaaccggcgtatcaggccaccacgtaatggtagctcaggcggggcagctttcgggctggccgggttcctttgtgtccggtattctcacccccgtctgggctatcgccagtgagcgtgagaactccagcgatagctttatgctaatcacaaaggaggctgccacaatggctacaaccccaaccccaaaacacccaaaatccgcgatcccccagatcagttacgactgtcgcagtaagcgtcggtgttcgcgtaaaaaacgcagtaaaaaatcattgcgccgatctcatattacgggatatagtcagcctgttgctgcaaattcagcaaccgggcttcgcatcccgcctacagatacggtgccaaaacacgcacctaaagcgtgttttttgttgcctgatgtcccatgttcaatggcggcacgggcgggagctcctgcgggggcaccgggtatatccgtatctgccggtaatgcgaatcccgttcgtgctgccaccaatggtttcgcatccgttgatggtagtgaaaaatctacagatacggaggctgccacaatggctacgaccccaaccccaaaacacccaaaatccgcgatcccccaactcagttacgactgtcgccgtaagcttcatcgcgcacagatggtggtatttcatctgtacgtcctcaatatggacagtgatgaaaaaacggtgcagttgcatattccttacgttctttcctacatccacgacgatattaaagctgtaaataaggaattaatttctcttggcctgtttgatgaggcaatgggaaagaaacgccgaaaataa

SEQ ID NO: 400442 - DNA, 279 bp, Salmonella enterica
atgtctgaccaacaaatcaatgaacttgaaaacagaattttcaagctagagcagggattaatagcatcatcatttcgtggtgatattgcatacaaagcaatagcggcaatttcccttttattaaaggataacgatcaactccagaaagtaataattgatgttgtttcttcattctcaataaaacccgataccgatgaaatgagtaggggtttatttgaggcggagaaaaaacatgctatctctgtgctcctttcagtagatcgtgagtcagcaacgtag

SEQ ID NO: 400443 - DNA, 423 bp, Salmonella enterica
atgtttaacgtaaaacgtaatggcgcaagcgtggggataactgaaatccccgcaagcattccattcagtgtctttaaaaatatcgccgatgaaaccggagctaacgaatgcctggttgcttacgtaaaaggtaaagataactacgaagtggttattcggcacgataacgtaaatatggcggcgactgcggcgtggttggcactggaggtgggaaaaaataaaaagccaccaattgacgatgtctgtactttttcaaagcaagaggtaatcgaatttaacagtgatattgaatgtgccataaggcgtttgcaagggataatggtaaaaatgaaaggcccccaactaggagccgaaaatatttataaatcaaaaatagaaactacgttgctgactcacgatctactgaaaggagcacagagatag

SEQ ID NO: 400444 - DNA, 285 bp, Salmonella enterica
atgcggttagaagatttatgcctggaagacttgctaatcaaatacccacttgacgctgtaacgccgtcaaaatttgctgagcttgtaggtaagtcaaccaacgctgtagagatcatgatcggaaagaacaaatgcccgtgggttgagatgagagatccggcaaagccaaaggcacgtgcggaaaaatacatctacatccccgactggaacgaagggatgcgaaaagcgtttctcaaaaggccgcctgaactcaggcatgcatggctttcatggcttggtttttga

SEQ ID NO: 400445 - DNA, 549 bp, Salmonella enterica
atgaatataacggagaaaattaaggcaatcagaaaagcggaggggctaacccaagtaaccttttgtgaaataagcaaaattccgctaagcacattaaaaaattatgaagggggtcacaccgagcccagtgtcaacaccctgttattgattacatctaatccccgcttcaaaaaatatgcgctttggttgactactggcgaaacagcccccgaagcagggcaaatagcccccttatcccctatcgatcgcgggataaaactactctcaataagaaaggcagaaggcttaactcaacaacaattctctgatttaacagggatttctttgagcacgataagagactatgaagcagggcaatttgatgttggcctaaagacaattgatatggtcttaaatgtggaacgattcgagaaatacatgatgtggcttatgaaaggaaaaactaatccggggctgggacaaatcgccccgcctctctcccctgatgggttcgaaaattcggagatcgatcaggcttcaatcgaaatcacccaaaaatctcaccgttaa

SEQ ID NO: 400446 - DNA, 342 bp, Salmonella enterica
atgataacgttgtcaatagactatgctgaaaaattaaagcaaatccgactggctgagcatctaactcagcaacaattttctgatttaactggggtttcctatggatttctaaagcagtatgaatcggggcataaacctgccaggtcagatatagcagtaagagtattgcagtgtaatttgtttgaaaaatacacaatgtggctccttcacggtaaaaccttccctcatgccggacaaatcgctccggttctctctcttgatggatctattcaatcggagggaaatcaggcttcaatcgaaacgccgctaaaatcaccccgatcacgccgcaatgctggttaa

SEQ ID NO: 400447 - DNA, 234 bp, Salmonella enterica
atgcagaaatcagagcgtgaggcagcgatcgccgccaataaacaaccaatcccccctgagcagatgttgattatctgtacagaactaagggcactgacaaacctgattcgggaaaacagaggaattaactctcctgcaaaggctgctgatgtttttgacggatggatagaccgaactgaaaaacgcgcgcggcaggatattacgatgaggaaatggcgaaatgaaaaatattaa

SEQ ID NO: 400448 - DNA, 786 bp, Salmonella enterica
atgggttgtgggggcgttgtcgggcgtatattcgtaccagtcaggatcgcgtacaccatgaaccgccaggaaactttcacaccaggtgcggcgaagctccgggctaccactgtgaacggctgcgggggctttgcgtaccaggtcaataatggtctgtcggtcgtagcctttgatgtcgggaatgatgccaactgtcatcgacattcgcttccagtcttcgcggtcttcggcgatgatacgttttgcaaaatccattgcaggacgcagattattcagatccagatcttcatagaaaccacaggcaagctcatagttaatcgtccggtgtgtcggtttttcactacggtgcggacgcgcagttaccgtcacttcgattgcctgggttttctgcgttaccggcacttcgctgacactggctgctttcggtttctcaatatgggatacgagtctgcctgcacaccactcgttaaccagaatcccctgatcgatgtattccgtatcaagccacgctcggacaaaccgtttagccatgaatggccccatgcgctcaactttttcagatactttgtcaaacgcagtgaccagacgatgaagatggtacgtcgtcagcttttcgatctcaggtgccatctcacctgtagttatcgccttaatgttggtcagatgctggctgtgattctcgtccgcttccattattcccgtcagtcgctcccgctctgctggcttgaggaaaagcactttactgtccattcccttctgcgccatccagcgaaccggcagcggtaa

SEQ ID NO: 400449 - DNA, 129 bp, Salmonella enterica
atgatgtcgaagaaaaaccgcaaccagcagccgtactggcagatgaaccggcagcgtctgaaacagtggaacaggacacaactgaacatcatccggacccgcagccgctggagaatgagccacctgtaa

SEQ ID NO: 400450 - DNA, 1227 bp, Salmonella enterica
atggcttcaggcataaataaactgactgacagaaaattacggtcgctgcttggtgttgcatctggaaaagaggtaaagcttgccgatggtggcgggttgatggtcaggataacgaaatctggggcaattagctggttcttcaggtacaggactggcgggcgtaactgtgaaccccatcggctaactttgggtaagtatccggatattagtctgaaacaggcgagagagcttcgtgatcagtgtcgttcctggctggctgatggacgcgatcccaaatttcagttgaagctcaccaaaagcgaaacgctgaagccagtaaccgtcagggaggcgctggagtattggataagcggatatgccgaggacaatcgcgcaaatgttgagaggcataaggccgaactgaggaaacatatttatccctacattggtgatatggcgttggctgactgtgaaacacgatactggttacagtgttttgaccggatgaagaagaaggctccggttgctgccggatatgtgttccagatgtgcaagcaagccctgaaattctgccgtgtacgacgctatgctatcagcaatgctctcgatgaccttaccattccagatgtgggcaaaaagcaagccagaagagaccgggtactgaatgacaaagaggttggcgagctatggtctgctatatgggatgagaaaagatttcgagagtatcacgccaaccttgtaaaaattatactggtctttggttgccgaactcaggaagctcgcctttcacaactgaaggagtgggatatggatgcatggatctggactgtgccaaaagagcatagcaagtcaggtgaaaaaattgtaagaccgatcccggatgctatgcgtccacacattgagcggttgcatgaggaacataaaaagtccggtttactgcttggtgagactaaatctactgaggcagtaagccagtgggggcgcggattatataaaaagcttgggcatgaggagaaatggactttgcatgatcttcgtcgaaccttagctacgcacatgaacaacatgggcatttctccacatgttgttgagcagttgctgggacactcaatgccgggagttatggcgatttataaccgtagtctgtacttgcctgagaaactggatgcgttgaataaatggcatgacagacttgatattttatcaggtggattcactaacattgttttgttgaatagggctgaataa

SEQ ID NO: 400451 - DNA, 174 bp, Salmonella enterica
atgagagaattagataacaaagaactgaatattgttggtggggccggcgatcctcttacagatcctaactcccagattatgagacagataatggctggtgctgcacagatacctgttaatgttccgatcccaaaagttccgatggggccaacatggaacggtagtaaaggttaa

SEQ ID NO: 400452 - DNA, 2112 bp, Salmonella enterica
atgggaaataagatgattttcagtacgttgcttggcaagctggagctgggcctgcgacgcagggttcctgtgatacatcagacggaatcatcagagtgtggtttagcctgtctggccatgatttgtggacattacggtaagaacattgacctgatttcattacggcgccagtttagcatgtcgtcacgcggaactacgctttcaggtttaaaaagtgccggaacacagcttggtatggaaacccgcgcgctgtcactggatttaggtgaactggacgcgttgagactgccctgcattcttcactgggatttcaaccattttgtggtgctgacagctgtcagaggtaacagttttattctgcatgaccctgctcgcgggcgcagaactgtagggctggacgaaatgtcgcagtatttcacaggcgtggcgctcgaagcctggcctggcagtgagtttatccccaagaccgaaaaaaaacgggttaacttgaggaatatgattggcaacatacacggtatcagggggacacttactaaaattttctgtctgtcattggtgatagaaacccttagcctagtgatgccagtgggcactcaactggttatggatcatgctattcccgcaggcgatcgtggactacttactctaatttgtgctggcctgatgtttatcattttgctgcgggccgcagtcagcatggtacgagcctggtcatcactggtaatgagcgcattaatcaatgtgcagtggcagtcgggtttattccgacatcttctgcggttgcctctgagttattttgaaagacgtaaactgggggatatccagtcgcgctttgcgtcactggatacgctgcgcaccacgtttactaccaatgtagttggagccattatggacggcatcatggtctcctgtcttctggctatgctgatgttgtatggcggctggcttacggccgtggttcttggctttaccgcgttatatgtcctcattcgactgttgacctatggttattaccgccagttatcggaagaatctctggtcaggatagcccgggctggttcgtattttatggagaccctgtatggcattgcggcggtcaagatgcaggatatgggggaacgtcgtggaaatcactggttaaatcttaaaattgatgccatcaacaccgaaataaagattaacaggatggatatgctcttcggcggtataaacacgcttgttgctgcatgtgatcaggtcgctatcctgtggctgggaacagctcttgtgattgacaatcagatgactatcgggatgttcgtggcgtttagcgcctttcgcggacagttctcagaccgcgtagggtcgctgattaatttcctgcttcagctgcgtatgatgagtctgcataatgaaagaatctctgacattgcgcttaacgaacgtgaagcacaaaagccggatatggacatagagccggatatgaagccggtttcgctggaaacacgtgacctggggtaccgctatgacaaccactcttctcctgttttcagtaatctgaatatcaatattgcacagggggagaacgtcgcaatcaccggtccctccggctcagggaaaactaccctgatgaaggttctgtgcggtctgtttgaacccgatgccggcaaggtgatcgtggatggtcaggatatccggcaactgggggtcaataattatcataagataattgcctgtgtgatgcaggacgatcgcttgttttccggttcagttcgtgaaaatatttgtggatttacagacaatatcgacgaagcttggatgacggaatgtgcgaaggcgagttttattcatgatgccatcatgaaaatgcctatggggtatgaaacccttattggtgagcttggcgaaggtctttccggagggcagaaacagcgaatttttattgcccgggcgttgtatcgtaagccgggaatattattcatggatgaagctacaagcgcgctcgattctgaaactgaaaaatgtgtaaacgaggcgatcaggaagctgaatatcacaagagtggtgattgcccacagggaatctacgctgagttcttcagaccgcgtgatcgttttagagctaaagacataa

SEQ ID NO: 400453 - DNA, 1278 bp, Salmonella enterica
gtgtttcgccaggaattgttagaaaacaggaagatgttgtggcgcgggcgggcattgttgttgcccggaattccgcccctgctggtcatatctgtatgtattatattcctgactgtttttatcacttttgttataatgggttcatacactaggcgggttaatgtgtccggtgaaatcaccacctggccacgaccggttaatatttactcaagtgtacagggttttatcgtaaaacagtttgttacagaagggcaggaaattcgtaaaggcgagcctgtttatcagattgatgtcagcagaagtacaagcagtggtgtggtgagtgataatcagcggaaagatatcgagaatcagatagtccgaatagctaatattatatcccgtcttgaagacagtaagaaggcaacactgcaaacactagaaaaacagaaaatgcagtaccaggaggcttttgaaagatcaactgctattgtcaggcgtgccgaggaaggcataataataatgaagaataatatgaataactaccggacataccagaaaaaaggtctgataaacaaagaccagctcactaatcagacagcattatattatcagcaacagaataatttgcttagtctcagcgggcaaaatgaacaaaatgccttgcagataaccagtctggagagccagattaagatacaagctgctgatttcgataatcggatttatcagatggagcttcagcgctatgaactgcaaaaagagttaatcaatactgatgtcaatggtgaagttattattcgggcattatcagacggaaaaattgattcactgagcgtcaccgtcggtcaaatggtaagtgctggggacagccttttgcaaatcattccggataaaataaaggatcattatttagttgtctgggctccaaatgatgccgttccttatataaatcctggtgacagggtaaacatccgttatgaagcttttcctgcagagaaatttggacagtttgccgctacagtattattggtatcaaaaactccggcttcgtcgcaggaaatgttgacttatcagggagctccaaaaaataatcaaaacacatctgttccctactataagattgtcgtcagaccggatctgcaggaaatacgctacgacggtaaattccttcccattgagaatggaatgaaagcacagggcacattatttcttgaaaaaagaaaaatatatcagtggatgctttcaccattttacgacatgaagcacagcgccacgggaccggtaaatgggaaataa

SEQ ID NO: 400454 - DNA, 225 bp, Salmonella enterica
atgcactacgtgaattctgatccggacaactcttgtaaaccttgctatttcccacatagctcaatagggctgtcagttactgccagttggggcggtggcctgcattcaggtgctgacgataataatgatgtcggtatcaatgtagaaaaaataaacaacatgtactccaaagagcctggagtaaacttaattgatcatccaatatacgtagagtgttatgtataa

SEQ ID NO: 400455 - DNA, 855 bp, Salmonella enterica
atgaaagaaatatataatgcatttttagcttcgtgcgctgaagttaatgttattgaaaattgcatcttacctgttgctatatcaccgaggaaaaatgaatctcaaaataatgaagtgcttgatatattttacataatgagcgggtgtgttgagatcatgtttaataatttttcaaggaggaatttaaatccaggtgatgttgttttttttaagagaaaaaagaatgattatttcataatttccgaaaaaaatgaaagtcatataattcaagcaagtattaagccaaatgggatatatagagatttgatgttgtgtaataacatcaataacttattaatatttagccatgcgcattcggattatgtttcatcgataactgaattagtaaaacttttactacaattaaagcacaatgaaacccctgggcggactttaattgaaatgccgattgctgtattttttatacaattatttattacgcaaaattttggtttccaaattttaattcaagaggaaaaaaacaacatatcacaatgtatgcttgatatggtaaaaaaaccagggtatcactggaaaattaaaaccatggccatgcaacataatatgggagtaaatttatttatcaacgagtttcgaaaagtttcgggtgatacaccatttaacttccttaaaaaaatacgccttaacagggcaaagcaattgttagaaaatacgactatccccatttcaataatagcaagtgaatgtgggtataatagccatgcatcatttacaacatatataaaaaaagaatttggtttaacacctgtaaatttgaggaaaatgagtaaacagaaaaaaaacaaaagaatataa

SEQ ID NO: 400456 - DNA, 294 bp, Salmonella enterica
atgattgaaataaatgtaaatgaacttactaaaattagcggtgctggcggtggtttaggtgaagcactcgatgggatagggcatgttgtcgaaggtgctacacatgtcgctaatgctgcaacagggggagaccttggtgaaggcttagggaagcgatgggggacagctggtgcgcaagacttttgtaaaaatatagcaacacaatcggatacaatgtcacaatctttgtatgatgattgtatgaagaatcctgttaactttggttacaaggataccggtccatggtctggatga

SEQ ID NO: 400457 - DNA, 516 bp, Salmonella enterica
atgacagggaaaccgcacggcagagacaaagataatgtgcctggtaggaacgacattgccgggaaaaaaaaggtaaaacaaagcaatcacgatgaatacacactgcctccctgtatggctccgtggtccaacgaacctttgtatctggtagtggctcggtgggggctaatgcagaaacgatggataaacagcaatgatatcgcggcagtttttcatatacctgacaggctggcttcatttcagctgtcctgtatctcacgtaaaaaagaacgggtggcctgccggatacgctatgagcctaccgaggtcagcggtcgtcagcgggtggagatttttatcgattatgtcatccctgccccggaggaagggccggcccatgcgccaccgcgcaggcgtaacgtcccggctaaacagaccggtcccgcatcgcgcggggtgggcagcggtatggccgacaatatcggtatatgggaacaactacttaaagggtgccgggaggggcgtggcgatgagtga

SEQ ID NO: 400458 - DNA, 756 bp, Salmonella enterica
atgagtgaatccctgattatcttcagccgggaatggctggtaacgacatccctgacggcatatcttgtaccggtatatttccgtccggtcacttcagtgtatgacatgacggaactgacccgttatttacggactcagccccgctcacccgttgtcctgggcctgagaccgcatgaacatgtgacggacctgtaccggctgcagccgttgctggccggccgggcggtgctgtttgtgagccgcagcttttattggacggactacagcctgccggaatggctggggctggagcagtacgggttttgttcctgggacaccatacataatccattctcccggcggagggagatgcgccgtttcaaacagtcagcggcagatgtgcaggaggatgactgcgcgacggatggcgccaagcgtcaggcccctgctgcatcagtcataaccgggatgcagatactggaaagggcgaaccggtggctgtaccgggaactgtcagcggcgggtctgaacggatttgaagtccgggtgctgtcgctgatgagcgaaggtctgaaggggagtctgtcgtcccggacgagaagtctgtataaaaataccgggctgctcaagctcgggatgacaaaacatgtgctgaacctgtaccggggtgtgaaggtgcgtccggagttacaggccggtctgcactgcccggacggtgagtccaggcgtaaagtaaaagagtcggggatggatgaagttgaaattctgcataaataa

SEQ ID NO: 400459 - DNA, 150 bp, Salmonella enterica
atgcgtaaagcccgttttactgagcatcagatcattgccgtaattaaatcggttgaagccggacgaaccgttaaagatgtctgccgggaggccggtatatctgaagccacctactacatctatggactacctccgttttgcaagtactga

SEQ ID NO: 400460 - DNA, 465 bp, Salmonella enterica
atgaatcgtataaccaccggcgtaatagtctcgttgctgattatggccgccgcgctggcatggacaacggaccactaccacggtaatgccgtgaaatataaatcgcagcgcgacaccgctactcacaagctgacgctggcgaacgcgacaattaccgacatgacgaagcgccagcgtgacgttgctgccctcgatgcaaaatacacaaaggagttagccgatgcacagactgagaatgctgatttgcagcgccgccttgcttctggtggccgggtgcgcgtcaaaggacgttgtacagtgcccgccagtaccacaaccgccagccccggcagcgtgggcaatgctgccaccgtcgaactctctcgggattctggacaaaacgttctcgatatccgcgccggaatcatcagcgatcaggcaaaactgaagtatttgcaggagtacgttcgcacgcagtgcagataa

SEQ ID NO: 400461 - DNA, 546 bp, Salmonella enterica
atgaacgtgaataaaaaaaaactggctgaaatttttggttgtgacgtcagaactgtcacagcctggcaaagccaggggctgccacttgtttccggaggaggaaaaggtaacgaagcagtgttcgacaccgcggcagcgatttcatggtacgcggagcgtgatgcgtctattgaaaatgaaaagctgcgtaaagaggttgatgatttacgtgccgctgcggaatcagatcttaatcccggcaccatcgactatgagcgctaccgcctgacaaaagcccaggcggatgcgcaggaacttaaaaatgctgagcgcgaagggctggttcttgagaccgaattgttcacctacatcctgcaacgggtggctcaggaaatagcagggatactgtcaagggtaccgctggtattacagcgcaaatatcctgatctgtgccagtcacacatcgatgtggtcagaacggaaatcgccagggcgtcaggcagggccgccacgatagcggatgtggagaagtggaccgatgatttccggagagcgcagggcgaataa

SEQ ID NO: 400462 - DNA, 1524 bp, Salmonella enterica
gtgcaacgtaatctcccgcatatactcagccaggccacgaacgccccgctgttacttgaacccgcctatgcgcgggttttcttttgcgcgctgggcagggagtcaggcgctggcagcctgcacattccccagaacctggaaaaccttgatcaggcgggtatggagcttgttaccggaaattatatgtccggcgacaaaccacgggcgcgtttttaccaggtggtgaatagtattgccgtgttaccagtgtcaggaacacttgttcataaacttggcgggatgcggccattttccggcatgaccggctatgacggcattaccgcccgtctgcaacaggcaatttccgatccagaagtgacgggggtgctgctggatatagacagtccgggcggacaggccgcaggcgcgtttgactgcgcggacatgatttaccgtctgggacaacagaagccgatatgggcgctgatgaatgatatgtcctgttcaggggcgatgctgctggcgtctgcatgctcccgccgcctggtgacgcagactgccagaatcgggtctgttggcgtggtgatggcgcataccagctatgccggacaactggaacaggagggcgtggaaatcaccctgatctattcaggggggcacaaggtcgatctggatgtaacgcgggcattaccggaaagcgtccatgccgactatcagcagcgaatggacgaagccagaaagatgtttgccgacagggttgcacagtataccgggttgtccgcagaggccgtcatggcgacggaagccgccgtctacgacggccaggcgggtattgatatcgggctggctgatgaaatggtaaacgctgcagatgccgttacggtaatggccgcagcactgaagaacaatacaacaggaggcactatgccggaattaacagcaacagaagcggcagcgcaggaaaatcggcgcgtgatggggattataggttgctctgaggcaaaagggcgtgaggcgctggcgcagatgctggccggacaaccgggtatgagcgtggcgcaggcgcagggcattctggctgcagccgcgccgcagcaggaagttgtcagcgaggccgatcgcattatggcgcttgacgacgctaaggggcgagagggacttgcctccacgctggccgccatgtcggatatgactacagagcgggcaaaaaccattcttgccgctgcaccgcgtgccggtactacatccctcagcgacagtattctggcactggatgaagctaaggggcgtgaagaactggcgggaaaattagcgaccatacctggaatgacagttgaacaggctcgcgagctactggcggcggcgccggatgcttcaggttcgggggggacgaatatgaataatgcctttgatcagtttatgcagttacattccccggcgtcactgtcaggaagtagcggtaacagcaacgatgttgatacagatacgcaactcctgatgagcattccgggaacgagggcaacaaagggcgaggataaattatga

SEQ ID NO: 400463 - DNA, 375 bp, Salmonella enterica
atggcaacaaaagaagagaatatcgcccgtctgcaggaactcgccgtacagctcggtcgggagccggatatttccggcagcgctgccgaaatcagccagcgtgttgctgagtgggaggaagaggcgagcggaatgcaagccggggaaaatgctgaaacgacggccagtgacccacaggacgagccggaatctgcaaaaagcaataccaatctttcgggatttgcccttatcagggcggtccgcacgcttcatattcacgcgctggcagcagacagcgatcggattctggataccgttcaggcaggggatttggcacgtattcaggaaatatatgttcatgaactcgcgcgcgacggactgattgttgcgttatga

SEQ ID NO: 400464 - DNA, 438 bp, Salmonella enterica
gtgaacaaaacgtatatgctggataccaatatctgctcattcatcatgcgtgagcagccgaaggccgtgatcagacgcttagagcaagcggtgctgcgcaaccatcgcatcgtggtctccgctattacctacgccgaaatgcgcttcggtgctatcgggaaaaaggcctcgccccgtcatggccaactggtcgatgcgttctgcgcccgcctcgatgcgttctgcgcccgcctcgatgcgattctgccgtgggaccgtgccgcagtcgatgccactgtagaggtcaaagcagcactaaccgcagccggtacacccatcggtcccaacgacacagcgattgccggacatgctatagctgcaggggccattctggtgaccaataatacgcgagagtttgagcgggtgccaaatttggtattagaagactgggttaaataa

SEQ ID NO: 400465 - DNA, 231 bp, Salmonella enterica
atgcgaacagtatctatttttaaaaacggcaataaccgcgccatccgtctgcctcgcgatttggattttgaaggggtgagtgagttggagattgtccgcgaaggggacagcatcattttgcgtcccgtccggccgacctggggctcgttcgcgcagctggaaaaggccgacgcagactttttggtggagcgtgaagacgtggtcagtgacgaaggacgatttaacctgtga

SEQ ID NO: 400466 - DNA, 264 bp, Salmonella enterica
atgtcgcgtcgtggtttacgtttatcgcagctgccggcggtacgttcggaaaagctaaacccggccaaaacgtccgcgcagctcatggcggaagatacgctgcgtgagttaatcgctgcccgttttgccgtgggaaaaccggttatccacattgatgcaaactggaatgatgcgctactactacgggtgatgaaagacgcgatacgccaagctaaaggccagccgtttgtggtggtaccaccactggagaaagagaacaactag

SEQ ID NO: 400467 - DNA, 2790 bp, Salmonella enterica
atgagttctgaaccaaccttattaaataacactaaaaataaaaacagtataataatatttattttaccacttgtgtcatttttttgtggggaaagtataattccggcgatggcacagtccgttacagaaagtggtgatgttttaatttctttatctcccttcccagccgcccccaaagagcccgctcgcatcacctcaccaagctgggtgacagacaaacatttgattgtcggaaattccggtagcggaaatattgctattaaagatggcggtacggttgctgcgccagcagggcttatcatagggtttgaagacaaatcatcaggcatggtaaatgttgacggagctgcctccagacttagagttggctatatcaacgtgggaagtaatggctatggtgaactcaatattattaatggcggacaagccaatactaacaacgccacaactattgctgcaggtaatggacaaggagtcgtcaacattgatggtatagcatccgatggagtctcctccacccttcatacatcaacattgatagtcgggaacggagacaagggaacgctgaacgtaaccaatggaggaacactgtattctgattattactcaactctgtctaatagctttgaaagtagcgggacagtcaccatcagtggcgttcaccccagcgggatagcctctatctggagggcggaaacgatagagcttggagtaatgggtaatggcacactgaatgtttttgatggcggaacggtctttgtaaaaaacagcatcacagccggcccactcggaggtactgggatactcaatgtgagtggcgtaaatatgggacacgcatctacctttaaaactggttctggggtatctctgggtgtagccggaatatttgaatttcccaatgcatatgggacaggaacgctgaatatctcagatggcggcgtctttgatgctcctctcatacagcttggtgtggataataatacctccggaaccatcaatattggtaccggcggtctggccggggtattaaaaacgcccgtagtcacaacaggtacaggtgatgcagccgtcaacttcagccacacggacaatattgattttagcacgaagttaagtggtcatatggctgtgactaaatctgccatcggtacaaccaccctgatgacagcaagtgattacacgggtaccaccaccgtttccgagggcgctttaaaggctggcgctgagaatgtgctcagccagagctcagatttcaccctcgatggtccagggacactgtccctcaacgaccatgaccagagtataaaaacgctgaacaacgccggtacagtagactttggctctgtggcgggcaccacgcttactgtccggaataactataccggaaacaatggtacgctgttgctccatacacgactgggggatgactcctctgtaacagaccgttttgtcgttaacggtgataccagtggtacaacaaatatacgcgtaagtaatgacgggggcgcgggagcccagacaaataaaggcattgaattaatacacgtcaacggaaaatcggacggtaacttccttttacatggtcgagtggttgccggaggctatgactattttctgcataaaggcacacctgaggcagaggatggcaactggtatctccgctcagaattgccagaaaaaccggttcccccagagcatccagtaacaccaccagagcatccagtaacaccaccagaaaatccggtgacaccgccggaaaaacctgtcgtgatacctgaaaacccacctaaaaaaccatcttataatatccttcgtccagaggccggtgtttatacagcgaacaccgctgcagcaaatactctgtttatcacctcattacatgaccggcttggagaaacgtattacaccgacgtttttagcagggaaagaaaaatcaccagcatgtggatgcgtaatactggcggacacaacaactggcgtgacagttcaggaacgctgaacacgcaaagtaaccgttatgttctgcagattggtggcgacgttgctcaatgggtgtctccggataacggcaggattcatttcggggtaatggcaggttacggtaatcaaaaaaccagaacccggtcatcaataacaaaatatcaggcaaaaggcgctgtagatggatacagtgcgggtatatatggtatctggcagcaaaatgaagtcagtgatgatggtgcatatatggatatctgggctcagtacaactggtttaataaccatattaagggtgagcaaattaacgatgagtcttataaatcacgggggtttgtggcttcagttgaagcgggctataccatgaaaatgggagagtttaccggcagtcacggaagcataaatacatggtatgtccagccacaggcgcagataacctggatgggggtgaaagcgaatgcccacacggaagcaagcggcacaaacgtcgaatcacagggggacgggaatatccagacacggctcggcctgcgcacatatctgaaaggacattcgtctcaggataaaggcaaagaccgaaacttcgaaccctttatcgaaatgaactggctgcacaatactgaggctttcggtgtcagaatgaatggcacagggatcagccaaaacggagctcgtgacctgggggaagtaaagctgggtactgatggccagctcagctcctccctgaatatctgggggcaggtaagcaatcaaattggcggaaatggatataacgatactcaggttatgctgggtgttaaatatattttttag

SEQ ID NO: 400468 - DNA, 876 bp, Salmonella enterica
atgagtattagtgtttttttgagccataatcacaatgacaaaccattcgtcagaaagttagctagagacttagaaaatcatggtgttcgttattggcttgatgaaacagaaatgaaaattggcgactctctgattcaaaaaatcagggagggaattgatggtgttgattactttgctgttgttctatcacctgactctataaatgcgccttgggtagtcaatgaacctgatgtagcaatgaattatcaaataagcggtaaaaaaataaaagtactacctattatgctgaaagaatgtgagcctccgggttttctcattgggaaactgtatgcagattttagaaatgaagataactatgttaaggcatttaaacgattaatgcaaagcataggggtggtttttaataaaaacgtcatgagcgacgagaaagtatttgataatcttggcaccgctttagataaagcatctcatgccaatatccctataatgtgtaaaccatttcacagaccgtttcaatacatgggaatgcaagtcccacaagcagaaaaaatctttgagtgtaaaggcaatgaagttggcagcatctttgtagaagatgatgattgccggatgcatctttgtgctgaaggtaattatattagctttgtagaagttgattttaaaaaaacaattccacattacagaaatcaagaattcgattcagaaattttcctcggagcattaagtataggcttatcagaacttgagttggttggtaaaaaaacgcatagccacacatattatgatcatcgtagaaaattaaaaataaacgttatttgcttatatgatgaagcaccaataactgtatcatttagttctaaatattacggcatgtaa

SEQ ID NO: 400469 - DNA, 519 bp, Salmonella enterica
atgagtattaccattagaggtgaagatgcaacatgtttatttgaaatattatctgaccctaaagcgatttgtatcgagggacatacaggctccgggaaaacaacggctggaaagaaaatagcagaaaagtttggagccaaatttttcgatacagatagctatataattaaagatccggcttcagatgttattaaaccatatgaagatatggtagacatcgcaaagctatcaaaagaactaaatgaggaaaaaggtaaaaagatcattgctggtatatgtcttcggaaaatattaagattagctaaaacatctgaagaaccaatatttatttacataaaatgtatatcaagaacatcatctcaatggatagaggaaaatatattagaggatcttagggagggagtcattggcatagacaacatccctgagcctcatgcaagtgattatcgatatattttggaaatgaatcctcaacataatgcagatattattttcgaacgattggaagaaaataactaa

SEQ ID NO: 400470 - DNA, 375 bp, Salmonella enterica
atgtccaatcttggatatttaatgaccgattttgatcgtgttagctatctggctaatctgttaacgacaagagccactggtggttcgccagataataatgagtacaccagtttacgtagccaacttttacaaaatccaacaatatcacagaaaattccatcttttgtccgacacaatagaacactggattctttttggtcttttattcaacccaaatttagcacgtatgcagatcgaagatccttcatctctgagcaatttacacctcttttagattacctagaattcggtgaatcattacaacaaaacattcctttagaacaaaggaatatgattgtcagtggaacggctaacacgatcaaaatcggtcattaa

SEQ ID NO: 400471 - DNA, 171 bp, Salmonella enterica
atggcgttcagtgtcgaacaaaaaacataccatttcgacactgaaaacaataaaagcattgatttatataaacattttccagtgctgacagagactaaaaaatcaaaaatcagccgaatcccgcgagcccgaagccacccgtggcgccccctgcccaggagtaccttttga

SEQ ID NO: 400472 - DNA, 624 bp, Salmonella enterica
atgacagtcattactgatgcccgcaacgggcgctataacgaaaatggcacgatttcggctgaggtgcggtttgacgataatcttcacagtgacggtacaccgctgtatctgccgtacacggcggctgcccatgacccgatggattacgggcgacagctttacgcagacctggttgccgggaagtacggccccgtgacgccgtttacggtcacgccggaaatgctcgccggcgcaaaagcgctgaagcacgcggaaatcaatgcctggcgggatgcacaggaaaacgggcgggtcagttgtgaatataacggcaaccgttacgacgcggacaaggaatcaaaataccgtctcgataatgtcattgaggccggcgggttgcctgacggcgtgaaatggacggacgcggatagccgggatgttgacctttccccggatgacctgaaggcgttacagaaaattatggtgatgacgatggcggtacagggcggaaaaatccatgaacgccagcggcagatgaaggcggaagtggatgcgcttgataccccggaggctgtccgtaattaccggcccggctggccggatgagcatgggcatgggcctgagaacgctacaaccggggaatag

SEQ ID NO: 400473 - DNA, 153 bp, Salmonella enterica
gtgcagatagtggcgaacagcgcgggcaccatcacggtacagcccgcaaacggcaacgtactgattaacggtctgcccgcgtccaccaccaccgaccacagcaccacgctggtacagacgggagaggatggaaaaacctgggtgacggcgtaa

SEQ ID NO: 400474 - DNA, 375 bp, Salmonella enterica
atgagcaaatttaccacccccgcgattctggagatgctggagcactacatgtggcgcgtgtacgaaccgtttgagttttacctgagcgacgataacagcgatgttattgaggtgccggccggttttgtcaccgaccttgccagcgtgccgcgcatcttctggacaattctcccgcctgacggcaaatatgccaaagcggccattattcacgactggatgtacgacaacgcactacgcacaaaaaaagaggcagacctgatatttctcgacgggatgacggtgctgggtgtgccgaagtggaaacgcacgattatgtattgggcggtgcgggtgttcgggagaggcagttattcaggacggaatgtaatggaataa

SEQ ID NO: 400475 - DNA, 273 bp, Salmonella enterica
atgattgactttaaatctatgattgagaaagaaagtgtttacgatgtggtgtctttcttcgctgggtctaaaaaaggaataggttatccgcagttggacaatttttttgttcgttaccgatttgacgttgttggcaatggtgagctattgaaaacttttgaggaaatgcgcaggaatgggattgtcgattggggagacaaaatgcttgttaaaaaaggccctaactggaaagaacccaggtttgtgaccgagaaaaaatacggtatcgaatag

SEQ ID NO: 400476 - DNA, 318 bp, Salmonella enterica
gtgaagctgcatacgggacggtttgccgaatctgatgcgaacaagataatgattgatcgtctggagaaaatcctgaatggagaaatgcagcccaccgacaccgataaacgtttttacacccatgaaataagagaactggaacggtacagaaatcttgggattaaagatggcattatccctgataatcaaggagatgtatggaataatacccatacagccaccttagaagactataaaataaatgaacgaaatgaacctttgtatactcctgatgcaattcaagcggcagaagaacaagctaagagggaatacctatga

SEQ ID NO: 400477 - DNA, 264 bp, Salmonella enterica
atgttcagtctgattcagcgcgggcagttatatatcgacggtaacggatatccggtacaggtccacagttgcagtgccagccatgtggcattccgtcgccaggataatcaaattcgttcggtgggcattggcaaattcaacagcgcattcgagcgccttgattatcaggagtacaaccagctcagggcagaacaggcgcagaccgaacatattaaaaatttgcgtgaacaggcccggagaaataaagaacggcagagagaatag

SEQ ID NO: 400478 - DNA, 453 bp, Salmonella enterica
gtgtggcatgtaacggtaaaggtgatctgttggcccggtgccgttgcggtggaaaaggtgaggtgctcgaccgcattgcgacaaaagaaagaggtgtgccgatgttcaaaacctgtgagcgctgttccggaaatggcttttctccggtaccctctacggctgcatacaaagcgattctcaggcgagttccgggattacatgtcagaacatggacccgcaactggaaaccattccttgaggcgctggtggatatttgtcaccgggaagagcgtaaggctgatgctgcttttcagaatgcgaccagttttagcgatgatttcaacaaaatttagtattttcacgacatatagcttgattttgtccgaaaatgtcgtgtatgcttctaatcatgtgaagttgtacctaaacaaaatgaatcatcgaaaccctgccgcctggtggggttttttatga

SEQ ID NO: 400479 - DNA, 735 bp, Salmonella enterica
atggacgccgcatggcgtccttttttatgggtgaatattatgcaggacataccacaaaacaccctgaacgagaccacaaagacggagcagtctgcccgtgcggatctgtgggagtttgatttaaccgggattggtggtggacgttattttttctgtaatgagccaaacgggaaaggagagccggtgacctggcagggacggcagtatgagccatacccgctacaggcacaggatgttgagatgaacggtaaaggaccgtcaccacgggtaacgcttgtcgtttccaatctctttgggctggtcacgggcatggcagaggatctgcaaagtctcgtcggcgcgtcagtggtaaggcatcaggtttacagcaagtttcttgatgcggtgaacttccgtaacggcaatccggaagccgatcctgaacaggaggcggtagcgcgctataacgtggagcagttgtcagaacttgactcatcgactgccacccttattctggcatcaccggcagaaaccgacggttcagtggtgccggggcgtaccatgctggcggactcatgtccgtgggattaccgggatgaaaactgcggatacgacggcccgccagtggccgatgagttcgataagcccacctcagacccgaaaaaggataaatgcagccactgcatgaaaggctgcaaaatgcgtaacaatctggtgaatgccggatttttcgcttccatcaacaaactgtcttaa

SEQ ID NO: 400480 - DNA, 1164 bp, Salmonella enterica
atgaaaaaattcgcagtggcagtaaccgcggtggccggagccgtcatggcggcaggaatggctaatgctgcagagatttataataaagacggaaataagcttgacctttacggaaaagtcgatggtctccattatttttccagtaataaaaacaaagacggtgatcagtcttatatgcgtctgggttttaagggcgaaacacagattaatgagcaggtgacagggtatggtcagtgggaataccagattaacaccaaccgcccggaagatggagataccagtaattctccacaaagctatacccgtctggcttttgccggactgtcatttggtaatgctggttccattgattacggtcgtaattacggtgttctgtacgatattggcgcatggactgatatgttgcctgagtttggtaatgactcctatgaaaattcagataacttcatgaccggtcgggccaacgggttactgacttaccgtaataatggtttctttggccttgttgatggtctgaattttgccctccagtatcagggaaaaaatgacgggaataactggaagggtgatacctgggatggtacaccgttatccaataactcccgtaaaattgccggacagaatggtgatggttttgggttgtctgcaacttatgatgcaggcatggggattagcgctggtgctgcgtatacgaactctaacaggaccagtgagcagaaatacagggacgatggtggcaacaaggctgaagcctggactgctggtcttaaatatgatgctaacgatgtttatctggcggcaaactatactcagacacgtaatatgacctggtttaatatcgctgacaacagtcgtattggacaggataatcagaaggattacgatggcgattttgcccataaaacagataactgggaaattgttgcacaataccagtttgattctggtctgcgtccttctgtagcttatctgcagtcgcgtgcccgtaataccggctatggagactttgatctggtgaaatatgctgatgttggcactacgtacaacttcaataaaaatatgtccgcatatgttgactataaaatcaatctgctgaaggctgataacccggcaggtttgaatacagacaacattgtggctaccggtctggtgtatcagttctga

SEQ ID NO: 400481 - DNA, 186 bp, Salmonella enterica
atgacaaaaccagcgtcaaccactaaaaatccacgcaagcagtacacacctgaattttgtcacgaagctctgaaactggctgaacgtattagtgtggctgctgccgcccgtagcggttggtacgactggcatcagcgtcgccatcagagtttggataaatcggtcagtggaataaataatttttag

SEQ ID NO: 400482 - DNA, 408 bp, Salmonella enterica
atgcgatatccggttaattttgatcacgatgaaacgggctgggttgtaatgtttccggatgtaccggaggcactgacgggggcgaaaaccaaagaggaatcgctttctatggcgcaggacgcgctgataaccgcacttgatttctactttgaggatcgacgggcaatcccgttaccatcagaagcaggtgaggcatttgttgaggttccggcaagtgttgtagcaaaaatactcctgctcaacgagattgtaagagcgggagtgtcaaatgctgaacttgcccgcctgattggtacgcgccctcaggaggtgcagcgcattgtctcgcttcatcacagtactaaaatagatacgatccaggctgccataaaagcgcttgggggcagactggaactgatagctgtctga

SEQ ID NO: 400483 - DNA, 375 bp, Salmonella enterica
atgaaaaccggtatccagtttattacagacgaaaaaggtattaagaaaagcgtcattttatcgatacaggaatacgaacgactcgttgacgaagccgacatggacgagaactatgagagtgtgccgtatgaggcgggagagtatgacgatgagaccattccacacgatgtgatttctatcatggttgatgaacaggtgtctttgctggctgcatggcgaatttatcgaagaatgacacaaaaagaggtggccgatttattaggggttaagcagtcagcagtatctcagtttgagaaagtcgaaacccccagaaaagcgacactggagaagctggcagaaatctatgattgtcgcgtaggccaactagcggattga

SEQ ID NO: 400484 - DNA, 261 bp, Salmonella enterica
atggttaaggtgatatggtcaaaaaccgcccaaagacagatacagcgcatcgacattcgttaccagaagtcgataaaagataaggctgaggagctgaagggattcccgttggtggctttggattttaaaaagttatccgggagcgaaaacagattcaggttacgagtcggagcatacagagtaatttttgatgttgaagacggtgagccgaggatactggagattaaggaagttaaacgcaggagcaccaatacatactga

SEQ ID NO: 400485 - DNA, 399 bp, Salmonella enterica
ttgtactgctacggcgagcaacacacgtacatgaaccacatgctgatttgcgagtacctgtggctacagatgcatgaccggctcagggcaagccggaagcgtattactgacgacatgacgggaaacctgatcaccctggcgggggtagtgacgtggaacgccgggcagatgatgagcgggaaagacaatgcgaaactttatgcagcgacctacgcggcgcaggaaattggggtcagtgctccggcctggtctcagagctacaaaaaacactgggaatttctgtgcgataaatgcgtggaactggatcgcatggcgctggaaaatctgatgaaaaaaaaattaaaaaaacgaaaaaaaatccccgaaaaaaagaaagatttgctcaggttaactttttag

SEQ ID NO: 400486 - DNA, 1137 bp, Salmonella enterica
atgcgggccatactgacagcatttccacaaaacggcgccagggtaacactgctgaaatccggaaacctgacaaacagactccgcgatgggcagcgcatcatgatctgtgatgttccccgacaactggagaacacgccagcgggagaaatacccgattcagggcaatggctggcgcaggacgaggcgttacagtcgtttttttctgacagccgggtaataaacgctgctggtggtccggagggactgagcagatgggtaagcagaataccggattgtcagtgtgctgatactggcgctggtggtgatcatgtcgtgaacctgacgacagcacagacacaggacggcggtgccgtgaggctgtgccatgcgtgcgataacgttcattacatgaaaggctaccgggatctgagcgacattatcaccagaaaccgggcagagtggatagtggactatgcccgtatgagcctgaggctggagcgggaacatcaggtgacgttgccggagttattctgctgggccgtattgcgtggcgtgaccgacgccatacccacgaacgtaatacgtcgttttgcctccctgccggaagatgaggtgctcactggcactataaaggaagcagatattaacccctggcaactcagtgcccgccagacggtacagatagtggagaaaaaagccgtggagggcatagtctccataccccctgatatttatacagtaccaaacgcaaagaaacttataaaggattctggtcttaatgagaccgccactggcagagcaaaacccgttctggtactggcggctaacgacgatccaccggctggatatatgcgaaagccgaagatgcagcgcctggaactgccggagtacacgcggtgggtgaaacgccagccctgttgtggctgcggtaatgcttccgatgaccctcaccacattatcgatcatggttttggcggaaccggaactaaagcgtgtgatttgctggttattccgctgtgcagggtgtgtcatgatgcgctgcacgcggataccagagcatgggaagagcagaacggcagtcagttgttgtggctggcgagaacgctggcaagggcgacaggtattggtgcaataaccgcagcgagggcgaaacagtga

SEQ ID NO: 400487 - DNA, 666 bp, Salmonella enterica
atgttcatcgtcagactagtgattataatattttgggtggcatacagttatggtatggggcaaacaccaccgagtatgctaaatggttttggtaagtttatttcagcatctttttttattgctgcccctttattatattttttaccatttatcgaagctgcattaaaaaaacaaaagaatatcgcggccatagctgcaattaacttgttacttgggtggacgttgttagggtgggttatcgcatatgcttgggcactaataaagaaaagtaatgatctggctgcagagtcacgcgaaactccacaagaggataaggaaaagagagtaaagtgcccatattgcgctgagatgatccttccatctgcaataaaatgtagatattgtggtagcgatataaaaagagaatttgagccggaaaaagaaaagttgttcaggcctacagatgtggagtttactgaattttttatcaaagataatagcgggagttttgatatcaactacgccaatattcacgagttagctgcaaatgtaaaaaaaaactatccggatctacacccgatgaatatctgggataaaattaaagacgatatcactacactgaaaaatcagatgccaagtagtgtcagtgataagtttgaaaaacagatacatagttattttttgtaa

SEQ ID NO: 400488 - DNA, 336 bp, Salmonella enterica
atggataaatattatgtccctgttttacaggatttaagaaaggcgatatacaatgacagattgttatcaaggcatgcagatagcggtaatattgtaatccatgattcacttggatatccggttgctaagtgtaaaaacacgggtattagtataggtatcgagccattaaattcgatgataagactggatctaactcttggatatatcgtggtagtcagaaacggaaaaacatctcaggaaattaatggattacttaacaagtcattgccaaaagcgataagcatctttaaggaacatatcaatgaatatgaaccagtaaaaagtaaaatgcgataa

SEQ ID NO: 400489 - DNA, 135 bp, Salmonella enterica; identical to SEQ ID NO: 246622

SEQ ID NO: 400490 - DNA, 399 bp, Salmonella enterica
atggatggtgctatacaatctgaaagtaacaaagaccttgccaaagcacatatagattttcttggatcatggctggataaggttaataagttaacaaataaaggtgttcatgccgagttagatcggattgaagctgtaaaatcagtatttcacatgtatttagtagtggcggatttgcttgagtatatgtcaaataccaaaacctctgtatctaagcctgatatcaataaagctactttagatgaactggaagcattgttaaatataaatagaacaatcgctaaagaaattgttaaagcacgagttcgtgaaggcaagcttgatctggatattttaaaaagcataaaaggcataggagctaagacgcttagtaatatacaagaagtgtttgttttgtaa

SEQ ID NO: 400491 - DNA, 435 bp, Salmonella enterica
atgtttaactatgctgtgaaacctgagtatgatcccgcaacagaaagctgggttgtcacatgccgggatctgccactatttaactccgtgagtttcagcattgacgatgcgcttcttgaggcggttgatggtgccatcgttgcactctcaatcgaaatcgacgcacgccgtccagtccccatcgccagccagcccgaagaaggggagtatgtcattcatcttcccgttctggttgtgatgaaagccgcgctgcataatgcaatgatttccacagggacacgaaaatccgatcttgcccgaactatggggatgaaaggtccccagatagatcgcctcctggatgtttgccactcatcgaaagtggaaacagtagaactcgctcttcagcaactcaaccggactgtacagataagcgttgataacgttgcggtataa

SEQ ID NO: 400492 - DNA, 228 bp, Salmonella enterica
atggcaaaccgcaaaccacgccatacccacgctgacgctcagcgtattcatactcataccgaaatcgatcgccgcctgttccgtgccgaacgtctggttcgctgcatgtattttgaggccatcagcgacagcagtcctgtggctgaattgtgcatgtcgtctgttctcagctatctggctgacgacctgcgggatctgcggaagctcacggaaaaatcccgacagtaa

SEQ ID NO: 400493 - DNA, 321 bp, Salmonella enterica
atgacgggaccagaaccgcacgctgatcatcttgctgacagcaattttcagttgttccggcgtcagttttttacccgtgaagcggctccactccggaggatcggctttaaagtgctccgcgatacccgccgccatgctgtagagaacgcccagcaactccggcgcactctcatcccgcagcgtgcggttaagatactccacttcgtcacaaaggaattcagccagatcctgcgccagcaacgcggcgtcgctttcgtcaccgtccaccagcgcattaaaccggaatgtcatcgagcggactgcgccataggcgtcgtctga

SEQ ID NO: 400494 - DNA, 399 bp, Salmonella enterica
atgcttggtgatgtaggcggtggggctgcccgtccgcctgtcgacgggcttaatcattatctgggactgaggagactgctccggtggctttcctggcctgttagcggaacagttctccgcattggcgtacatctcaaacacgtcgcgcaatgtcgattcctgctccctgcggacaaacagtatgccgtgccagtgcggtgtgccgtcatggtgagattcagtgatgtgcatcccgaagatatgaatatcgcggcgggtcagtgcggtactgaaattcttgaaggtgcgggtaaaatagtgctgagtctcgcgcggactcgccccgttccatttccggttgcggcgtccggtctccagccaggcgtgatactgctgcggtgccgtccaggtgaaaaatag

SEQ ID NO: 400495 - DNA, 402 bp, Salmonella enterica
ttgagaaaaattaatcgccctggttcgggcccttcccgtggactggcagacaatatccgccgtattttctctgcccttaccggaacattgcatacacgtctggagcttgtagcattagagctggaagaagagaaataccgcattattcatctcctgatagtggtggggctgacccttgtttttactgcgtttggtattatgtcccttctggtgtttattctgctgttagcctcaccagaacatcggctgatggtacttggaggggcttccgctgtgtttattgttctcgcattagcttcgagcattttcgtcagaaaaataatttcccatagcagaatattgcctgagacccgcaaacagctcggtaaggatttaagtatccttaagggggatgaagcatga

SEQ ID NO: 400496 - DNA, 354 bp, Salmonella enterica
atgaatatattaaagttggctgtcttttctgttgttgtggtatctacaggcgtttttgctgataccaccatcaagactgagcatttaaaaaacaaagctgagcaacaggaagcgcaagtatacaatcgcacagaagaaacgactcacaaggttaaaaaccgtcttgaggagaaaaagctgcaggctgaaaacagactcaaaaatggcggtgaagcgaccacgacagataaggtaaaggaaaactcacagaaagcctggaaccgcactaaagaagccacagaaaaaggctggaataaaacaaaagaagccgctcagcaggccggtgacgcggtaagtgaaaaagtgggcaactag

SEQ ID NO: 400497 - DNA, 249 bp, Salmonella enterica
atgagaattgaattccaggacgcgggctatgaagcccgcctgataatcaccgggaacctgtttgaggcccgaaagatagataacctggtggacagggttttatttgccaatccacagctacgcgcggttcagaacgggttctttttccgggaagtttttattacggggctccagatttacgtgttgtgtgctgaagcgctgttagaggctgagggttttaaagtgaaagagacaggagcagatggttga

SEQ ID NO: 400498 - DNA, 207 bp, Salmonella enterica
atgcacagactgagaatgctgatttgcagcgccgccttgcttctggtggccgggtgcgcgtcaaaggacgttgtacagtgcccgccagtaccacaaccgccagccccggcagcgtgggcaatgctgccaccgtcgaactctctcgggattctggacaaaacgttctcgatatccgcgccggaatcatcagcgatcaggcaaaactga

SEQ ID NO: 400499 - DNA, 714 bp, Salmonella enterica
atgtccgtcagtgatacccgtggtaaggaagtcagcatctgccgcagactcccagacaaaacccagtacgtaagagcccggctcaccaaatcccggtacagttcctccaccgctgccgtctttaccggggataccctgcggcccctgcggaccgggatcacctttcgggcccggttccccctgcggaccgggatcacctttcggacccggccccccctgcggaccggggtcacctttcggacccggttccccctgcggaccgggatcacctttcggacctggttccccctgcggaccggggtcacctttcggacccggttccccctgcggaccggggtcacctttcggacccggagttttcgcgatatcctgagcctgcttcagcgcctgttgcgcctgttctgtcagcacctcaaactgcttcatcacatccggcatcaggtaatcccctgtcaccgcagtcagaaaatcgttcagggtgccatccggcgaatctgcatatacgtcaatggttcccacccttcgtggtggccatgtctccaccgacagtgtcacctcatagcgcccgggttgtgcttcaatacggtattcccccttactggcccccacgctggcagtggtggtcataatcaccgcattagtggtgttcagcgccttcagaataatgttgcagtcagcaacgggatgtccggcaccgtctttgagggtacctga

SEQ ID NO: 400500 - DNA, 693 bp, Salmonella enterica
atgcctctaatccgaaacgccttcaagcgcctgcattttcccgttgatatcatggcgcaatgtgtccgctggtatctcgcttactcattgagcctgcgcgatctcgaagaaatgatggcagagcgcggcattcatgttgaccattccacgcttcaccgcagggttatccgtctggtgccactgctggataaggtctttcgtcggcataaacgggcggttggacgtcgatggcgtatggatgaaacctacatcaaaatcaaaggccaatggaaatatttatatcgcgcagtcgacactgcaggacagaccattgactttctgctgaccgcaaaacgggatgcagcctctgccttgcgcttctttcgcaaggctattcgttatcactgtgaacccgaggtagtgactatcgataaaagtggcgctaatacggcggctctggccacgctgaatatgggtaaaccagaagctgaaacgatgactatcaggcaaagcaagtatctgaataatctgattgagcaagatcaccgaaacattaaacgaaggatacctatgctcggatttaaatcatttcgacgggcacagacgctcctggcgggtatcgaactgatacatatgatacgaaaagggcaatgcatgcatccgaaaagtcagggcttatcacccgcagactcattttatcgattagctgcctaa

SEQ ID NO: 400501 - DNA, 291 bp, Salmonella enterica
atgattgattttgatgcaatggtaaagaatgaggatatggcggatattattttgtttttagtcaatcgcaatgaaaacggtatagcatatccgtccatagaccgtttttttggcagacataaagctgctgaaaagtatgagtcatataatatcaagttaatacatgaggtcagaaagcttgaggagagcggacaagttttatcatccagagtttatggtgctggttgtaaaaaaggccccaactggaaagaacccaggtttgtgaccgagaaaaaatacggtatcgaatag

SEQ ID NO: 400502 - DNA, 246 bp, Salmonella enterica
atgatcgaccgtctggaaaaaatcctgaagggggagctgcaacccactgatactgacaagcgcttttatactcatgaggtaagggaactcgaacgttatcgggcgctgggtattgccgatggaaccgttccagaaaatgactacgaagtatggaacaacactcacacggcaactctggaagactacaagctgagctctgatgaaacacttttgtatacgccagaagctttaaattcacaaaattaa

SEQ ID NO: 400503 - DNA, 312 bp, Salmonella enterica
gtgaagctgcatacgggacggttcggggaattacctgacaacaaggttatgattgaccgtctggagaatatcctgaacggggggttgcaagccactgatacagatctacgcttttacacccatgaaatcagggagcttgagcgttatcgaaatctgggggttaaggatggtgttatacctgacaattatgatgaggtttggaataacacccatacagcaactctggaagattataaaattaatgaaaaaactcaacctttgtatacgccagaggctgaggaagcgtatcgcaaagcagaggaggggaaataa

SEQ ID NO: 400504 - DNA, 264 bp, Salmonella enterica
atgttagatcttgaaagtatttataaaaatgaaagtgtagaagatgttcttttacattttgcgttgcgtacaccttaccaaactattgaccggatgtatgttaattacaaatttgaggttgttgctaatggtgaattgttaaaaactcatcaaaagctttttaaagaggggaagttgaagaaaacaggtaaaccattacctgaaaaaggccccaactggaaagagcccaggtttgtgaccgagaaaaaatacggtatcgaatag

SEQ ID NO: 400505 - DNA, 972 bp, Salmonella enterica
atgataaataaaaaagtagtaatgataatggatttaattatggaatggagatttttaggttctctatcagaggctaggaaatctggctgtagcggagtttatcttattgtccataaaggacttttcagccgtgtggtttacgttggggtaagttgtaatgtaggtagaaggataaccgaacattacgacggttatctgagaggaaatcgaacaatttacgacgcgggtcacgacgacgacgtttatcgcttcatgtcagcttataaaattcataaccacacaaaatactatcaagccttggcgaaggattataagatatgggcatctaccacattgtattctgatttgccgaaaaacatgctagcaaaaagccaaacctttgatactgattggcagaacattgcattagaaaaatatattcctcaactggtagtatgggcccttccaatggcaaagtactgttattcaaatgcaagtaggattgaaagtgtaatccaatcaaagctcattaaatcttttgatttgagaggtttttttaatataaagaaattaagcatattgggtaaaattgaatatccccatatggaaaaggtcaaagttttcattattggcacacctgatttagacccggcatcccagcttatttttagcaatctatataacaaaaaaactgatgacaacttctgtaaagagttccgttcacaatttaaaagcgagatttttcagagggaaagtgaaactcagagaaagcgaactatcagggaacataaggtatctctttatgaaaattatggcaagccttggactttaaaggaaatggaaaaacttagagtcatgcttgtcgattttgatttgtccccgacacaaatatctgagtatctaggaagagagccgcgctctatatctaaaaaaataagcgaaaatgataaagttactaattataaatggcgagagagcgtcggctggttgtga

SEQ ID NO: 400506 - DNA, 171 bp, Salmonella enterica
atggttgtcccttacgagcgaggaacggacattactaacagcattctgtgtgaatcaccaggcaacaggtcagcgccactaccctatataatcgctaacgatgataagtataattatataagtctttgcccttatcttttggataaaagtgttgaagtttcacgaaaataa

SEQ ID NO: 400507 - DNA, 246 bp, Salmonella enterica
atgaatatgtcaccgtggaacaaagaccgtatcatcggccaaaaaagaccacttcagatatctcatatctgggggatccgaatccggcttgaactggaaggtaaaacacgtgatttagctctgttcaatatggccctggacagtaagcttcgaggctgtgatctggtcaaactcaaagtatctgatgttgcatatggtatgctctgtttcaagcagagcaacggtgttgcaacagaaaaccggtag

SEQ ID NO: 400508 - DNA, 381 bp, Salmonella enterica
gtgttgcaacagaaaaccggtagccctgtgcaatttgagataactaaagggacaagagaagctgttgctgcattgataaaatttagcaatttgcacagtaaagacttcttgttttggtctcgggtcggaactaaccagcacatttcaacccggcaatacagccgaatttttcatggatgggtagaaaatcttggtctcgaagcatcgctttacagcacacattccatgagaagaacaaaaccttacctaatctacaagaaaaccaagaatctccgggtgatccatcttttgttgggccataagaaactggaaagcacagtccgttatctgggcattgaagtcgatgatgcgttagagatctctgaatcgattgaagtctaa

SEQ ID NO: 400509 - DNA, 318 bp, Salmonella enterica
atgaaagagcttacagagtacggcagaacaactattgatagaattaattttctgattaatgcactatccgaaaaagaaaagaaaaactatttcagattagaatctttcataaaaatttgggccgcctccactggtggaagtgccgatatcaacgaacatactgatttttttattcgaacaaatacgtatgcgcttaggcaaatagatgctgtgttcttcaagaaatttgggctgcacattgagaaaaactcacatcagctccagatgaatgaagatgagtgggcaaatggaattaagcctatctcacataatgactaa

SEQ ID NO: 400510 - DNA, 171 bp, Salmonella enterica
atggcagtagaaaatcgagaaagacttaacgaaatccttcgtgaactaaaagacggtatgtcctcaaacccaatatcagtgcgagaattcataatctggtttggcgcagagcgtcgaggctacatggttgcgtacaaaattcgcaaagcattagaaatgcttaggagttaa

SEQ ID NO: 400511 - DNA, 906 bp, Salmonella enterica
gtgccgctggatgcaaaaattactatctatgcacctccggggaatgacgcaacgccccatgaagcaggtgaatgcttagacgaagcaaccgaatcaagtaacgccgaattggctacacctgaaacagtatttcagccgcatgatgaactaatttccagtgcagtttccgagccagccttccgtgttagtcgactcgaagcatcggatgttaagctagtgaccgtgaaacctgacgctacattaacagaagccatcacattgatgttgcggcatgactactctcaactacccgttatgaccagcgagcgagatgttaaaggtgttattagttgggaaagcattgctccaatactagcgttgaccaaatccgaatctgcggttgtacgtgattatatgaagccacacagggaaataaacgccagtgactctattttttctgcactacctagaattattgagtatgcttacgtattagtgcgatcttctgatcaaagaattagtgggattataactactaccgatcttagttctcagttcagacagttgtcagaaccttttcttttactatctgaaatcgaaaatcatattcgtaagctgatagatggaaaatttacgaaagatgagcttgttagcatcgttaatccatctgacagcgaacgggttatagagtcggtcgcagatttaacctttggggaatatatacgactttttgaaaatccagaattgtggaaaaaaaccgaacttcaaatagataagaaaatctttactaaagagctcgacaaggtcagaataattcgtaacgacgtgatgcactttgatccagatggtatatcaaaggaaaatcacgagcttcttcataattttgtaaggtttattcatactatacaaagcttatcaagaaaataa

SEQ ID NO: 400512 - DNA, 918 bp, Salmonella enterica
atggccgttttttttgattttgatagagatatagtaattcatgaataccaccggataagcaaatactatatatccagtagcacctatcgacaagtgaaaggcaccgggttacctgcaaattcaacggaaatccccccaccaaaagaaaaagctcccaatggcatggtgtatatatttaacggtaatgcctgggatttggcacaggacacattctcacgacctaacattaaggaagttaactatgcgtacacaggcgaaagaccattagagatggtaatcgagaggatagattttccattttcttatttcccgcaatacaatgatgttgtagattacatatcatcaggtctaaaaactttgcatctatcattcaattatgttcgcatacagaaaaaatacctgtatatcattggattatttgattcagcaatatcagagaataacccactcacatttccagagaaaattttcgattataaggtagaatctgagttttttgttgcgatgataaggtcattttttgatgaaatggtccaactgacatacctattgattaacgaagtgagtgacaatttaattgacagcattggtttgttaatccgtgataaaaataaaaacaaagagtgttatgatatattctttggtgatgacgatgtctatatcaaagatggtagtgactacttggtcacaataaacgatctttctaactcaataaaacactcctcactgcattacgagtcgtattcgtcttatcctctttcaccaaacatactttctttttataaaaagaataacgcattcaaaagtaatgatgtagttatacacaatcataatgttgtcgatatatttttagggttcaaagataattttcataggattattaaaaatcaacagacttatgtatcgagaaacacttag

SEQ ID NO: 400513 - DNA, 1029 bp, Salmonella enterica
atgacaatgagttggctagaaacagttgctaagaacgtaggaatatcagttaccgaagcggaagagcgtctccaaaagcgggggatcttttctgacaaaacaattaggcctaccccaaaattaacaattaccggtattcgatttaaaggctataaagttggtaaagtcacaggggcatttagttttagctggcaggatttaagtactggggtatgggctgttacaagttttggtggcacaaataaatccaatcttgttggcaaatcaagtgtattggaaatcattctttggtgcttgcgaggtgaagtcaagggacttcaagaggatgtccgtagttggctttcttgggtgcaactcactttccagcttgatatgcgtccacataccatcgaattcgcagtcaataataagcaaccgaatggggaactgaaaactacgaggccaaatggagattgcgaaaccattgcccgatttagtagtgatgaaggttttgccgcagtcatgtctagtttcatgatgaatgtttttgatctccagcctatatcttcacgtaaaaataatgatgtaggtggcagtactgtcattcatggatggtcagcattatccggcgcgctctattttggcggggaacataaatcgttgctcggtgatgttttgatgtctgggctaccgggacgtatgttgcaattgtacgttggaatgccttgggctagtaccctaatacagtctgtaacagcaaagaaagaaatagatcagcaagccgcatacctcgctcgtgagcatacttcactaatgaccctagaagagaaagcattagtgcgagtatctactcatctcgaacaggctcgtagtgatcttgttaaaatcactgacaaacgtgtgagtgtttctacgcttgatgaactcatggataaagtacgaacgcttaccaagcaagttttagatagtgagcacatagctgctaaagcgttaaccgaaatgacagcacttcgaagctcatcagatggggttaggatccttgccctttaa

SEQ ID NO: 400514 - DNA, 396 bp, Salmonella enterica
atgataatcacagggaaaagcttgtcgcttcccggcgtaatgccgacagaacagcaggggaacagaagtgatggcggactcaccactgtaaaaacagacggcatcaccattaccggcgatggcaatacaaccccgttatcgctggggccgggggtaattgatggtgtgggtgggtatgttatggcttactgcccaggaaatggtcaaggacatgattcttatgggcaaactatatctggttcgtctttagtgccgacatcttatgcgactggcggataccagggacgtacttatgttacagccagttatacccgtagtttaccgggaacctggagactgtgttgtgaggccattactacattaggttctgttggtctgtatcaacgtattgcatag

SEQ ID NO: 400515 - DNA, 801 bp, Salmonella enterica
atggcggaattatacgctgatggtcaaatctccccggataacaaggcactgggtaatgttgatccactggtcgccatagaaaatcagtatgagcgtgaacttgctcttcttgattattacaaccagaaaaaacttctttctgatgaccgttaccagcagttacgcgctgaaaaaatccaggcgagatcggaggctgtaagccagtaccagaaccgggatgccagaaagcagttgcagacgcagcaacagctatttgagggtatggccggactggtgcaggggtttgcgggaaaaagttctggtgcttaccgcgcattgttcagtatctccaaagcgttccatctggctgatgtgatcatggcttcgcaaagtgcgatagcagacgcatggtcgtctgcacctttcccggcaaaccttgctgcggttgccaccacaacagcaaaaacaggcttgcttgctgcagtggtgcagtcggtgacgatgcagggtatggcgcatgatggcattgatcacgttccgcgtgaaggtacatggttgctggataaaggggagcgtgttgttgaccgacgaaccaacgctgacctgaaagcgtatctggcgaaaaagcaggaaggcagccgggtaaataacgtggtggtcaacagtaactccagcctgaccgttaataataacgggcaggacggtgatgataaggcaatggattattccgcgatggtaaataccctgggagagagtatcaagtcaatgataagggaagagattatgggaatgatgcgtgatggtggcgtgctgagcaggtga

SEQ ID NO: 400516 - DNA, 453 bp, Salmonella enterica
atggcactcactgataccgctatccgcaagcccagccccacagacaaacccttcaaactcggcggcagtgccggactgtacctgctgatcaaacccaacggctcaaaactctggtatatgaagtaccgcattgacgggaaagagaagaagctggcctttggtccttacccggatgtttccctgcttacggcatgccagttccgcaatgcggcacgcagtaaaatgcgtgcgggggtcgatccctccgttgacaaaaaaatcgcgcaacagaaaaagaaaaacggacagacattccgccagatcgccatgaactggcatgccgatcaccgccgctggatctggatctggacggtgaatttacgccgccggaaacacagcattacccggccctgccgcttgagaaactaccagaattattatcccggacggataactactccggcaggctgctga

SEQ ID NO: 400517 - DNA, 1038 bp, Salmonella enterica
atggcactaacagcgattgatcttttctgcggggcgggtggattaacctgcggtttaaaacaagctgggtttgagattaagctaggtgttgaattagaacacgttgctgccgaaacctataggatcaaccacccggagcaccctttgtatgaagctgatattcgtacgttagatcctaatgtcattatgaaagagctgaaaattgaaccaggtgaactagaccttttagctggatgtccaccttgccaaggattttcttctcaccgaacaagaaacaaagtaacgtcaatagacgataatcgtaatgatttgatttttgatcttatgaggtttgttcacgcatttcaacctaaagttgttatgattgaaaatgtacccgctttagcaaaagataaaagaatttctttagtcttaaatgagttaaatgatctagggtacaatattggcccattgagcttacaagtaaaaaatactgctctttatggcgtaccccaacgacgtaaaaggatgatacttgttgtatcaaaatttggtttagtaaatgagcctgatataataaaacctcaacgtacagtaaaagatgccatcttcaattttccaatacctggaaacagcggtgatgtgttacatgatattatcgaaaaaaggtctgaaagaatcaaaaaaatgataagccttgttcctaaagatggtggatcaagggctgaattgcctaaagagtattggcttccttgtcacattcgaaaccccgatagctaccgtgatgtatacggacgtatggcttggaacttggtatctccaacaatcactgggggatgtataaatccttcaaaaggtcgttttctacatccagaacaaaatagagcgataactcttagagaagctgctactttacaaactttcccttcaggatattatttctctcttgcaaaagggcgagattttgccgcactaatgataggtaatgcgctgcccccattatttattcatgcccatgcaattaaaattaaagaacacattgaatctgcatgcagataa

SEQ ID NO: 400518 - DNA, 609 bp, Salmonella enterica
atgcttaaacgtctggcttatctgatagcaggcagcactcttcttctgctggcggcagcggtgttctggtgtttcaaccgcctgaacaccctgacactggcgcagcaacagacacaacgccaggtaacacagtggcgcgaccagtcgcagccagacagcgattatcacgagctgaaggttgccgtaaaaaacatcaccgatcgcacggaagcccttgccagacagcttagcgatgccgccagcgctcagaccgaacgacttcaacccattaacgaacagatcaaggcgcaggagagacaaatccagaccctcagcgccagttatcaacacctgcaacaacagaccgccacgcgcagccgcgcaaaggcaaaacgtcccgtcccctctccgctttgggccgcaaaggcccctttttctcttatcagcagcgagttccgtgccgggcggcagttcgccgtcatcgcgccatccggctatcactcgctctcacagcttcagcttgtggcccccggtgacagcgtgcagggctggcaactgctgcaactggacggcagtcacgccactttccgtaaaggcgggcagcggctgacgctgaacgccggaggataa

SEQ ID NO: 400519 - DNA, 1317 bp, Salmonella enterica
atgaaaaaattacccctaatgatatctgccgcgtgtatggcctgttcaaccagcatacccatggcgacagccggaaccagtaataatctgttgctggaaaaagtcgtcaccatgactcggcatggcgttcgctcacaaagcaacagcgccagcgtacaggaaaactcccctacgcctatccccaccttcagcgcgaaagacggtgagctgacaatgcacggctacgctgccgtgacattgctgggagattatttccaccgttattttgtcagccagaaatttctgactgaaaacacctgtcccgatgcaaagaacatctttatccgttctagcgcgtttcagcgcacccgcatgacggccaacgcgctggctgattcattatttccgggctgtgcaataccgattcactccccggacaagaaaactgacgacacactgtttgaacccatcgtcagcggcatggcaccactgaatgttgaaaaagcgacgcagagtgtaatgacggcgttgggcggcagtttcgatacggccagacaacgttatacgtcgcagataacagcgatgcagaaaatagtcgatcctgaatgccagcccaccgaatgcaccttcaccaaccataaatggggaatcagtgccgacaagcaaaatatcaatatttcactgaaaggaccgcttgcgaaagggaacgaactgggcgaaaccttccggttgcaatacaccgaagggatgtcggttaaggacgttgcctttggtcatgtcagccgcgctgccgatatcgcgccactgatgaaactaaaagaaatcaagtttgacctgatcgaacacaacccttacatcgctgccagaggaggttcccagcttatgagtcaaatcctgtatgcgttggaacaaggttccggctatcaggatcctgatgccaacagacaaatcagtgcctctgcgtcggacgcccgtatggtgatgtatgttgctcacgatactaaccttggctatctgcaaccactgctcaatgtctcatggcaactggagggctatccgaaagatgatactccaccgggcagcacgctgatgtttgaacgttaccgcgacagcaacacccgtcagacgtatatcggtatcacttttgtcacacaaacgctggatcagatacgccgtcttgagccgctgagcgataaaaacccgccgctgcaacgcaaactcaatctgaactgcaaaaacagcccggatggctggctgtgcccgatagatgagtttgccgcgcaggttaacagccgtctcgataagactgcgatgattacgcagaactacgcggaatag

SEQ ID NO: 400520 - DNA, 258 bp, Salmonella enterica
atgcgccagttggcaggcctgatgatgcgccacgctcatggcgtgacgaaaggtgtcgtacgttccacagtccatcaccttttcataagaaaaggtcagaacggtatagccggtacgcttactgacgagcgcatggaatctgtcatattcatccatacgcacttcagcccggaagctgagacaacccgaaagactggcaatcgagtccgaatggtgggtaattcacccacccgacgtgaaaatatcatgaggcagtag

SEQ ID NO: 400521 - DNA, 276 bp, Salmonella enterica
atgactggtgcatggaaaattaatgaaaatatgaagccctgcgaattgcctgaagatgctgccactgtatttactgatgcaacaaaatcctttgttggtgcgaaatatttacctgttctttatgtcgggaaacagatagtcaatggttgtaactacatgtttgtctgtaagcaggtcctgtcgacagaacataaagatacgcatgtggtgaaaatggtcatttataaaccagcagcgggtaaggcggaaattctttcgattgaacaattgctttag

SEQ ID NO: 400522 - DNA, 528 bp, Salmonella enterica
atgaaaaaactgattatcgcagcaggtattgcagcagcaacgatggcatctttcaatgcgagtgctaatgaagccgttttcagtgacccttcttatgccagcatcaatactactgtaaatgctaaatcagtcctgtctgttacgacgactgatggggagacagatgttgcaggaattaataaggcagggacgacactcggtagctttactgtagcacaagtcggcatgaatggtctgaattatgacaaaatcgctgtggagaaaattcatactcatggctattataccaaggaacagggggatttcaatattgtcttaagctcggggggggctacttgtgaagtaggggcaggtactcatgagtcgagcacaacgagcagccttggtgtagcagcagatggtgaaacctgcgtattccaggcggctggcaatattaccattgatgtaaaaacgggtactggtaatgttactcctcttgttgctggtgttaagaccatcactgcacaattccgtgcattccacctgtaa

SEQ ID NO: 400523 - DNA, 264 bp, Salmonella enterica
atgctgctggatgaggccaccggcgctcttgacgtagagaatcagtccgcgatcgccgtcggattacagtctctgcatcattgttgtacgttgctggtcattgcccatcagctctcgactatccaaaacgctaaccagattctggtgctggatcggcagcacattatcgaaccgggcaggcatctgcaattactggccgcaggtggtcactatgtcgatttctgggaggcgcgtaaccgtgctgaaggctggcgtctgcaataa

SEQ ID NO: 400524 - DNA, 270 bp, Salmonella enterica
atgtccgaagcgattatcaatagtgaacaggccgcgcagttttggccgctgcctgacgtggatctgaccaatctggacctgttcagccgcgggtttctacatcagatactcaccgacctgcgtcgccaccacggggcattgttccgtccccggacggcgctaatgcccgatggcgaaggattttgggtgtttacgctgcggccatcgcgaaagataacgacaccttctcctccgccggtggcggcgctcggcagagcgggggcaccatga

SEQ ID NO: 400525 - DNA, 291 bp, Salmonella enterica
atgattgaggatttgctgcgagaaatggggtcgggatcggtaatcaatatgatggacgatccgcgtcataaggcgctacgcagattgattgctctggccatcatcaatgctcgtgtggcggcgatggaggatgttctgtttaccgcagcaggggctgccgtacaggccccactccagcaggagcgtgttgatttcgtctcggccatcgcggcggaactgccactgtttgctatcgccagtttagtcggtatcacacacgacgatctccatcatacttttcgcgtggattaa

SEQ ID NO: 400526 - DNA, 237 bp, Salmonella enterica
atgagcaaccttttgcgttcgatattggccgccagaaaaatctgcatatggcatttgggggcggggggacatacttgtcttggcgctcagctggagaggctggaaatgcgcgtaattttgcaccacctgccggatcaggtggatggcttcaggctggatggcgatgttaactgggggcgcagcaataagcataccgggattcgcaatatgccggtgcggtttgttaaacgttactga

SEQ ID NO: 400527 - DNA, 915 bp, Salmonella enterica; identical to SEQ ID NO: 78745

SEQ ID NO: 400528 - DNA, 1368 bp, Salmonella enterica
atgacctctaacaaccgcagaaatgtttcggggctgttttctcaggatgctgagcagagcgtcattggtggcctgatgctggataacgactgctgggatgaagtggcgctccgtctcgataccgatgatttttatttcaaggttcaccaggtcatctttcatgaaatggcgcgtctggttgcagcagggcgtccgattgacctgatcacacttgctgagagcattgaaaaccgtggtaaggatgcgcttgagcaacttggcggattcgcctatctggccgaactttcaaaaaatactccaagtgcggccaatatcgtcgcttactgtgacattgttgccaggtacagccaggggcgacagttggtcgccattggtgctgagataaccgaaactgttaaggcatccggtgctgatatcggggcggtgatggaaaccgcagagcaaaaaattacccggctggcagaacgttcagaaccacagcaggccgtgacgctgcttgacggcatggaaaaactccttacagagctggaacgtcgttgcaatgtgcctgatggtattactggtacgcctacgggatttgaagattttgatgccatgaccagcgggctgcaggcagctgatctgatacttatagcagcaaggccttcaatggggaaaactgcctttctgatcagcctgattttgaattcacttctgaaaaaagccgatacacatgcgcagttttacagccttgagcagcccaccgagcagatcctcatgcgtatggtcgcttcacttggcagtgtagatttaacacatttaaaaaatggccagatggatgatgaggactgggcgcgtgtttcaaacgcgtcttcactattgatgggtgaccttaaagaccgcctcatcatagatgacacaggctcattgacccccgccatgctcagaattcgcgcccgtcgtaacgcccgccgttatggtcacccttcagtcatcggtcttgattacctgcaactgatgcgttgtccggatcaggagaaccgcacacaggaaattgctgaaatctcgcggtcactcaaagcgctggcgaaagaaatgggttgtccggttgttgccctttcgcagttgaatcgtcaactagagagtcgtgctgataaacggccgaacaatggcgatcttcgtgattccggtgccctggaacaggatgctgatgtaattgtctttatctatcgtgatgaggtctatcacgaaaacactgaagacaagggggttgctgaaattattgtcagcaaacagcgtcagggaccgattggtacgatccgactgcaatacgaaggccgttatacgcgtttttctgctaaccctggtcataccgggaggtttgcatga

SEQ ID NO: 400529 - DNA, 1716 bp, Salmonella enterica
atgagcaacgtccgtagtcttaaccttggcgacgccatgttgcagcgtggaaaatcaccggctcaggctgctgataataatactcccaccgttacccagccagtaaacgaaatggcaatggttcttacccttgaccagcttcgcccgaatccggataacccgcgcaaaggacgcaatcctcgttttgaggaaattaaagcttccgtccgtgcacgaggattggattcgattccaaaagtgacccgtgatccggatggtgatgatgtttatatctttagtgacgggggaaatacccggtatcagatactctgcgatctctggcaggagactggtgatgaacgtttttatcgcgttcacacgatcttcaaaccctggcctggacgtctaaaatgtctggttggtcacctggctgagaatgaggtcaggggggatcttacctatatagaaaaggcattcggtgttcataaagcgcgggtaatttatgaagagcaactgggccggagtgttaccttacgagaactttcggatctgttgggtaaggaaggttatcctattgataactccagcgtaagccggatggaagatacgcttaattacctgtatccacatatgccccagttgcttgagagtggcatgagccgtggtcaggcaacaccactcctgagccttcgttcttcagctatgaaggtctggaaatctttcagcggtgacgtaaacccagaatgttctcttgatgatgtgtttggtgcagtttgccggtgttttgatgaacctgaaagctatgcccttgatattttcagggatgagtttattggtcaactggttaaggctcttccccatccaagcctgaattatgaccgctggttaattgaacttgatcctcgtgagcaaaaacgcagggaacagtttggcgagccgcctccactgccagcacctacacccgcgtctgaacagtcaggtggtcgggaacgcacaacaccaccagttacgactctgccagcagatacttcatcccagccccctgttactggtctgcgtagcggtacgctgactactccagggcgtccggaagctgtaccagaacttcaggacaatactgcacttcccggcggtatgtctgttggaagtgagccgcgtcgtgaagttcagaatgacctgtttggtggaaatcctgtgattaccggtcagacagagaatcctgataacgatggagagtggcaatttaagtcagatgttaatgccaacgcgctcgtttctgcttttggcgaacaggatgaaacttccacaccttcagttagctcagtggccttcgccgcaaccgggttggaaccggtcaatgatatctggcacatctccgcattacaggacgacatcgagcacctgcaggatatggcttatcggcttactttcgaaattgccgaagcgatgggctgcgcggactgtgttcgggaggataaagaccatcattcaactggtttctccatttcagagaacgccagcgagtttactcttttcctcgccgggctatcaggttcactgcctaacaaacagttcaatatgttcatgttctgcctgaatttttttggctctcaggaacctgcagatactgccgttttcgatgatgtcactgttgtaaaaacaatgcgccttatccgcgttatacggcgtctgcgtgagctgcagcgtctggctgtgaagggaggggaaaatgtctga

SEQ ID NO: 400530 - DNA, 255 bp, Salmonella enterica; identical to SEQ ID NO: 78748

SEQ ID NO: 400531 - DNA, 780 bp, Salmonella enterica
atgttcaccgtgctgccggctgcagggggctacaccatgtctgaaactacaaaagtgattgcacgtatccggcgactgatggcgctgggtacgcggaacagtaatccacacgaggcggcccgtgcagtggctctggctcaacggctgatgcagcgtcatggcctgactcctgacatgctttctcttcatgatatccaggaatccgtctgtcagaacctgaccagtaatgctgaaaaagtgccagcctggctaagttcactcgcaacagtggtatgcatggccacgggctgccgttgctggtttggctggcatattcacactagttgcagtggtgtaaaaagcgttcgccgatctctgcacttttatggtttcagcgggagagccgaagttgcgctctatatctataccgttttacagcggcaacttcgtgcagacactgacggtcagattgccggatatcggaagcgccgtattcttaagaacacgcttcgtcgcagagccgatcagtttcgtgaagggtgggtatctggcgtctggcaggtactgcagtcattcgcgccttcagaatgtgagaattccatgcttcagcgctggcttgcccagcgtcacaccggcgacaccctggggactgtaaacgtcagggtggccggtaaatgccgtggcgacagagcagcacgcgtagcgggctggctcgcggggcgggataccgaagttcatcaaggcctgactggtgcgcaggctcaacagcagattacggcgggaggctgtacacatgagtaa

SEQ ID NO: 400532 - DNA, 597 bp, Salmonella enterica
atgagccagcacaacctttcacaggccaccacggccatcctttcatcactgctgatggatgttaaaaacggcaatattcgccgctgtgagtcgctgggaatgtcactcgaggagatacgcgcactgagtcagttgagccttgatgagctgcattatttgagccagtcacacgtttctgtgcttgatgttagcctgaatcacgaaaatttttggctgatgctcaaccaggcacgtaatgagcagaaacgaatgctgatgatagaccgggcgcttgagcttggcggttcaatggaactgattgataaatacttcggcctgtctccatcagaggttagcgcacggcgtcgtctgatggggatagagtctcgccagggccgcacccagtctctgacggagccacaggattcggcactatggatcgagtggaaggctgccgggctatcatccccggactctcatcaggctctggaagcgatgatgcttgccgctgagcagcatggcctgtcactgaccgcagtctggagcagggtctgccagtggtgccgggagacaactccatcccgcaagagtgaatcacaacagcgcaaggaggcatga

SEQ ID NO: 400533 - DNA, 231 bp, Salmonella enterica; identical to SEQ ID NO: 134458

SEQ ID NO: 400534 - DNA, 1233 bp, Salmonella enterica
atgaccattccggcagacagcatagttgctcatacactgtccaggatgcagcgtagtctcgaacggcgtacagacactggtgatgtcggtcaggagcgcagcgggcttctttttatgggaaatgtacatgatgcgtttccccgacagctgtttctggatacccgtctttcgccactggataaaaccgcctgggtgatgatccggttgtatgcacagcagaatgaaggtgctgttttcccgacttatgatgagctccaggttcaactggcgtcggcacattcagagaaggcctccagagatacggtcagccgcgttctgctgatgctgcgtcttacaggctggctcagcctgtgtaagcgtgttcgcgacgaccatggtcgtgtgcggggcaatatctatgcacagcatgatgagccgctgggctaccgtgatgctgagacttttgatccgggctggctgacccttgttgaagagagttgcctgagcaggaataaagccgtccgtatgacggcgctggttgtagtcaatgacatccttcatgatccgggaatgcgccaccgtcacagccgcctggccattattgagagccggctaagtgcacctgccacaccagaacaaatggctcgtcagcgacaggctgtgcaaccgagtccgaaatcaggactcagtaaaaaacgcataaaaaacagcccgaattcactgagtccggaaaacggactcagttcccttaaatctgataattcacagagtccggaaaatggactcagtaaaaaatcaaggagttacgccggagtccgaaattcggactgtaacgtacgttctttcacacacagtgtgaataaaaaaacgtacgtaccgtgtggtgagcaattcctgccagatgattttctgaacgctctgaacactgaagacaggcagatgctgagtacgcagatggcttcgcttccggagacaatggcaaaggcccttgctgacatgctgcgtgaacaacaggcccttggaaggctcaacaatccggtgggctggatgttctctatgcttcgcagggcgcgaagtggtgagctgaaaatttcagaggatacggcgactgccagttctggtggaacaatttcccgcccggttgaatcacgtactgtacccacagccgacgtccctgttcaacctgcgaaacgcccgtctcaggggcaggtaagggcgatgattgcggctattcggcaacaggtccagaaatga

SEQ ID NO: 400535 - DNA, 723 bp, Salmonella enterica
atggcagaaaaaaatgagaaaagaactggtgcgctgcagtctgaaatgacgatcgcactgcatacgaattacgcaatcgggctatggcaagggcgtcagcctgaaaaacaggacggtgaaaagcctgcaaggcatggaattatcggtatgcctcagtttttccaccgtgcgactctgattaaccaggattccctgcgaaataatccatgggctgatgttgctatgtttaacctggaagaaaagatcaaggttgcatcagattctatgactgctttgatacagcaacttgatgctgagatgtcaatgttgccgcctggtattacattgacagaagttgcatctgttgagccactcgatatccaggtatttacacgaacccctctgggttacaggtgtgtgtttctgttagtaggattcgatcagtttgcgaaaaaggcactacaggcatcgcattatggattaattacacgttctcgccgtgatcatcatcttagcgaaggtggcagattaattcgtcaggtctatggctctgttttatcttatcgccgtattgatgctacccggtttgatgctgtggaaaacaacgaaacatggaaacaagcatgcgaggtggcgggagagccagacttgtctgttcttcttggtgaaaagcgctcagctttctcaccgccggttaatgaatcgagcgtaaacctgcttcgtatgcgatatcgggctgcctga

SEQ ID NO: 400536 - DNA, 2010 bp, Salmonella enterica
atgcggttgtttatctgcgaaaagccctcacaggggcgagatcttgcgaatgttttgggtgccacccgacgtggcgacggttttctaactggccctggcgtcactgttacctgggcagtagggcatttgctggagaccgcaccgcctgaagcatacggtcaacagtatggcaaaccatggtcgctctctgctctgccgatcctgccttccccatggcaggtggtggtaaaaaaggagacgaagtctcagttcaaggttattgagcggctgctgcgccaggtcgatgatgtggttatctccactgatgcggaccgggaaggagaagtaattgcccgtgaattgctggaatactgccgctgggacggtcctgtacagcggctttggctttctgcccttgatgaaatgagcatccgtgcagctctccaggatctgcgaccgggtgccgaaactcttggaatgtatcatgcgggacttggtcgcgctcgtgccgactggctcattggaatgaatctgtctcgtctgtatacactgcttgcagtacagtcaggattcgacggtgtgatttctgtcgggcgggtgcagactcccaccctggcactggttgtccggcgtgatcgggagatagcgacattcgtcccaaaacctttctggcaggttaaggcgcttctgagtgcgggagggagaacttttccggcgcaatgggtacctgcaaaggtttataccgacgaagaaaaacgctgtgtacaccaaaatatagcgcagcaggtagcgcatctttgccggcaggctggagcagcgaccgtaacagaatgtgagacgaagcgtgaaaaagcggcagcaccgctggctttttcgctcggcactttacaacaggcctgtggcctgctctgggatatgtcaccccagcaggtgcttgacactgcacagagcctctatgagaaacacaaggcaaccacttatccacgaactgattgtggataccttcctgagtctatgcgtgaggaaatcccctcggtgctttccgctattggcctgtctgatccagagtgtagttctcttctttcaggtctaaatacttcgtttgtttcgcgtatatggaacgacaaaaaaatcacagctcaccatggcattatccctacccgaaacgcgtttaagttttctgcgttaagtgaggcagagcgaagggtatacacccttatccgccgaaattatctggcacaatttcttcccctgcacgaatctgatattactcgtctgcagtttgacattggcgggcaactgttccgcacaacaggaaggacggagattgtaatgggctggaaggtccttttcagtaaggaggaagaggatagtgcaggggatgatgatctcagtattgaacttcctcctctcaggaagggtgaccgttgcggagtaaacggtgcagaggtcgtgcagcaaatgactcgtccgccggctcactatactttcgcaacactcatcggcgctatgatgaacgcgtcagcgtttgttaccgatattgctcttcgtaaggtactgaaggacaacgccggattaggcacggaagccacccgtgcaggtatcgttgagcaactgctgaaccgcagatttattgtgcgcaaaggtaagcagcttcgcgcgactgatcttggtgctgatgtcattgatgctctgccctcgcagttaaccgacccgggaatgactgcactttgggaacaggctctggatgaagtagcagaaggacgccttaccctgaatgattttttgcagcgacaggtcggatggacccgtaaccttgtcagcatgggaggacagcagcgggtgagcattagaataccacccacaccatcgtgccctttatgtggggggaaaactcgcctaaaaaaaggacagaaaggagagttttgggggtgtactcgttatcctgattgcaaaggaatcatcaacaacgacacccagaaacgtaaaagcgcgcgtagctctaaggctgtaaaaccaaagaataattaa

SEQ ID NO: 400537 - DNA, 492 bp, Salmonella enterica
atgactgctactacaactgcatcttcttccaccacctcttcctctgccagccagaaaaaagagtatttcaatcttaacgtaagcggtatcggctacctgagctcgattcgtcgtgtacagggccaaaacggtgaatttacctgcgctgtcattaatgccctgactggtcctaccgacaatgcgtcatacactcgcttcgatgtcactgttgcgggcccagaagctacaaaactcatcaaccgctgccagaaggccgtggatgaagaggaaaaagtattgctggggtttgtgctgagcggcctgaaagctgacgtgtttacccttcagtcgggtgaacattccggtgaatccagaccttctctgaaggctcgcctgattaaggttgagttcattaagaaaggccaggaagtcgtttacacagcgccaaatgcatctcaaaccccggaacaaggttctgcggctcctaaagactacgatccgaactcgttttaa

SEQ ID NO: 400538 - DNA, 204 bp, Salmonella enterica
atgggaaatccattcggtttactggcttcagaagctgggcatcaattacagatccaggttctgtccagtcagcgcggtttttatatcggaaccgcgaacgaaatgggacccgtgtcccgtgagtcagtcgaatactacaaaaccagtctgcaggccgatattgctcttgaaaaaggggaatggacgcagcgtgaatatgattag

SEQ ID NO: 400539 - DNA, 552 bp, Salmonella enterica
atggcaagtcgcggaattaacaaagttattctcgttggccatctcggtcaggaccccgaagtgcgttatatccccaatagcagcacagctgttacagggttcagtattgcaacatcggagtcatggcgtgataaacaaagcggtgatatgaaggaaaagactgagtggcaccgcgttgtgttgtttggcaaactcgccgaaatagccggtgaatatctgaaaaaaggatcacaggtatacattgagggccaattgcggacccgcaaatggaccgatgatggcggtgttgaacgctggacaactgaagttgtggttggtgtgaatggtacgatgcagatgctgggtagtcgtaatgcccctgctggtaccggtaatgctcagcagcccgggcaagctcaaggtggttggggtcagcctcagcagcctcagcctcagcagtcagctgcgccacacattcctgctaatgaacctccaatggattttgatgatgacataccgtttctggggcatggttatgggatctgccgaaaagcgatctacgccatttcctga

SEQ ID NO: 400540 - DNA, 243 bp, Salmonella enterica; identical to SEQ ID NO: 134451

SEQ ID NO: 400541 - DNA, 249 bp, Salmonella enterica; identical to SEQ ID NO: 78759

SEQ ID NO: 400542 - DNA, 1350 bp, Salmonella enterica
atggtaaaaataaacctgcagacacgttatcggcttggggccatcacgctatgtctgcttgccgctggctgcacagactttagttctcgctctgaacctatgagcaggcttcagggctctccccgtgttcaggacctttatcaaaaccgttcccctgaagttgttcgatacgatcgttacacacttgcgagtacgcgacctgtagatgctcagcgtgacccactgaatcagattatcgatatcaagatgcctttgcagatggtgaataccattggggaaggtatgcgatacgtgatgcttgaatcaggttattcactgtgttcaggcgaaccgggtgtattctctgaattgttcgttaaaccattaccggctgtgcagcgttcattaggacctgtgaagcttggagatgctttacaaatcctggccgggcctgcctggcgtatgcgcgtagatgacctaaatcgagaaatttgtttcgttcagcgtgatgaatatcgacatcttgccctctcaacaacaggtcccttgcaggcgagtgtagcaagtcagggaacagggaaatctgcttctacaggcacactacttaacagttctaagggactttctggtactggaaataatagctatccgttgcctccggctcggccagaaagttccattttgtcaccagggacaccaaaagttacctctcaagctgtttctcctttatctgttgcaacgacagcaaaaacacctcgtaacccgttctctgccagcgagcctggggaaaaatctacggttccggtgcagaaaacacaggcaggtcccgcagctaagttaacatctggcaaagtaaaaccatcaacagagttggctcctgcgcctgcgccgtcagcattgtcagttgcgtcagcacctctgaataaagctgctcttggtgttcctttaacttcatctggtgcagtgaaaccaggtggaacggttcagaacagtaatccaccttcaacggtcatctctcgtactgctccggtcagcggaaaaactgttttcactccgggagcattgctttcctcgttaccagacggacaggcctggaccgcgcaggcaggcactacgttaaaagagactctgatccaatgggctacatcggttcgctgtgagagtggcagtagtcctacctgggtagttatctggccaacgcctgtgaactaccgcatcgatgtaccatttacgctgcgcggtaatttcgagtcgattatcgtgcagctgtttaggttatatcgccctgcagaaaaacccctctatgcagcaccaaatcgtcttcagtgcctggtattcgtggacgataagccgattcaggacgggaaatga

SEQ ID NO: 400543 - DNA, 444 bp, Salmonella enterica
atgggatatgcgctgccagttttcgcgctttgtcttgtcatcatcttgatagccggtgatgcacagcaccactcatcagagcatgtacgccttgcgctgcagcagactcagcctgaacagcttgcagcagacatgcttcggactgctgatgtcgtaaataactggcgtcacgggcggtccataacagatggccccgtatcaaccgcactgactggaatggtgccgttaccagacagtcgcatcaaaagcattattcaaaacggtcgcctgtggatctgggtacctgaaacagacggtgtttatgccgcattgcgcgcccgatcagtgtcttctgcgcttgccctgaccgtcagcggcggtcgtctgcggatggcggatggcactgatatgaacttgtctctgccgtccggtgtgacggaaggcagcattgtttatcttaactaa

SEQ ID NO: 400544 - DNA, 1674 bp, Salmonella enterica
atgccgcgtatacctttctgcctgacagtacttaccactgcgtttgtgctgtcatcatgttcgctgaatgaaatcagcaaaatagacaaggaatccgttgggcaggccgatacggctcagcgagtgttgcagagtcgtcagtccatatcacaaccaactgttgtctggatggataagccctgggtaaacctgcagccagtcacgccggtggtctccactccggacgaaaagaatctgcctccctgtcagataacgattaatcgtcctgacggcatttcactgcctgagctgggacagcgcatcactgcgctatgtggtatacgagtctccatcacaccagatgcatttgctgcgctgagcaacgtgagtaccggcagcgtggtaacttctcagatgagtggtcaactgccggcgccggatgacaatggtcgggttcccctggcacagatgggggctacgtcagctcagcccgtctccgttcagccatcaccggcgctcatgcgtggccttaaattccagggagatgttcgtgatctgctcgatgtcgaagccagcgggtacgggctgtcatggcgcagtgacggaaacggagtttatttttatcgacaggatacccgcacttttcagctcgttatcctgaatacgaaagtaaacagtagcgcatcaattaactccggctctggcaatcagctgggcagcggtggcggcacatcgggggggacgagcggagacattagctctaatcagaagaccgattatggcatgaacagcgacctgtacgacgacattcgtaaaaccatcgagcagatgctgacgccaaaatctggtcgtttctggctttcagcagctactggcacgttgagtgttactgacacaccggacgttctggagcgtattggtcgttacattgagtatcagaataaggttctaagcaggcaggtccagctcaacatacaaattgtcagcgtcaaccagacgcgtaatgagcaactgggtcttgactgggggctcgtatacaaatccctgcacaattttggcgctactctgaccggttcaatggccaatgcttcgacttcagcaggcagtgccggcatttcgattctcgacacggcaacaggcaatgccgccaaattttccggctccagcctgctgattaaagcgctttccgagcagggcaacgtcagcatggcgctgaaccagaccgatccaacagcaaatctgacgccggtagcttatcagctctcaaaccaacagggcgttctgacaagttccagttcaactgcaacagctaacgtcggggttacttcctcacagaccgtaaccacaatcaccactggtttgttcatgaccatgctgccgttcatccaggaaaacggtgacgtgcaactgcagttcgcttttagctataccagtccaccgcagatagagaaatttatcagtagggacgggaatacccgtaacgatataccgaatacctcgacacaggggctggcacgtaaagttaacctgcgctcaggccagacactggtattaaccggatctgagcaacagaacctttctgcaaacaagcagggaacattcacacccgacaactttatcctgggcggcggccagaacggtacgcgcggtcgtaacacgctcgtgattatgatcacccctgttctgctgaggtaa

SEQ ID NO: 400545 - DNA, 1281 bp, Salmonella enterica
atgtcatcaaagaaaaaatcttcactccgtagcggcattcgcatcacccaccaccgtcgcgactggatggcaggacttcattgggagcagcagcggagcgcactgttaacgcgattccggggaaaagcctcacctgacacgcatgtagtagttgccggcaggcgtaacgcatcaatgatgggggtcgtttcccccgggcgtgtgcgacggagcccttactctcttgcagtagcattcctgctgtctgaagggggaaatacatgggggatataccgcctcagccgcaacgaagatctctgggttttctttgcagccagcggtgggcagctttctgtcatgggtgatgtgaccggttcacgcgcgaagatagaatcagcagcagaaaacttcctgcgttttaacgatgctgatacaccgggtctgcgctgtgctgcaaccgcagatgataattgtgatgcaacctcgctcactgacagactgaaccgttcgcaactgaagcgttgccgcctgggtaagcgcctgacaacgatgtcgctcattatgcctgctgcgcttattacactcgtggcagcagcaggaatttactggtacgacgacgttcagcaaaaagcggaacaggctgctgcaatggcagagtttcgcgcccgaatggcgatgtctgctgataagccagctgcgccagcccgagcgccgcatccgtgggcctctcagccaccagtttcgcttttacttggtaattgctggctgacacgcgaaccacttttcgcctcggtggctggctggcgctttacggacggtgaatgtgtccctgaaggcctgcgcttgcgttacctcgccacacctggtgctacggtggaggatttctcccaccgcgcgagggtgcttcttgggcattctgctgttttcaaccttcaggagggaggtaaaaacggcgacgtattcattcccttccgggaatacagcgtaagtgagtataccgacgaggccttgcctggcgcggatgcccaactgatgcgtttcatttcgcacctgcagcgccgcaacctggaagtcaagttcagtgaagtgaaaccgccagcggtcgcgccagggcaagagaaaaccatgcccgtacaggactggcgcgaattcacttttactgtcagctcgcgtttgcagcctgaacgtctgctgcaggattttgatgcgaccgggctccgcctgaacagcgtgtcaatcaccatgagcccgcaggggcagttcgactacaccatgaaggggagcatttatgcgcagaattaa

SEQ ID NO: 400546 - DNA, 498 bp, Salmonella enterica
atgcgcagaattaatcccgcgggaacgggcctgctgctgtccgctctgttctgcgggcaggcagtggcaaccgtaaccagtgatgcgcttccgccgaacgttacgcttggcgaacttgaagcagctcaggcgcgcaacctcattctggagcagaaagtgcagacggcgcgtctggagcagcaactgcgtgaaagccagtccggacagagtactgacaggaattatctgtctactgccgcccagcctgccatgccgcttatggcgcagccagctccttcacaacagactgccagtgcagtcggtgaaaagcggaccggtggtgtgcgccttcaggagatttacggccgtggctcgcagttgcgtgcacgcattgttctgccggatggcggagtcacagaagtagcaaaaggcgatcagcttcccggaacctcaaagcgggtcacggaggttacgtccacgatcgtacgcctcagcgacaattctgaactttcattctga

SEQ ID NO: 400547 - DNA, 1575 bp, Salmonella enterica
atgtctcctgataaagaaatcatggattttgtctttgccgagcagcatccgtctggaggggttacgctactcatcgacggcaaccggcgaaaagaccctggcatacagcgctgggttatggatgtcacccggacatggggtgatgcaaaaactgagtttgttacactcagcgaactgaaccggcggcgtgaagtggcagaacgtcagggccgtgggcttaaccagggtgtgagcgaggcggatctaagtaaccgtgacgtcagtgtgtcgcaggataaggtcatcagctatatgaggctgggtaacgactttaatgcctctgatattcatatggaaataagcggtgatcgcaagatttgcatcgttcagttgcgtattcacggcgagctggaggtggtggatgaagtgaaagatgtggagggtatgacgctggcctccacatcttatctttccatgtgcgacgtgcgcgagcagtcattctttgccggtcgtgagcagtcagggcgcatcgatgcaaagttcgcccgccgcgccggcctctatggcgcccgctacgaacaccgtcctactccggatgggctgatagtggtcatgcgtttgatcccggatgacggggacaatataccgacgctgccgcaactgggttttttgcctgagcagattaagctcatcatgcagatcctgcgtatgccggaaggcatgacgctgctgaccgggcctactggttcagggaagagcgctacgctgcgcgtgttcagtgatatctggctgaaactgaccggcggtaaaaagcgcctgctcacgctggaaaacccgcccgaggggcgtattccgggtggtattcagacccccgttatgccggaagacaattcaccggaggccatcagccgcgcctggagtaacggaaacgcctctgcacttcgtctcgatccggatgccatcctgaacggtgagatccgtgacctgtattcccttctcgccgccattttcgccagtgaaaccggccacctggtgctgtcgaccctgcacacccagagccctatcggctccctgcgtcgtatggagcatttcggtattgatcgccaccttctggcggatgctgcactcatcactggcctgattggccagcgtctggtgccgctgttgtgtgaacactgccgggtaccgtgggaagtcaaagtccctgagcttgatgaagaaacccgcgcgcgtctcgaaaaatattgttctgtcgcgggcttgtgcgaaccgaaaaatctcttcttccgcaactatgagggatgtgaacactgccggaaaacggtaccactgaccggacgcattatcagccgtggcgttacagggcgaacagctattgccgaagttgtccggacagatgctcgcctgatgcaactttggctttcacatgggccttcagttgccagaaagtactgggtaaaccagggtgggattactcgccgcatgcatctgttgcgttatctggcagagggtcttgttgatccgctggaaggcgatctcatctgtccgctggatgaagatgacatcatggattgtgaggtgcctgatggaaagtga

SEQ ID NO: 400548 - DNA, 1116 bp, Salmonella enterica
atggaaagtgacagccatttttatccatcccgggaaatgtcgttccctgaaaggattcgctaccggcttgtcagagccacttttacagggaaataccgccagccattttacgaaacgctgcgctttcttcttgaaaaccgtaaggccctgaaagacgcgctgaccatgatcggcgatgtacatactgattttggcaggcgctggcatccttattatgaacttgttcaggactgcatcgagggtgtgaacgacaaccgtcctggccgcgcgctgcaggatgttctggctgcctgggcaccttatgaagaagccgcgcttatcagcgccgggatggaaaccggtaatattcctgccgcgctgatgcaggctgataagttgattgttgcccgtcggcgaattcttgggcaggtaatttttgcctcagtatttcctgccgcgcttgccatactgagtacggggctactactggccaacaatctcgcacttgttcccaccatgagcaaaatgtccgatccagctcgctggaccggtgcactcgggtttatgaatggagtagcgaagtggagttccgagtggggtgttgcttctgccgctacagccgcagggcttgtgctgctgtctttctggtcgctgccccgctggcgcggccgtctcaggcgctgtgctgactggttactaccatggtctgtttataaagacctgcagggagctgtattccttatgaatattggcgcgcttcttggttcgggtgtccaggaactcaaagctttgcagatccttaacggttttgcaccgccctggctgcaggaacgcatcgaggcagcgatggagtgcatgagtgaaggcgattcacttggcagagctctgcgtaacagcggatatgattttccgagccgtgaggctgtgaactatctctctcttctggataagggggatggtgctgcttcgctcatcaccaattatgcggaccgctggcgggaacaggcgctcgcacgcgtcgcgcgtcgggcgaatgccaccaaactcttttctctcgttctgattatgagtttcttcttactcatcctgatgatggtgatgcagattcaggacatgaacactttcaacttacactaa

SEQ ID NO: 400549 - DNA, 597 bp, Salmonella enterica
atgtcagctcagacattaccacatcgccaacatcagcctgaccggggctggggcattcttgaacacggaaccattgcgatcgggacgattatcgtactggctatagttggtgctctggtctggagtctttgggggaaaaagtccgttgccgttgaggtttcaaatctccagaccgtcgtgacaaacgcgcagcagcttaagcaggcgcaggggggatataactttacgagcggtacaactatgacgggaacgcttatccagcaggggggcgcaccaaaggctggctggactatccagggaacagccagttccggtaccgctacgatgtggaacggttatggtggtcaggtcgttctggctcctgtggcatcgaatggatttaacaatggattttcagttacaacgcagaaagttccgcaagcagactgcatctctatcactacacagctcggttccggtggagcattcagtgctatcaccattaacagtactgattacagtgacggtctggtcagtgcagaagaggcaggcaaaacctgctcatcagacagcggaatgacaggtaacaatacactggtcttcacccataacggctga

SEQ ID NO: 400550 - DNA, 480 bp, Salmonella enterica
atgctgcgcctgtccgcttttctgctgctggttttggtttgcccacgggtggatgcattctgctttgaatcggcgggcgctaaataccacattgacccgctactggttaaggcaatagccataggtgaaagcagcctgcgaccggatgtcacaaatattaatcgtgacaaaaagaccgggcaggcactcagtaccgattatggactgatgcaggttaattcatcgcatatcgcttcgctgatagcgcagggttacattcgcagctcacaggacctcctgaaccgtccgtgcctcaacgttcagataggtacctggatactggcgaagcattttcaggtatgcggcataagctggaactgtcttggctcttataacgcaggttttcgtaaggaccggcatgaaactcgcgagtcctatgccaaccggatttatgccatttatcgtcggcttttacttaatgaacggggaataaaactgtga

SEQ ID NO: 400551 - DNA, 669 bp, Salmonella enterica
gtgacactgctgacgctgagtatgccctggccaactgtcattatcatttttcctctatgcctcagcttattcagttttatgaggagcctggttcgtctcagcctgatgatattggatgatgatcaggaatggtttgctgtttttttcgcccctgcatccaccggcttcatctggctttacgctacagcggcaactggcatgatgctgtcccctgtgccgctactggagcgactgatgtctctgttgttctgcctctttcttttcaggttgacgcttaccgatgcgttcacaggatttctgcctcgagaattgacgataaggtgtcttattgccggtcttgtttccgctcttatcgctcccggctttatagggcacttcctcacagctaccactgcgctggtgatttttggcgtctggcgttatgtcacctttaggattcatgcccgtgagtgtctggggcttggcgatgtctggttggccggtgctattgcggcctggttgggagggcgagaggggctttatgctctgctgatcggcgtggtgctctttgtgctctggcagatatctgttcgtcgcataactgaaggagggccgatgggaccctggctgtgcgccggcgcgatttctgtgaccctgtttaaattgtatcaaccgcttattacatggtga

SEQ ID NO: 400552 - DNA, 1362 bp, Salmonella enterica
atgcctgtgttcacatataaaacgactgaccggggctgggctatcctcagcactggtgcttcattgattattctcctggtggtcagcgtctggggctttacccttatcagtgactggatgcaaaaacggacctggctgaataccgcgtcacaggtatctcgctttacacaagctgtgaagagctacactggccgttattacgatactttgctttcaagtgccaccaccacgaccccggttacggttactcccactatgctgaaaaacactggatttctggagcaggggttcagcgagacgaccgtagacggacaggcttacctggcagctgttgttcgtaatgccaccaatacagatcaactgcaggcactggtttacacacaaaacggtgcggcactgccttttctcgcactgcgccagatatcaatggatatcacctcgggtatgggcggctatatctggacgtcgggaactgctaccggcgccatgggcagctggactctacctctttctcagtttgggataagcacaactcaggggcatattgcggctttactgaccacagatgaactgggcgctgctcgcggtgaaaatgatcgtctttatcgtttttcggtaaccggcaagccagacctcaacacgatgcataccagcattgatatgggaggtaacaatcttaataacacaggcacgattaatgccgtaacgggtaatttcagtggcaatgtggcggccaccggaaatataactgcgaatggaactgttacaggacagaatgttactgccggttcaaacgtcaccgcaggaaatacaataacggctaacaacgacatacgttcaaataatggctggtttataactcgagggagtaagggatggttaaatgaaacgtatggcggcggtttttatatgtcagataatgactgggtacgagtcataaataataagaatatttatacaagcggtcaggttcgaggcggaagtgtgcgggctgatggaagactttctacaggagaagttttgcagctcgaaggagtcaatactgctggcgcagtttgttcaccaaacggccttgtaagccgtgacgccactggagccatactttcctgtcaatccggtgtgtggaaacaaggtggtatcacatggcgagtaggcgcaacctttcaggtatggcccgggcaatcggcaaatcttggaagatacaaactttgcattaatacataccgaatcgacggtaaagaaatggcactcacacagctaattccaacagatgaacctgattcaaatggaaacatgaattggtacgcttacaatgcaacgcaatacgcatcttattacatgggaatccactgcttcatttga

SEQ ID NO: 400553 - DNA, 1122 bp, Salmonella enterica
atgcaactcagacggcgaattaagaaaatggagctgggagtggctcttgataaatattacggttgtgcatctgtgcaaaagcggggtcatcttcaggagttttatcggataaatgttataaaacgttcagctcttgccaggcgatacatgcatgagattacttcggttgatatcgcagaatatcgtgatcagcgactttctgaggtaagtggtaaaacggggcgaactaatagccccgcaagtgtccgacttgaacttgcgttgctatctgccctttataaccttgctcgaattgaatggggaacatgtactcataaccctgttgagcatgtacgaaaaccaccggcctccaaagggcgaacccgaagattgacatctcaggaggagcgaaagattggcagggcgctggcaaaacgaaatatcgagttggcagccatttttcatttggcccttgaaacggctatgcgtcagggggagatcctctcacttcgctgggagaatatcgacctgcacattggcatcgctcatttgcctctcactaaaaatgggagcgtacgggatgttccgttgtcgtttaaagccagaaaggtattaagagagtattccggccctctatccggacctgttttcagttatacatccaatgggtttaaaagcgcctggcgagaagttatacaggctttaggcattgtcgatttgcattttcatgatctacgacacgaagctataagccgtctctttgagctcggaacactgaatgttatggaaattgcagcgatatcaggacacaagagcctgacgatgctaaaacgctatacccaccttcgtgcgacgcagctggttagtaaacttgatatacgtaaacgacaggcgcagaaactggcggcgatctttgttccgtatcctgctgaacttgagagcagcaataacggtattgttttacgcttccctgatcttgaacatccttcacttgaagcgcaaacaaaggaagacgttatccagaaagcctcttttgagcttctcagaattcaggctcttgctgctcgttctggagaacgactccctccaccaggcaatatcaaagctaatgacccaactcgtgtgcttattaatccgctctga

SEQ ID NO: 400554 - DNA, 867 bp, Salmonella enterica
atgtcagtcagtcaagtcgtcccggaagaagttatacctgaaaatccagaggttacttcttcgaaagttgtgcctgctgagccagaggctcgccggttggttcccattaacctgaaaaaaatagtccggattggaggtctgggattcctcattgtttctcttgttggttctgtggccacgattgtgatcatggcacagcaaatctctgatctgagtattcgggtgaactccctggatgccgcttttcgcagcggtcagatgagccagttgtctggttcggttacttcgctcgaagctcaaagccggaaacacgagaagcagctcgagtctgtctcatcagggcttgaatcagtacaaaaccagttagctgatttccagggggaacattcaaaattaacaggaagcattaacaaactttcctcagaagctcaggcgcggcgtaccgcgatagacgaatattctgaacgtattgatgacattacctcacggttatcacaggttgaagggcgagttgccgggctgagcaaagctgaaagcaacacttctcagaaagaatcgaagcagaaccagcaaccagtcactaagagcaaaacatcttcaaaatccgggacaggccagatcgtaaaaaagcctgagcggtcagtcaggcgcgcagctgttgaagcaccgtttgtactgaccggcattgagcggcgcggcgggcagatgttcgccgtcgtcatcccccgcggaaattcccaaatatcagatatgcggttgctttcaccgggagatgggatgctggggtggacgtttcgttctatccaggacagtggtactgctgttttcagcgtgaacggtgcccaacagagtttacaggttcaataa

SEQ ID NO: 400555 - DNA, 726 bp, Salmonella enterica
atgaagcatcagatgagaagaattttgatggcaggtgtactttccttgccgctgtgtgtggcggcatcaacagttaccactcaatcgaatcagagtcagcaagcatccctgcaggcatcatcagcaaaccaggttcagacgcagcaacaggggcaacaatgggggctttcagatgaggagtggagtcgctatcagtcgttgatgaaaggagccagaggcattatgtcccctggtcttgatcctctcactgccctgggcgtcgagacagataattcatctgagcgccgtcggctggctgaattgtgggtaaaacacgaatacgcccgtaccgagaaagaactcgcatttcaacgagaaataaacactgcctggcttcgtctttatcctgaaacattggccgtgaatatggggaatgccgcgggtatcgctcatgacacacaaggaagactggcgttatttgtcaaagagtcatgttcacgctgtgatgcccggcttgctgctgttatcgccgacaacagaccggtagatatttaccttgtcggaaatgacgtgagcgacgaaaaaatcagatcatgggcaataagccatggcataccagtcgaaaaagtgcgtaatcggcaaattaccctaaatcatgatcgcggtttgtggcagcgctatgggcaaggtcagatgccagttattttgcagcagggagaagagggatggcaaattgccgcattctga

SEQ ID NO: 400556 - DNA, 624 bp, Salmonella enterica
atggcaaattgccgcattctgaaactggcttgctgtttatggtttgtcagcactggttgcctggcggtcgtgaatgtaaatagcagtgttcaggtagttccgcaggcttatcggatcattgctgctgccgagcgcgttccggcagaatcgctttactcgctggcgatggccgaaagcacccgtaaaaccgcatgggggtctaaaccatggccctggactattaatgtagcagggaaaggataccactttgaaacccgcgaggaggcctttgcggcacttcttggatttatgcagcgctaccctctcaagcgtatcgatgtcggtgtagcccaggtcaatcttgggtggaacgggcatcttttcccatcctttcgtgatgcttttgatccctacacaaatcttcgtgcagcggcccgaattctccgtgcctgctatgacgctcagcctggaagctggattaaagctgctggctgttatcaccacccggccggtggtaagccggcagcaaaatatatggctatcgtacgccgtaagctaagtcagatcgcacctgatattaaggtccctgaaggggagccggttgctctggccagtcactcattaacctgggttgaacctcaatga

SEQ ID NO: 400557 - DNA, 531 bp, Salmonella enterica
atgaaaaaaaatatcgataaatatttcaatggcatcttttgtgtatcactgcttacagcagcgtttagttgttttgcttcgctgacagtggtcggggatctgggcggggagtcaaccagaccatttttcgaggcgattaattcaggtgaagagtcgcatttgtccgatgtttcctccttgcctgaaccaccgtcatcgctgtctatttccgatatgttgcccgttaatacaccggaaatgacacccggaaaggtgacgtctcgccctctgcagttacccggtttgccccctgtttttgtgattggcgatgatgatatttcccgagcctggctgcggcagcgtggtgctgaactgaaagggatgggcgccacaggaatggtagtgaatgttacgactgaaagtgcgctcaatacgcttagaggactcttgccaggtactgagatggtccctgttcgcggcggtgatttggcacagcgattgaatctgacgcattaccctgtcctgattaccgctgatggattagcgcaatga

SEQ ID NO: 400558 - DNA, 558 bp, Salmonella enterica
atgaccacagtggttttcatattattggctttcatttcactcacagctttttggctgcggtgtaatacaagaagtgcccgtgtccgcagacatcagcgtaatcgacagacggctaacagggtgttgctaaaactgcctgagctgaaagcggggcagcaggttttatatttacggaagattaatccctatgttttcgaggagatgattctgaccgccatagagcggcgaggaataccggtcaggcgtaatccgagttacagcggtgatggtggtattgatggtcagttctggattggtcaggaaaggtggcttgtccaggctaaacgatttgccagtgctgttcgtcctgaacatgtccgccagtttggtgagttagtccgacaagaaaaatgcagaggtctgtttgtacacacaggacgaacaggttttatcagttttaagtatttcagtgattacccggaaattttgctcataagcgggtcttcccttttgctactgctgtctggtgaatccgttgaacatgttctccggccattaaaaaagaggcaatacagatga

SEQ ID NO: 400559 - DNA, 228 bp, Salmonella enterica
atgaatttttccacatcaacattaccgtttattggttcggtgtggcttttggtttctttccggattttcatattccggtctgtaatgatttctttgctgatgtttgggttatttcttttcttttatttatttctagccgtattccgcaaggccacagattctgctcatttattcctcaaactcaatgataaaacttttgctctgttccaggggagggcttttatatga

SEQ ID NO: 400560 - DNA, 2112 bp, Salmonella enterica
atgagcgacaagtacgtgatggaatccctccttcgcccggcggttgaactgtattctgctgcggcggcgggtagcgcaacctttatttgccttacggccccttgggctgtcgcgctcgcaccatcggtcagttgggtgaccgccgcggggtttggtgtactggcgctgaagcgtacatctgaggggatgaaaatactccgttaccgccaaaacattcgccgtttgccccgatatgtactgaccagcgagcagatccccgtcagccagcggcacttgttccttggcaagggcttccagtggtctccccgccatacgcagcgtattctggaagcgaggcgtccggagtgtgaggtctacgtacaaccttctgttatttatcgcctggcacgcgatctggaaaaaaagatggagtacagcttgccgtggttgtgcaggctgacacgaactgattcggcgctcaacccgtttcgcccgttgcctcctgtaggaggaagccccatttaccatggtgtggaactggatgaaactacggtcacctatgatctcggagaacgtgtagggcatacactggttatcggcaccacacgagtcggtaaaacccggcttgctgagttacttatcacacaggatattcgccgtaaaaacgctgcaggcgagcatgaagttgtcatcgcgtttgacccgaaaggagatgccgatctgttgaggcgaatgtatgccgaggcacaccgtgctggtcgtcaggataacttctgggtgttccacctcggatggccagatataagcgctcgctacaatgccgttggacggttcagccgtatctcggaagtagcatcacgtgttgcaggacagctctccggagagggcaattctgctgcatttcgggaatttgcctggcgatttgtcaatattattacccgtgcgctggtcgcacttggccagcgtcctgattacggtctcatactgcgttacgtgacaaacataggtgaactgtacgaaacctatgttgagaatatgctgagtgaaaaggcaccacagttgctgagtacagtcgaagcgctgttaggtagcggtataagcgagaaggatctgccgcgtcacatgcagggcaggcctaatggcatgaatatctgggctattgagcaggtactggccagcgaagaaggaaaaaaactgtgggacccggtgctggatgggctacgtagcgctgtgcaatatgatcgaacgtatttcgacaaaattgttgcgtcactgctgccgctgcttgaaaagcttacaactggtaaaacggccgcattgctggcacctgactatacggacctgaacgatccgagaccaatcctggactggcataacattataaaatcgcgcggcgtggtttatatcggcctcgatgcactatccgaccctgttgtcgcagcagcagtcggcaacagcatgttcgctgatctcgtttccgaaggtggacacatctataaattcggtctcggtgatgaggatggcagaaaaagttcgaaagtggcgataaatcttcactgtgacgagtttaacgagttaatgggtgatgagtttattcctctcatcaacaaaggggggggggcgggcttccaggtgactgcatatacgcagactctttcggacatcgaggctcgtataggcagcagtgctaaagcgaatcaggtagtggggaacttcaactcattgataatgctccgtgtgcgtgaaaaaaacactgccatgctcctgaccgaccaattaccggaagttgacgtctaccagaaaacccttacatcgggtgtcactgacgtatcccggccgggagagggtactgattttaacagtaatgttcaggaccaggtcagtctggttaaagtcccgatgctcaacccttcagacgttatcaacctgccgaaagggcaggcatttgccctgcttgaaggagggcgcctgtggaaaatcaggatgccgttgccggctgataacgacgatccttacatgcccgcgagcctgaagcagctggctgacaacatggagcagaattaccgaactggagaatcctggtggacaggcggtgatgcggcatattcgggggggcaaaatgtctcagcatga

SEQ ID NO: 400561 - DNA, 690 bp, Salmonella enterica; identical to SEQ ID NO: 134392

SEQ ID NO: 400562 - DNA, 318 bp, Salmonella enterica; identical to SEQ ID NO: 78781

SEQ ID NO: 400563 - DNA, 246 bp, Salmonella enterica; identical to SEQ ID NO: 78782

SEQ ID NO: 400564 - DNA, 366 bp, Salmonella enterica; identical to SEQ ID NO: 78783

SEQ ID NO: 400565 - DNA, 381 bp, Salmonella enterica
atggccgtcattgatttcctccctgacagactgaacaacccccccgtggtctggaaagggttcacatccggggagtttgtgctggcggccgtcatcggtgttattgccggtatccctctggcaataccgttagctctggttccttttgtcggatggctggcttttccgacgtgcatgctgctgatgccgctgttggtcattttttttggcggcaactggattgccagctacaagcgcggtaagccagaaaattatatctggcaacgtctggaggaattgcgctgccgtgcacgtatgtcccgaaccatgattctggatagcagggcgtgggaacttaaacgaacgaaacctgttccgttgatgcgcggagggaaagtatga

SEQ ID NO: 400566 - DNA, 660 bp, Salmonella enterica
atgagtcgttttcgtaacggtataaccgcccgcgataatcatattatttcgctacgtatcgcttgtgttttgctggctctgggactgttcgtcaccagtctgggatggatgcgagcgccctcggaactgacaattcacaacccacccgacctgcgttccggcagcacccgaaaatggtgggaggtcccgccatctacggtttacagttttgctttttacatttttcagcaactgaattcctggccgaaaaatggggaagctgactacacagccaaaattgcccaaatgagcccgtatttgacgccgtcctgtcaggattttctcaataaggacgccgagatgcgcaagaataatgacgagctgcgcgatcgtgtacgcgtggtatacgaaatcccccgtcgtggttacagcaaccgcagtgtgaccatcattgatgaagatcattgggtggtacggctggacctggtagctgacgaatatttccataccgaacccgttaagcgtgccctggcgcgttatccaatgaaagtggttcgctgggaaggcgacccagagcgaaatccgtttggactggcactggactgctatgacagcgcgccacaaagacttgaggcgatctccttgcctgagccagaacaaaagtcgggagcattcaattga

SEQ ID NO: 400567 - DNA, 900 bp, Salmonella enterica
ttgaaaaaattctcagtgatcctgctgaccctggtactggtctcagccggagctcgtgctgttgagcttatgaaatgggaacggataccgttgcagattcccctgactgtagggcaagagcgaatcgtttttgtaaacaaaaacgtgcgagtggggtttccgcccgcactcaacgacaagctgcgtattcaaagctccggaggtgtagtttatctcgatgcgaaagaagcctttccggtgacgagactggagcttcagaacaaggaaaacggggaaatacttctacttgatgtttctgctgcccccggtaaatccacgcgggaacctgtcaaaattgtctacgacggagaagtggctaccgcttcggcgaccgataaacagacggtcagcagtgatggggacagtgccggccgtcagtcgtcggcagaggcaaaggcagaaagccggagacccgcaaaactcaatgcgccgctacccgttgtcctgactcgttatgctgcgcagaacatgtatggaccgttgcgaacggtagagcccgtaccgggagtaagtccggtttcactgaagcttcccccccggatcaccacacttatgccctctgagtccgtcagcgtcacgccgatggctgcctggagtctgcagggcagcagtgtaattgcgctgcaggtgcgtaaccgggcagcagtaaaggtcatcctcgatcctcgttcgctgcaaggtcagtttactactgcgactttccagcaccgttggctggggcgtgccggtacaccggaagacacgacagttctatatctggttactgcaggacgtcccgaaagtgcctttattgctgaacagcgtttacccgaatctgaaggaaaggagagtaagcggagtaaccggggagcacataaatga

SEQ ID NO: 400568 - DNA, 1527 bp, Salmonella enterica
atgaaaaagcctgcttcaaacctgcttgtgaaaattgcggttcccgtcgtagtggtgggcgccatcatgattggggttaaatcctgtacagataaaaacgataaaaatgaagcaggccagaaaacctctaatgtcgcccttaaggatctgacaccagaagatctcaaagcgttgggtgtggaaggtgacaccgcgcaggatactttgcgtaccctggttggtagttaccgtaaggttcaggggcggcttgacagccttgaaagcgataataaaacacttgctgatgaaaataaggagctgaaaaaaaacaataccaatgttgatcagcaaatcagccaggctgtggggcaagttcgttccgaagaggcccaaaaacgtgcacaactgagttctcaggttactgatctgagctcgcaggtgaaccaacttcttgatcaactcaaaaatgggtcctccggcttaacggcaggaaataaaggtaacgctgcaggcagcgatattcctgtgggactgggttatgacaatggtctgaccggaggcgcgggaaatatatctcaaacagatggaaacgggttgcaatgggttgagccgaaagatggtattgccacggatgcgaacggtcgaccggtctcagataaaaacagtaataacgcgactggtttttcttttgccacctcctttggcgctgcaggtgatgcagccaggcaggctacgtcagcagtaagtacaacggtacagaacaacattcccggatctgaaaaaaatgccgcccctgtttatacccttccggaaaactccacgcttgtgggtagtcgggccatgaccgcgctgttgggacgtattcccattgatggcaaggtgactgacccttacccgttcaaagtgatgatcggaaaagacaacctgacggcaaatggcattgaattgcctgatgtacagggggcgatcgtttcgggaaccgctacgggggactggacgctttcctgcgtgcgtggcgccataaccagcatcacttttgtttttactgatggcactgttcgtacgcttccttcacctgaggggcaaggcagtaatggtggtaatcagaacagccagggtgggaataacagcagtattggctggttgtcagatgacaacggcattccatgcatttcgggtacccgaaaatcaaacgcttctacttatctgccaaccattgccgcacttgcagctgccagcgcagctggtgatgccgtggccgaaaaccagaataccagccagaccaatggctatggtggtgtgacgtcaacgctgacgggggatgccggtcaggctgtgttgggtaaggcgttatcaggcggtatgcgtgagaccgttgactgggttaaagcgcgatatggtcagacgtttgacgcgatctatgtaccgcctggacagaaagtggctttacatatcactcgtcagctggcgattgattatgaagaaaaaggccgcaaggtgaaatatgacgatttcagcctcgctggtagcagcacgggcatggattga

SEQ ID NO: 400569 - DNA, 276 bp, Salmonella enterica
atggggataaagatgcagaacaataaaaacctcgaatatcgggtggactatacaccactgggtggccgtctctttgccggttttgtcaggcgtgataatggcaaatgggaaggtaacaggcatgaagtcaccgaacaggccctgctcgctgtcggaaagaagcttctgagcgagggtaatggaatgcagatgcagctgcctgatgggcgagtgattcgtctgtcagctgtcatcagtgattcggatgaagcggaggtgcatgttgctcagttttaa

SEQ ID NO: 400570 - DNA, 417 bp, Salmonella enterica
atgttgctcagttttaatcatctggccaccattatgttggtcgttgtaccgcttgccctctcgggttgcagtacgtcaaaagaggaaatgttgccgcctggcgacagcaccatgcttgaattatggaacgatggtgcatcggcaactcatgctaccaacgagagcagaacaacacttcgccggccagttacagacagcgaacgtgagatcaatcagcaggtcagtaacagctacagccgcacccaggaaaatgaaattcagcagacgtttccgcgtctgccaaatcctgacatggtcatgtatgttttcccgcatctggctggcgggaacacgccggttccaggctacagcaccgtctttcctttctacagccaggtacagtatgcgttgcctggtgagcgaacggaggatctctga

SEQ ID NO: 400571 - DNA, 2817 bp, Salmonella enterica
atggctttccctctatttagccgacgtcgagcgtctcaggatgctcatcagtacggtaacggtccgttttccgtcagtgggtatgaaccgcttacccgggaagggcaactgactcattcagatgaagcgcgtctgtattccactgcaccttccattatcgatcatgttccatggggcgagtatttgccagagcatgaatgcattctgcttgacgatggtgtttcagttggggccgtatatgagattatcccggtgggcactgaagggcgcccggaaacacgtctggacgagatctgcaatatcgctgagaacgccctacaggacagtctccctgaactggatgatcatcaatgggtggtacagtttttctgccaggatgactctgatctctctacttatatggatactatcagaggctatgtcaggccaagagctcagggaaccgcattcactaaagcctggctggctgaacaggagcgccaccttgaaaatgtggcggtggaacaggggctttttgtagacgaggctgtcacaggggccgcctggagagggcaaattcgcagaacgcgcatggtggtttaccgttgggttgagacaccgtatcgtgaccccatgccaccggaggtgctgctgaaacaggtctgcgatcgcctgacagcagctctgagcggtgccggtatccggtgcgaaaagcagaacggcgagcaaatccatagttggctgttgcgctggttcaacccggcgccggcgtgggtcgataagaaaacattgtatcgttgcgcaaaacactccgatcatgcaccgggcgatctgcctcttctgaatgatttcagcgaaagcctctggtttacccgcccgcgaagtgatgccgaaagcggtgtgtggtggtttgatgatgtggcacataaagctgttccggttgcccgcctgcgtactgcaccttccaccggtcatctgacgggggaggtaaaacgtggtgataatgtgaatgccattatggatctgcttccggaagggacagttctggccatgaccctggtggttcagcctcaggacaaacttgaagaaagttttgcgagcctgagccgcaattcaatgggggagaatgttgattccctgcgtgctcgtgaagacgctgctacagcgcgtaatttcctgggaaacaaacacaaactttaccgtgcggccatcacactgcttatcaaggctcaggacaaggaaacactcgataaacggtatcttgatctcagcagtaagttactgaactgtgggatggaaccgataaatccagaacacgatattggccctctcagcagttatatgcgtgcgttacccatgtgctttaaccctcaaatggataaacacaactggtacacgcgccttatgtttgtacagcattttgcatgtctcgcccctatttatggtcgtgacaccggtactggtcacccggggcttacgttctggaatcgtggtggtggccccctgtccgtagatccacttaataaaaatgaccgtacccagaatgcgcacctgctgcttttcgggccgacaggtgccggtaaatctgccactgcgctcgataaactggctcagatggtggcaatctaccgcccccgtatatttttgctggaagcgggtaacagcttcggtctgtttggagattactgtaattcgctggggctctcagtgcaccgtgtcagtatcaagcctggtaaggttatttcacttgctccgtttggcgattcacatctgctcatgcaggcgaaacctgagacgctagtgacaagcgaagaggccctccctgacattgatgaagatgatgaggacaaggacgaagaacgtgacattctgggtgaaatggagattgcagcgcggttgatgatcaccggtggtgaagcagcagaagaggagcgaatgacacgcgccgaccgcggtatgattcgtgaggcgatactcattgcggctcgtaaagcgtttgacgaaaaccgccagatgctaccggaagatttaatgttctcgcttgagaacattgcccgcgatgtcagcatgggagaagacggccgcgagaaacgcacgccagcgcgacgtgcacgagctgaagagatggcagaagcattacgcatgtttaccgaaggttttgaaggggagttgtttaaccgtccgggcgcgcaatggccagaggcagacgtgactattgttgatttaggcacgctggcgcgtgaaggctatgaagctcagatggccgttgctgtcatctcgctgcttaatacgattaacaatatcgcagaaagggaacagttcagcgatcgggatatcattgtgccaatcgacgaagcgcatattgtaactgctaacccgctgttgggcccgtatgcaaccaaaattgtcaaaatgtggcgtaagctcggatcatggctgtggttgttcacacagaacctggaggatttccctgacactgcgaaaaaaatgctcaatatggcggagtggtggatctgcctcgttatgccacctgatgaagttgaacaaatagcgcgatttaagacgctcacagaagagcagaaggcgatgctgttgtccgcgacaaaacttccgagaaaatacacagagggagttattttgtcccgtaaggtacaggcgttgtttcgtgcggtcccccccagtttgtacctggcgatgggaatgactgaaaaagaggaaaaagccgaaagacgggccattatgaatgaattaaattgctcggagcttgaggccgcatttcacgttgcgcgccgcctcgatgagaaacgtggcattggtactattcaggggacaatatga

SEQ ID NO: 400572 - DNA, 408 bp, Salmonella enterica
atgaaaaaactgactatggcgacgccgatcgttgtaccggacaaggcttttattgcctctgttatttttaccgttccgccacagggttctgcctcagtcggtgtggctgacagtgagtcgattaagcatctgcaaggggagatcgttaagagactggagcagcctgtattgctgtcggtctatcctcaccgggttggccggcgcagctgcgttgcagtccacctcagcgacgtgcatgagaaaaccctggatatcctgataactgttaccggcaatacactctggccagcagaacaggagtaccggtcgggtatccgatggaatatctgtgttcccgatgcaaccgatatgctctgggttcttaaggaaatcgacagggtgacctgtgacaccggatgtgacttataa

SEQ ID NO: 400573 - DNA, 408 bp, Salmonella enterica
atgaaaatgccattttgctgcctggcagcactgttcatttccgtcggtgccagtgccggcacagttatatataccgactcctctcatgccgtagcagcaaatcctggtccggatgtctccgttgttgagctcgatgcgcccgaacgagcacaggcggacattttcggtcagttatctgccgatccctttcttgcggaacaacgtgcccgggcagtgatctcttccccgaatttccggcagcagcaacaacaactggctgaagcttatgcgggtgtcactcatgcctggtccctcggtctggaaaaatacccggctgtggtttttgatgacgtgtttgttgtctacggtacgactgatgtcaacgaggcaacccgtcagctcgctgcctggaaggagaagaaccgatga

SEQ ID NO: 400574 - DNA, 972 bp, Salmonella enterica
atgaaatctctctccttccgaccacgtcgactggcgatcgccacattgctggtttgttccggcaccatggccagtgtcaatacagcgaatcttctggccagcgcggcaagtacagactgtatcagctggcgtgtcagtggtatctgctactggttattgtgtactccatttggttgcacggtgaaaacctcggtaaaagtgacgcatttcattccggaggctgtggtatcggcttacctcaatcccggagataacccctggactgaaatggccacagttagtgacgccgccagcggtgctgaaggttccttgctggaaagtgtgacgggcgtgagtacggggggcggtcgtcaggagatgaaagctcccggggaacgtaagcagaacctgcatttctattacggcgacgcctatggccatccagctacgaaagtcattggcggtatggtgccgggctattcatgcgacagcgctgccactcctttcatgccctatttcaacagctcactggatgctctggtctggcgaacgggtgtcccggagaccctttatcccgaagcactcatccccgggcaacgagaaatcggggaaaccacatccggcaatatgtgggggaacgtttatccacgtagcgggtttgtcacccagacagacagttacaaatcagcagcggttgtagttcagcgtgtcgctgacgtcattacccgctccggccagctccacgtctacaacccccttacgggacagaagtccccgggttactggccacccgagccggtaaaagaaaataccggcacgaaaaaccacaaatggcagcgactttcgcctcagttgtcccagacctgtgcagtgtttcccgacaccaatggccagattgcccaggacggtaactatgcctgggcattgtggcaaccgtacagctgctgcaaacgtcgcggccagacgttcctttccagcaccgatttctcataa

SEQ ID NO: 400575 - DNA, 1395 bp, Salmonella enterica
atgaaaaaagcaggacttttactgatttttgcctcgttgccagcaatggcagctgatatctctttgtcttcatcgggggcgtcagtgagcggtaacgctatcagcgatgggctcttttattctattggtggcggttcggttatttcacccccgcctagtcgtaacaatatgtccaggataggcattaatggtggccttagcagtgatctgatgtgtggcaatttcgacatcaaaacaaccgttggcaaccagctgaatggtattaccagcgggtttaaggatctgatggggaatgtgattcagggggcgactggtgctgtcatgagtatgccggcaatggctattcagcgcgcaaaccccgggctgtatgaaatgctcaccaatggcgttctgcaggccggtttgagctttgataaagcgatgttgaactgtcagagcatgtcgaagaagctggctgattataccattggcaataaatggcagcaggtagccgtctctgaagagtacaaagatattgtggccacaagtggtggcgatgcggtttccagcgaccagaaactgcaaaaagcaactggagaggaaggcgtgacgtgggtcggtgggcagaaaaggggaggtaaggggcagcccgcaattcaacccactcgggatctggccaaagctggttataacatgatgaataatttgccagtgaccagtaacagcagcgtcggctcctcgagctgcaatggtaccgcatgccaacgttataaatcttctgaagaggccgcagcggccgttgttaaagtgcttggtgatcgctccatcaggacttgccgggaaaccagtgaatgtaccagtggtggaaccgataaccagccgggcagtgctgtcgctggtactggcttttctcccatccttgaggatgccacgaaagagaatctggagcagcttagtaagctggttagtggtgaactgcagcccaccactgataacctttccgcactgaaaaccggcagtctggttgtcacccgcggggtaattcaggcattacgtgacgatccagacaaagcggccctggttcaacggcttgccggcgaactggcgatgtccgacaccgttgaaaccgcgctaacaatgcgcaggatgctcaccaccggtgaatccgaacctaatgctgcagagcagccggaagctattgccgagggtgatcgccgcatcgatgccctcgatcgcgagctgacggcgctgcgtaatgagatggagttacgcaaatctatcagcaataacagcctgctgacggcactggaacggcagggaacaaggaatcaggataaccgtctgcagcagaaagccggtaacgaggaccagggcttcagccagatgggccagtctcagtcttccggagcaaactga

SEQ ID NO: 400576 - DNA, 339 bp, Salmonella enterica
atgagactttacccgttcagcggccatattggccgcattctccttatggtgctgctcattctgttgatgacggccagcatgtttgctatcgcagcggtatttatggcttacgaccctgatggccacatcacacggcgctgggtgcatgacagccgatggggactgtttgcctggcgactggttctttatggctgccttattaccgcctggatattgaaggtacgcccacaggcattaatccgctggccggatggacgtccgcgtcttgtgcgtatggaactgatgggggtgttgttcctggtagccacggaatatgtggcctggacaagcgctgtgtaa

SEQ ID NO: 400577 - DNA, 1545 bp, Salmonella enterica
atgaccgcaaacagttttctggaatattttctcgttctctttggctgggtaatgaacaatgccatgtggagcattctcagcaatacgggcctttttgcattgccactggtggtcagggttcttggcgtctggctgaaagtgagggaggagggggctgacgaggggaacaaagggcttcttgcccttccgcgaatcgaacatgcactgtatgtgtcttatcttgtgatgctcttttgctgcattccactgttgccggtggatatcagcacgatcaagttcgacagttcgcgtgctaaacagtgcggcgtcagtgtgccgacgccacagaattctggctacaagggactcgttaatgattttgacggtcgtacggccgaggttccagtatggtggtatctcctgcatatgatgtcgaagggcacaacgcaggcaatgattgcgtcaatcccatgcggtacgaatttgcgacagatgcgttttgacgttcagaacacgaagctgcgtgaccctgtgctgctgcaggaggtccaggaatttgcagatcaatgttactcgagagcatatttcaggttgaaaaacagcaacagccagctcagtgatgccaccattaactctgtgggctggataggtagtagctacttcctgaatacttccggatattatgactactacacggctatgacgccacgtagccagtggccttacaacagtcgccgggacagtggctatccagatacaggcgcaggtggatatccaacatgtaagacgtggtggtccgatggtacttccgggcttcgcaaacgagttctggccagctttagtgataatacacgtaaggagatgcaacgccagttccccggacagcagtgggaagaaattgcgttacgctggcttgtcagcccacgcaacgcagatctctccggcgccggtaccacttatgctgtcggcagtagcgacacaacctcgggagtagtcggtaatcttacacgccttacctcgtctattggtcttggactgaaacaggccgaggcgttacctggttttgatgcaatgaagcaggcactgccgatgatccaggcattattgctgatgatgataatcacggtcattcctgcattaatgatgttcagcgcctacgatccgaaaaccatttttactatctcattcgcgttattcgctcttcagttcattacgttctggtgggaactggcaggctggcttgatgacagattgatcaccatcctttatgacaatatggctgagcaggggattgcaaacagctcggtgcctttcgcggctttctttagttcaacggctgatggatggattatgaacctggtactggggatgatgtacctggtctttccgatgttctgggttggtatgctgagttgggctggagttcgaattggtaatatggctaacaactttagtgatgcttctaaaatgcctacggatgctggctcggaagcaggtaaaaaagctcaaggggtggcgattgatgcagcttcaggcgggattaaatcaggattaagtaaaggataa

SEQ ID NO: 400578 - DNA, 282 bp, Salmonella enterica
atgagcgaggacggtttcaataaagatgacctgagcagcacctttgcgcgcttcaccacaaaacgccgcaatatcgtttgtgatgaatccaagctgaagcggaaaaaacctgagccggtaaaactttcgagtgcaacacaagaaattggttgtgtgatttcatctatgctcgcctctacctctaaagcggatgtcacaaaagacaaacaggaccaatataaatctcctatccgttacagctgggagaaaaaaggtattaacggtggttctaacaatttttaa

SEQ ID NO: 400579 - DNA, 759 bp, Salmonella enterica
atgaataaaaaaaatatgcgtgaaagatgcaaggagacgtaccgatttctcagatcggtagatgcgctttatcattggatcgggctcggtagtctggttgtattgctgttcaaggtggcggttctgaactgtataccagctccgctgcattttatgtctgcagtcagcccagtggtggaaggcattcttggctcggtaatcgccagctacattttttatatgttctgtattcacccgccagtgtttgcagaaaaaaaaaccagtgcggcttttgttaattttatactgacacggataaaaaaagggtttgatgaacatttgcgcaatgtgtcctccacgctgagctatgactcaaccgaacaggatttttatgcgacatttacgggtatcaatccctttgcacgtaacgcacctttactccttcaggcacacccaaagctgatatatgcagactggttcgagttttttcaaaaccataatgtgcatataaagaaagaaatctcgcgcctgctggattcgcggctaaccttggatatagagacaatctacattctgaatctgattaacgactgcagctggttcatgattaccgaaaagctggctggactgaaagggcagatgacaaatggtcataacccttttgtaaatccaaaccagccagcaatttcttgctgctcaagcatgtatgagttgaaggagtttatcagaagcctacaacctgcaatcgatgctacggataaactggcaggtagagtctga

SEQ ID NO: 400580 - DNA, 714 bp, Salmonella enterica
atgttgtcggttctgtattgtatgttctgtatgtattatatgtattgtgtacaaaatacagtcaggttaaaatatatgcataccttcttaacggagtatttcatgactaacctgcctgctgacaccgtccgtcggatcgaggacgccgccgccgcactcattgccgccggcaactcgaacccgaccaacgaacaggtccgccagcacctcggtggcggctccctgtcccacatttccccggtgatgcgggaatttcgggcacgccagcgcgcactggccagcgaacggacgccggctctgccgccagagctggcgcagctgctcaccggccagttggccctgctgtggcaggccgcagtgaaacaggcagaagccgggacactggcggcccgggaacaggccgacaccgatatcgcccgggccgaccaggaacgcgacgaggcgctggcgaaagtgaccgcactggaaagtgaactggcggtgcttcgggaggtggtgaccgaacgtgaccggttgcttgatgaggtacgcgggctgcgcgcagaggcgctgccgctgcgcgagcaggtagcccgtctgaccgctaccggcgaacacctggcggcgcagttgcaggacaccaaagcggagttgaaggaaacccgggaggatggccgtgcgctgcaggtcgagctgctggccctagcacgccatgacgggaaggcgaagaaatga

SEQ ID NO: 400581 - DNA, 606 bp, Salmonella enterica
atgactgataccgcagcaaatgagatagcaccacacttacccttaatctttgaaaatgaagccaatgggattcttcaggatctgatcggtactccagccctgatggggatgatgatgtttgcgaccgaggaagaagtcatagccgcgcgtagctatatcattggtgtatttgaagagtgttaccgtgtcggacatttacgcatcatgggggccgctgatgaaggaaccttgtttgggtactccttgatttttgggcatccatcggcaaattattcgttgtactgccataaaatttatgtgtttgagcaatatcgtggtaatggaattggtagccagatactggccggaattcttgcccttccaaatgaagtaggtctgatttgctcgtctgatctaattcctttttacgaatctgccggaatgcactttaaaggaaatttcactacgccatcagatgctggtttcacgaaaactcgcggtatgtatgaaggtctttgcgtaatgagcactcataacagtggcgaggctaatggtctgcccatcttcatgatgaacgatagcgacattgataacatcatacaggccatggcatcagccaaaaaatga

SEQ ID NO: 400582 - DNA, 735 bp, Salmonella enterica
atgaatccgtcacttctgacccctttccgagaatcccgctgtccggactggatatgtccagtctgcggcgggaatacgctggctataaaagaaggaacctttcatgccggtcagactgcagaatccagtaaaatctgggttacacccgaattcggtctgcctgatatggaatttgtgttcgtctgtctgttgttctgtgagcggacccgctgtccggcagttgtggcagtcaccggaaccggtgtccttcctgatagcgaccgggctcgccctgctgcagaggatattaccgggaatattatttaccgggtggccagttttacaccagcgttgtcggcatttgctattcctgcggggtgtcctgaagaggtcgccctgccgctaagacagtctttttcgctgtttatcagcgcacctagctcagcagcaacagcaatacgaattgccttggaagcgctgatggaagcgcttaagctcccggaagcaagatctctacacaaacggctcgaaaagttgcgggatgaagctgaatatgctgaacacatggatgccctgatggcgctcaaatggctgggcaatgccggcagccatgaactggaccgggtgagcagccaggacattgaagatgcgtatcagattattgagtctgtgcttgataaaatttatgcaggatctaaagagtctctggatgcgctgatcgctcgcatgacccgtgtgtttgcacccaaaaaatag

SEQ ID NO: 400583 - DNA, 1134 bp, Salmonella enterica
atgcacttttatgtggatgaaactggtcatacaggtccgaatctgtttgaccgcacccagcctgttctttcttacggcgtcctgtcctcacctgatgacctggacaaggttgctgaatcagaactggccagtttgcgcaaaaagctgggcgtacagcgccttcacgctgctgaactgggcatgtaccgtcttgatgatgtggtcgatacgctgcttgttttgcagaagaagcaccggatacggtttgatgtctggcaggtagttaaacgggatcacgccatcatttcgttcttcgatcaggtatttgatcagggactgaatccggtggtgccctggagtgcctactggaccccgcttcgctatccgttgctgctgaatctggccaatctgtttgatgatgagctggctgaaaaagcgtggcgtgcccgtcttgaggctcatgatgaacgttcttcctcattattcagtgaggtttgtagagcgctgcttcagcgcgttaactccctgggtgatgcccgttcagttgaactcattacagatgccctgtcttgggcgatggtcaacttcgatgagctggggtacaactgcaaaaccaataaggaaaagctgcagatcatgcccaacatgatcggttttcagttcgttttgcacgggatctgctcccgtctgggggcaccgaaccggaaagcagatatcattgttgaccagcaatcgcagttcaacaccactcagcgggagctgaacgagttttactaccagatccgcgaacagccgtgggcactagggcctggtttgcccgtcatggatatgaagaacatgccggcaaaaccgcttgtcttccagtcgggaacgatgagtgccggactggagctggttgatatttatctctggatcttcaaacgatacatggaacagaaggagctgaccaaacccctttcccgccttgtctacaccaatcttaaaactgcgagaactgacagtgtttcactgcagtctgttgcaaaaaggtttaaggagttttttgaaaaactccctgaaccaactgcagaaatgatggaacaagcaaatgaactcagggccgtggaagaaacgcggcggctcgcccatcgtgtacaaagtctgtcgcaatcctga

SEQ ID NO: 400584 - DNA, 294 bp, Salmonella enterica
atgaaggtagaaagtgcacgtcagattcaggaactgattgagctcgagaaatttaaccctgaaacactgtgttcgggcgagagctggatggcaccttcagccagtgaagtcagtgtggtccgggcgctgatcccgctgacggacatccaactggccaatcggctggatgtggacgaacgcaccatccgcaagtggaaatccggcgagaccagtatggtgttcgccacttggtgctgtcttgctggctggccgggctggggatgctgctggaagaaccggcttagccggttctga

SEQ ID NO: 400585 - DNA, 204 bp, Salmonella enterica
atgactgtatttctcatcctcaccgccatcacatatggcatcttcaaaaccggctgcttcatcctattagtggtcaaggggtatcagggctggacattattctggaaaaactatgaccgcctgccccatatctaccgctcacaatggagattccagagacgattcattctcagacgtatctggaaacgcgtcagaaccggctaa

SEQ ID NO: 400586 - DNA, 240 bp, Salmonella enterica
atgcggcctttaaggccggtttggaaaaaacctgaaaaaaatttccgtttcgctttgttgctatttcaggttcagccagctaggaattatgctttccatgcaataatccatttttcacaacaatccggaattttttgtgatcatccggcaataatccttttctcttctccgcagatccgaaaacccattaagccggaagtgatccaactgcctgattcgtttagctccgttcgtatataa

SEQ ID NO: 400587 - DNA, 1047 bp, Salmonella enterica
gtggctacttatcgggcttactacggtcaggacagagatcgtgaatattttgaacgcatatttcaatcagcaaacatcaatttcatgattggctcaggagcatcactgcctgcaatcagcgtgttaggtgacattgaaagcgaccttgaggctctggtccgcgccggaaaggatgatgaatacttcagtaaatctgagtcttttctggacagtgtatggaaggcaaataacgtccttctgaagcgaagtagacccggagaggtaatccttcctgcgtttgtggatgatgtcgtatcgacacaggataattacacgaaattcatccgtgcattagaaatgcttctgacgaagcggcggactggattactaccgcggcgcatcaacctctttacgactaactacgatttattcattgaggatgcggcggttaaaaataataacgtcattctgaatgatggattccgtcagcgcgccgatatttacaaccggacagtattcgacgccaaatgtttttatcagaccatacacgcaaccgggaacctttataattacagcgtagaacttcctacggtgaatctcatcaagctgcatggttccctttcctggcatagctatgataaagaaatttactatgccattaaggatatgaagccagttgtgttcagtacaccaaaggagaagcaggactgggttatgtcacatcaattggttctgccgcggaaggataaatttcgtgagaccttactggaaaacgtgtattacgacctgctacggacttactcaaatgagctggataaagaaggctctctgcttatggttttcggattttcttttgcggacgagcatattgaaacccttaccaaaaaagcgctgcgaaacgccacactcaaaattgtgatattcgcctacaatgaggcggcgaaagagttatttcttgataaattccgtgattattccaatgttgacgtagtttttacgcctggtgcgctgttggactttaaaaagatgaatgaaattataaccagctttttgggaggtatgaaatga

SEQ ID NO: 400588 - DNA, 1809 bp, Salmonella enterica
atgacctccgcttttgttaacgaagaagcaatattaaggatcggtgaggtttgtgaagtatcgggcagaacactcagcgtgcttgtcgataaaaataaaaatctgagtgaccttttctatcacggtaaggtgcttaaaaatgtttcggtgggcagtttcatcgaattaaagaaaggcttcatgagcctgatagcgaaggtagaaaccgagaaaattgttgaggaaaaagcacctattggtagcggaagcgattcgcttcgcttccggcgctaccttacggcctcactggcaggctacattgaccggaacgggcgctttaccggcggaacacgcgagttgcccctgatcggcaatgaagttttcctgatgactgaagaacaacttcatcttatccactcgatcgcaccagcgggcgagatcgggctgaacttttcgcgcaccgatctcgaggatattgatatcactctcccaataagcggccttcttaactcacacatcgccatcttcggtaataccggcagcggcaagtccaatacgctggccgcgctttaccagcatggctatgaggccctgaaaaacctccttggcgaaggattcaggagtcagtcacggtttcttttatttgatttcaatggtgaatacggtgggagaagctgcatcacgcgcgacaaggtggtttacaatcttagtacgcatgatgaagacggtgaacgtgttcccatgcctgctgagatactgcttgagcatgaaattctctctgtcctgacggatgctaccgacaaaactcagaaaccttttctgaagcgagtgcttgaactcaaaaagcgtgtggagtcaaagcagaaccctcagtcctactttcgtgaaattctgaagaggcgggtcaccgaaactctgtttggttgcgaaaagaaaaaaagcgacgacctgattgatttattccggcccgttctgaaggacgaagacctgatagctgatattgaatttttttataacaacggcggagtatggcgaacaaagacaggtgtttacttttcgaatgaagaaaatactcatcagtgcaatatgtaccgccgggctcagaattatgaattccccggcgatatgatagaggagttgctggactatatgtatgttcagctaattattgaatatctttcaagccgttcaaatcctgaacatctttctcctgtcatcaaccggatgggcggactgaaaaaagatatccgcaaaatattcaataccgcggccggtggaagcatctgggcagaaacgaattttgttgttctgaacctcaatatggtcaatctgaccatgaaaaaaacgcttccacttttgatggccaaatgggtttattcagcaaaaaaaatggataaagcgccgtccactctccatctcatcatagacgaagcacacaatatcctctcgaacacctcgttcagagagtcagaaagctggaaggattatcggctcgaaacgtttgaagagataattaaagagggtaggaaatttggcgtctttgtgacgatatccagccagcgaccaaacgacatctccccgactattatttctcaggcacataactatttcattcaccggctgataaatcagaacgatctgtatgccattgaaaaatcagtttcttatatagatcgcatgactgaagaatctattccaacgcttgcaactggcacctgcatattcagtggcgtgatctgcccgatgccacttaagctccgtataaacgagctttctttccgcagaaagccgcacagccatacgctgaattttgaggacttaatgctctag

SEQ ID NO: 400589 - DNA, 810 bp, Salmonella enterica
atgggaagaatgaaagaactgctctttgatatgcaggaagaacgcgcgaatgaatggattgcagaaaattaccctgaggcagaagaaggtaccgaagagtttgatgtcgccgcccaagcgtacagtttgatgcttgatgaccttgccgaacaggcagaacgacggtggtttctggaatctctaaatgatcttgacgaccgttaccgccatgcagtcagtgaactgaatgagctcagtagcttggttgcttcagaaaagccaggtatggtgctccggctggcttacgttcataccgtgacggtgatggaagcatttctgatgtactctgcaagggcactgctgaatgagccggcacatctggaacgattttactcccgggttgcccctgcttttaaaaagaaaatacagcactgtgaggaagtggttgcccaacatttgcagaaattgccggaggatatcttatctgatgaatcttggttgcagcgtagcagcgcacagttgtttatcagcgagcagacctttcataacctgaatcacctgcgggtctacttctcgttggtactgaacacatcatttgactggcctacggagtccctagaaagtattgttgagacccgtcaggatctggttcaccggaatggcgtcagtaaggatgatgagcctgtacggatcggcacatggcatctgacaaacgccatcgcagcggtgcgcaccttcattgatgctgttgctgtgactctgcgccgggaaaccgggcgggatgaaatactccctaatatatctggcttttatgacagtgatgaattctga

SEQ ID NO: 400590 - DNA, 510 bp, Salmonella enterica
atgattaaaggaattccattgcattcttttgaatacctgcattacatcgttgatagtcttggatggatgctgccagtttatttatatctcttcagttttctttacgcatttattcatgaatccggacatgcccttatggccatgtgcctgggaactcgggtaacccgttttcaagtggggaaacctgtgttgttccggttcaaaaggggcagacttatcctgaagtttggattgctttttccggacggaggtgtcagttaccactatgcggatgatgcccccaggtggaaagttatggcggcggcgctggccggtccattattgcccgtgattctgtcagtaccagtttttactcttactggtattcagccactaacggtcattgccgggttgattgtgatgatgctgactctggttaacctaaatcccttcatgatggaaacagatggccagaaagttctcaagcatctgcatgccatagttcaggggcggaaggtcctgaattcctga

SEQ ID NO: 400591 - DNA, 324 bp, Salmonella enterica
atggaactgaactttgcggcgtcggtgctgaaagaacttggccatgtgacaaggctcgggatttataaaagactaatcaaagccggacctcagggcatggccgtgggtgatctacagaagcaactcgaaatccctgcatccacgctgagtcatcatctctcatcgctgatatcagtctctctggtacgccaggagcgccagggtagaacgctctattgtcatgctcgatatgaaaaccttgaggctctcatcaccttcctgacagaagaatgctgttcagggactgacgactgcctcaccatgccccagaagacggagaagtaa

SEQ ID NO: 400592 - DNA, 1224 bp, Salmonella enterica
gtgaacacacctccacttctacttagcagcaagataacctggtgcgttggtttgacccagttaattaactgggggattacctactacctgttgggtgcttttggtagcgccattgctaatgacacgtcgtgggggcaacctcttatcttctcagggttgacgctggctatgggcatcatggggctcatttcaccgatatccgggcgattattagtatcgatggggggaagaaaagtcctgcagcttggtgctctcctgaacggccttggatgcctgctcctggcaacgagtcactccctatacatttacttaatggcctggctggtgatgggcataggtatgcgcctttcactttacgatgcagctttcgctgttctcgtaaatcttgcagggccgacagccagaaaatctattacacaggtgaccctgctcggaggtctggcttctgttgccttttggccaattggcgagggcttactgagcctgctgggctggcgatggggtgttggctgttacagcctgttcgccctgataagcattttgctttgtatttctttgccagataacaaaagagaacgaggtgcagccccccgcgaaccgacggaacagggcatccagcatcttgagcgggactatctgaaatgcgggttgtatgcagcattgatggcattgctcagtttcctgtccacaggaatttcaacccatttacccctgattctggccagtgctggtgtcccggtacttgttggttccttatggggggtgggacaggtcagtgcacgtcttggcgatatagcgatggggagtcgaggatctgctttggggctgaacctgatagtggggatattgcttccttgttgtttcatgattagcctgctgggacagacatccatcgtggggaccggcctgttcgttcttggatatggtgccgtcaacggtctatctactttggtgagagcaacattaccattaactctgtttgacccgcgcctgtacgccagccgcatgggaacattgctcatgccgagttttttcctgtcggcactggctccttcactctatgccagctttcgcgaacgatttggggataccggcatgctgatcatttcactggtatttgcgtgtgtggcagcaatcatagccatatggatctatttgattggaaaagataaacaggcactacaaagagtgcctgttgatataacatcgaacgttaatgagtag

SEQ ID NO: 400593 - DNA, 498 bp, Salmonella enterica
atgatggataaaacgtaccatgtccttttcctgtgtaccggcaactctgccagaagtatttttgctgaagctttaatgaatcagctcggtggtgggattttcaaggcgtttagcgccggcagccaccccgcttcatcaccgcaccctttgacgctaaaagtattgaaaagtcaggggtttgacatctccagcctttcaagtaaaagtctcctgcagtatcagcaagtcgactcaccaaaaatggatttcattttcaccttgtgtgacaaaatggctggagaaggatgcccagtatttccaggccaaccgctgacggcccattggggattcaaagatcccgcactcgcagagggcgattcggaagcaatgtaccaggcatttgtggacgtcgagaagcaaatagccagtcgcatcagactgtttctgagtttgccgtttgagaagctagatcgcctttctttacaacagcaactggaacaactggataaaggcgtgtag

SEQ ID NO: 400594 - DNA, 744 bp, Salmonella enterica
atgaatacgatccaggtgtttcgttccggagcagaagacagaactgcacaggcagtatttgccgccgatctgaactgggcgcaagagcaaggtatcaacgtcgcgagccttagcatcgcgatgctcccaggtatgaaggacgaaagcgctgggcttacgcgttttctgttgtcgggggatggtgatgtactgcccgtcacgttgcttaatggagaactttgcctcgctggacgttacccctccagaggcgagctcattcgatggtcaaccaatgacttctccatcataagcgggcaaccaaatacgcttcccatcgtctggcagcgccttctggatagcaacggtgatacgtgtccgcgatgtcgggatactggcgatacagtgcaaaaagcatatcaccgtttacaggcaatcctggctcctttgggcattgagccgcggctcgaagttgttgctcttgatgaagttacatttgcggcggctacgatggagtcgaatcgtgtctggttttctggacttcccctggaggactggataggagcacaggctggtagcagccgttgttgtggtgcgtgtggtgacagtgactgtcgcactctggatattggcggagcaacttatgaggccattccggagtcattattgatacgtgcaggtgtcattgcagcaacacaacttcgttggtcagacagcgttgtagcttctgcagaatcgttttgttccactaacaataagtgttgctga

SEQ ID NO: 400595 - DNA, 1146 bp, Salmonella enterica
atgttcagattcacacagttactacaaagcctgatcaaaacggggaacatggttgctgaggaccgcatatcacaactggaagagacatccgttaaggaattaactacagtccgactccgtcccgaaacaaaggcctacttgcagtcacaaagcgaaactcttggcgtttcactttctcaggtaattaatatgatccttgatggcgtggtttcaatggaaatgaaaccagcagctgataacaaaatcaaaggaatatatgacaggattatgtcgctgtttgaattacataacatcaatacagtagatatggcgaaaatgctctccggttatggtatcaagctatcgcatcttcgaaatccggataagtttattgatattctttcaatggatatgattaaggagatagctgactggttttctattaattataaatggattataggagaatcaaatgagttatattctcctcgggataacacatggtataaggattcctatggtttctcgctactgttgctggagaaatcattccgacattctgatcttaaggtttctgtagttaaggcaaataacgtatcttttgagaacgctgagaaacttgaagaacaatattctaggttgtatgtcggatttatattaagctatacatctacggttaatggtgtatcttttacaaaatacgaagtttgcgagtttcagagatggaattatgataaatgtcgtggttatttaagattcattttttattttctggattctgtcagaacgaaaataaactgccagggcgtatcattcaatgaggagattattgatggtttgatggcaggtaggttatttccatcaacaattaaagggatgttatcagaaacttggttcattgctgatcgaataggtcatatagaaagtaattacgatgtagagataaatccagttgagtatttaaacagatttaacagacttatacgtttattgtgtttcggtagttctgtgacaattttagatattgaatatacaacgaaagacttttcatatggatggattctaaagtactcatgtaatggggaatatcatacggagttttaccatagtctggccactggtctggacgatatttatgataagttcatcgtcgagaatccatcataa

SEQ ID NO: 400596 - DNA, 216 bp, Salmonella enterica
atgttgagttattgcgaagctccccaggtctctgacctgttcgcggtttgcaccgggctgaaattaatcagtctgcttccacacaccagtatgttgactggtgtcgccatcgatatcgtgtcgattttctcctttcagaatgaagtccttacccgtttttacggaaaagacgtttggttgataaatgaacaagcagtgaatgaagtacgtttttaa

SEQ ID NO: 400597 - DNA, 891 bp, Salmonella enterica
atggcaaaactgaataaaaatcttaaaacgcttgccaggcaggcagggggaagttttaaaaccgtttctgaccgaatgaaaattgcggacaggtttgccgaacgtttattaaaacttaatgttcaaatcagagatattaaaaatatcaagacggggcatatcgagttgtatatgaagagccgcctttcagaagatatttccagacgcacacttcagaacgaaatggcagctatccgggctttgttacgtgttgcggggaaaacattcatggcaaatccttctcatgaaaaactgagcaatcaggctctgggtatttcggaaacgagccgggatggaactaaggtggctattcccgatgcttattttcggcaggtactgactagtgtagagcaaaaggatgatggcgttgcatgtgcaatgagattatccagattactcgggttaagaacagaagaaacagtacagtctgctaaatcgttgcgtacctggcaaaaagctttactcaatggtgatgaaaaaatacgtgttgtatttgggacaaaaggaggacgaccaagagatacaacggtattagatcgtgagtcaactctggctgcaataaatgcgtcccttaaacacttgaatgaaaataatggaaagttgattgataagccatcattacatacggctattgaacgttatcgcaatgttgtccgtgagtccggattaacaggaaaatatgcgcctcatagtttacgctatgcctactctgttgatgtcatgaattatcatatgaaaaggggcttcactaaagaagaggcacaggctctggcatcaatggatttgggacatggcgatggcaggggacattacgtggctcgtgtttataataaggtagagggtaatgagtaa

SEQ ID NO: 400598 - DNA, 240 bp, Salmonella enterica
atgagtaaaagcatttttgtttctggtgaggatttggttattgatcgtgtgtttttgggatggaaggaaaggatttcacgtattatcgatagtgggcattacgaggtggcctgttcacaggaggttcatgcgcattacggcgacaaatttacccgtattgatgcctgtctgtatttcatccgtggcgcactgtctgaaactttcaggaaatcactgagagaaaaagaaaacgctcattaa

SEQ ID NO: 400599 - DNA, 417 bp, Salmonella enterica; identical to SEQ ID NO: 78832

SEQ ID NO: 400600 - DNA, 366 bp, Salmonella enterica
atgaacgagttaattctcaccgaagattttcacatccgtgccagcgagcgtaatgctcacaaagttgcactggctaaagcggaaggcgagctgctgagtatcgcagcgcttcgccgccttgacctaaataccgggacagatgaagacggctttccgtattacgtctgggatatggcttctgttgcccgggaactggctgaactgtatgttcgaaaacttataccgggatcatgggaggcattctttaacgacctctgccgcatggcagaaggtattgataaagaagcctggacatatttctacaaaagcgcagtcaaagacgaagaggcctttctgtctatggaacgcagcgatgctgatttctga

SEQ ID NO: 400601 - DNA, 309 bp, Salmonella enterica
atgagcagtataatactgttgtttatcacccataccacgcgcgtcctcagccgcatttcagaaacaatgcggcagcagcaggccgaatggttcaccaaccgtagcggtcacagcagtttccgcgccgaggtcgttcagtctgaagggggttttaccgccatcatttcacgcagaacgggctacagttcgcgtgactggcagtatcagcaactggccagcgccggtcagtttgcctccgcacgtaaggctttacgggcgggacggcagatggcgcagcagatggcctggctgcgttaccgtttcgactga

SEQ ID NO: 400602 - DNA, 624 bp, Salmonella enterica
atgattcgctttacctcaaccgaattacgccctcttttatcacagcagggcggtatgcaaaggccactgctgcttgaaaagaaccttggtatatacatccgggttccggatgaccgaaaccccggcgaatggctcagggcatgggcggaaggttgtaatccctcgaaagatgcaaactggtcggaaaatgcagacctgttaattcccgagaaggaatacgcttttcagacctttatggagcagagcaaattcgacgccgttctgaacgaacaccacgatctttttatgatgccatcggccggtccactggggactggtatgacaattcgtaaggagacccgtccgccagaaaaggtgtatgtcctggtggaggaatatcgcagcaatattcgctggctctacgatcagtctctccggcatttacctgcctgtgtagggaatgcggaacgtctgagctggcgctcacaggcgctgtctgtgcttgacagggtaatccgtctcgactgtaaacgggcaaaaccggctgatcgcacgatgtttgagagtgcggttcgcagtgtacgctgcagcgtcagcgaggtgatgtctgatggctctttccgttacgcgggaacccgccgctag

SEQ ID NO: 400603 - DNA, 993 bp, Salmonella enterica
atgaacaaatccattcgcggccgtaaggccgcgccggctcagaaagccgatctttaccagcaggtcaccgacaaaatcattgccgccctggaaaaaggagttccaccgtggcgccggccgtggcgttctgcacagaacgtacatggcagcgcgttaccggtgaatgccacaaccggccgccattacagcggagtgaatatacccttgctgtggatgtctgctgaagagcggggattttcatccgatcgatggctaacataccagcaggcgaaagccgtgggtggtcaggtgcgtaagggtgaaaccagctcgatggccatcatctacaaaccgtttgagaaacaggcgacggatggcaacgataacaagctgttcgataaagacggtaatcccgtcatggagtcgcttgcaatgctgaagccgctgcaacttttcaatgtcgcccagtgtgatggactgccggatgctgttgccggcatgccgccaacagaggcagaagaggagcggcattccatactcactgaacaacaacaggagcaggtactgtcagtactgaatgcaaccggtgtggtttgcacatcgtaccgacaaaaccgggcgtattatcagccatcaaccgatcgaattgtgatgcctacgacttcgcagtttaattctgaagctgattactggtccacactactgcatgaactggttcatgcaaccggccacagccgccgccttagccgtgaagggataacatcttcttcgcgaaaattcggtgatccggtttacgcctttgaggagcttattgccgaaaccggcagtgcttttctttgtgcagagctgggtatttacggtgatgttcagcatgaaagctatctggccagttggctgaaggtgcttcgtgacgataaaaaagcctttttccgcgcctgccggtttgcccgggaagcgtcggaatttttactgcagccactgaaccgacaaccggaacagaacaaggctgcttaa

SEQ ID NO: 400604 - DNA, 954 bp, Salmonella enterica
atgttttcatggtgcaaaaaccgtctggaaatcactgcgaaatctgtttgtattgacgtgatgcagtcctggattgccggcactgaaactccgcgttatcgacatgccatacggcaggccataaagctgtttcttgctggatgtgccgggatacttaagccaacaaaagcgacagagtttactgcttatccgatgcttacggccgccggtacgggggcttctacttcggcaaaccaggcgttccagcatttcctggaattaatggaaaaggatgcgtggctcgacagcgctactattgcacgtatggagaagatctgggttcagtccggcctggaaacacttaaatgggagagtattccagtttcatcgcgccagataatgtcccagttgatggctgttcactatgctgactggtttggtgttgccagcttcggggaacagttcgatccgcaggagcgttgggaatggctcagtataatgccggccgcgagttgtccctgcgatatgctgatgataatgccgtcacgtcttgcaactgagttgaacggtaacagtggtttgttccgggggcttaacacaactgcagatctttacacgcagctgtatggtgtggagttcccggctggtcataaagccaactggagccgtgaatcactgggcacgatattactgacgttcgataccccttggtacccgccatctggagaggttatgggtgagatgtcagagctgtttgactgtgagatccgtcattactggaaatcagtggatgaaggtttttccggatataactgttttgaccgcggtgatcacgttgacagtggcccctggccggaagaaatgcagcaactgagcaacggtgaaacagcaagaatgtaccttgtctctacggaaaccacagcggtaacgccatatgcggcgccagcggcacaatacgggagcattcgggcctga

SEQ ID NO: 400605 - DNA, 684 bp, Salmonella enterica
atgaaaaatctaataaaccatgaaaaggcgttcatttcgcttttcaaccagactgctcgttatcaccatcgacatcaggtttttgaagacttcatcagttgcagcgttattgctcttcagaatgccctcagtttctgcgaaaagcgggagcagaaatatctgcgcatagttgcacgttatgaaaagaaggatgtagtccgtatggcagaattgctggcccatgttgtcaatgggctggatgattcaccgggggattttcttggacaggttttcatgcagcttgaactgggtgataaatatcgtggtcagtttttcacaccatgggatgtgggcatcatgatggcgcgcatgcagctcggcaacgttgctgataattttgcggacaagccttttattaccctggcggagccagcctgtggcgcgggatgtatggcgctcgcatttgccactgtgctgcgcgatgccggttattcaccacaccggtatttgtgggtttcagctactgatatcgatccgctggctgcggggatggcttatattcagttaacgctgtgtggagtgccaggtgaagtggttattggcaactctctttgcgatgaacgccgtcgtgtgttgcatacgtttgcgcattaccagggcaactggcccggtcgtttacgccatgtcctgaatcaggccgcctga

SEQ ID NO: 400606 - DNA, 279 bp, Salmonella enterica
atgaaagatgtgttctgggtagtcgaagccaacgggaaggaaattggcgctatgacactggatgagtttgaagacatccacaagtccgtgaaggcaaactggatgaacaggatcgttgccgttatcaggtttttctttttccctgcatataagaaaacaggcctgtactggcctgaaattgaagaggaagtaaaagcacttttgcaggtcagaactgatgctccgctaaccattaaattcgttcgcggagaaatgccaactcagataagactactataa

SEQ ID NO: 400607 - DNA, 648 bp, Salmonella enterica
atgtccagtttaccaactggtgaaaatatcaaagccattgaaaagctaattagcgatgcctcagaggttattgcaaaacgcgagcgctcagtcagacgtgcagaacgaaatctggaaatagccgaagaccaccttgcagacctggaaaatcagagagatgaactcgtcatagcgagctggggagatgctcccaattggcatggaatatttagtatgagtgaggatgcctcaactaccatgcgagcatatcgtgataaatgggtcggtacgatcgcaggtctgcgtctaactgccttcggcaatatttataccggacagtcagtttacgggatcggtttcacaacaaagtctgaagaagaactggagcaaacaatccagatggtggagtttgttctgccgtaccttattgctgatgagcgaaaagaaaaatcattaatgatttataactaccccgcggtggactgctgccacagcttcgtttttaatatcgaaacaggtacatatggcatcgccacagatcgctttatgtcacgtcaggaaacgatggagtttccctcactggaattcgcacttcgtcatctccaggcaaacaccttaatagacgatgcagataaacgggaaagccttaacgatgaggtgacagaatga

SEQ ID NO: 400608 - DNA, 546 bp, Salmonella enterica
atgaaaaaactcattctttgctcaggtatctcttttgtacttatggctcttgcggggtgtagccagaaccagctcaatcagtttcagcgacaactgtcagatgtcagcacaatgatatcacctggagagcagcatacttctgacaaacaggctgaacgtaatgagattacccaggcattcagcctgccagtcggcgtagatactgctgcactgcgcctgaagcaacattatggttttccctcagatgaagatgtttcagcagcaagaaacaatggccagggaaatgctggctggtcagcatcggcaatttcagaaggtgccagttggtcagcccaacctgggtcttattatcgcatgagccggaactgggcagctaatgatcgcctgacaatagaagtcacaggcgatgctaaacgcagcaacgtgaccgcaatttatcgttcctccaatccggagcatcttaaacctgaatggaccgcgcgcctgtggaaacaaattccggaagtcgcacgcggtacgaaggttagccgggaggtcgggcaatga

SEQ ID NO: 400609 - DNA, 1218 bp, Salmonella enterica
atgatgaaagcttcaatttcaatgattacccgctgcgtttcccttgctcttctggtttccgcagcgccgtcggttaatgctgcgacgaactggatggaggcacgcggtgatgctatgggtggcaccggcgtggcatccgcgcactacggtacagctgctctgtctaaccctgctctgttaactacgtccggaccaaccgatgatttcagcctggtgctgccatcggtgggcgcccaggtctctgacccggataaaaccgtggataaagcggatgatgttaaggacctctgggatcgtttcgacagcgccgtcgctaatcagtccggtgtcagcgaaagcgctgcggcactcaagagtaagcttcaggatttgaaaaacacacatgcgaacggccaggtcggggcttcagttattgcaactgtgccgaaccagacactaccgttcgccgttgtggtgaaatcatggggtactgtctctgtcgatggtaaggtcagcgatcacgacctggaatacctcgacaaggtcgccgatggcacaatccccccttctgcagtggatactgactcacttacgtcaagagcctacggtcgtgcggctgtgatcaccgatgtcggcgtggccatggcgcatgagttcgaaactgcaggacatgcctggtcctttggtatcacaccaaaataccagcgcgttgacctgtttaactacaacgtttccgtcagtaattttgacaaaaacgacattgactccagcgagtaccgcaataccaaaaccggttttaacgccgacgtcggtctgtccacaaacctgaacgataactggactctcggtctggccgtacaaaatatcatcccccgctcaatcgatacaaaagaagtcaatggtgaaaagggaacgttcaagattaaaccgcaggccactgccggcgcctcatggcacaacagcttcatcacaaccgcgctcgatgtcgacctgactgaagcgagtggtttcaccagtgataataagcgtcagtttgcaagtctgggtgccgagattaatgcctggaactggatgcaggtgcgcgcgggttaccgccagaacatggcttccggagaaggcaatgctttcactgccggcctggggttctctccgtttgatgtggctcacctggatatcacgggcatcgcaggcactgatcgtacctacggggcggttgcacaacttcaattcactttctga

SEQ ID NO: 400610 - DNA, 1017 bp, Salmonella enterica
atgaaccgtctgaacatcacctccatccttgccagtatcatcactgaacgggatgaaaatatgcagcagctggtagcccagctttcggacggaaagaaaacgtctggcagccctattgcaatacgttttaaaccagctgtcagggatttcgtcacactggtatcaggacgcctgggtatttcatcagctgaactggtcaatattctcgtcgagggtatcatgcgcgagacgcttatcccccgacaggctgtgatcacacatatccacgaacggttctggctgctgatggatgagcaccgcctgtcggtactggacgtggctcgcctgctctcggactggaatatcggtctgagcgttctggaaagccgtgaaagaacgatggattacttaactgcacctttgctgaaacagctatctgactggttctgtgtaagtaccagatggctggaaggaagtgatccccggccagtgtgcctgaccgctttcagcgaatggatgcaggttgccatgataattaaaaaaagaattcaggaatatacatctgacgacaacctgacccgtcctgacatattcctggtcagagagaatcaatacacctcaagagatatcaaagacgaatccgggcatgttttcatttttattcggcgctataaaaccgttaataacacaacaattcgtgtagttgaatgtatcgggcattgtccatcttcaggtgcttataaaacacaacttaattcattcctgagtatgagcaacattctcttcagggcgaatattctcaacagtttcgacacattttatgcatccggttatttactggatgcgctgagagaaggaaagatacttccggccgctgcactgtgggaaattcagaaacttcaacgaacagagtcaggtaatttttctcaaaatatatggaccgaagaggaaagagaaccttttcttttccctgaggaatttataacaccagaatggagtaaatttgttagccaaataacagctctcaatattaagtga

SEQ ID NO: 400611 - DNA, 561 bp, Salmonella enterica
atgcaaagattagtagtctctggaattatcctctgctggggttttgtgagttacgggttcatcgctctaattacggggtatcaggatgggatggtgtatatctgggggcttgttttaatatcccctttttctctgagagtggtgaactggatgcagcgcagactcatcaaccagccctgcatcctgagctaccataagcgcagctcaaggatattcgtgcatctgtcgccaaaccagccaaccgtcagtatttcatccgaacgtgtggcctggttctggaatggagtgctaaccagtatagaggacgctctcagtggcagagaaaacaccatcgtgattgcctcccatctcctcacctcttatcgaattaaacgtatcagaaggcatcttcagattcaggccggacattaccgaagccatgtcatacatgtccccttcacacccgctgcgcgtgcagttatgcaactggaaattcttcttgcacagtggcgctggcgtgtaccgtccagaacgttatggcccgttcttgtcatacgaaaaactttcaatccggaaaaataa

SEQ ID NO: 400612 - DNA, 1530 bp, Salmonella enterica
atgcgtggactgaaatggttaacaggccttgggctggcagtcagaacggaacactcagtaaggccatccgtgcagccggcgcaagcgggagggttccggaacgtactgtccggtcagttgttactggaaactgcggagcgacagaagttcgtccgtatgttgcgggaaaattgcccactgtcacagtcagtctttgatgaattctggctaaaacccttagagcaaatggccgctcgcgttcaggaagtaccggctgcctgggcggggccgttctccactccaggtggctttactgacctcagtttatccgtggccgcaagtgccgtgaggctggtacgcggtatgatgttacctccgggagcgacgcctgaggagcaggcagagcaggggcctgcctggatatgtgcagtgttctgggctgggctttttcatcatcttgaatggttgtcgcagattgaagggagtctggcgaacggaaaagcctggtgtccggggatggaaatacccggtgcaaactggcgggtgcgtccccggcaggggaggacggcttcaatgaacggaatgttcattgccagtaaactcatcccggatgatgcggctatctggcttcaacgatggccggcgatttcaggcgcgctttttttgtacctcagcggacaacaagctcagtctggaattatcaacagcatcatcagcgatgcacttgccagcttcgcctttaaatcaggaaccgtttctgggacagcaagcccctttgaaagcgataaggtgatcagcacaggggaggaagaatccagaacaaacaatatcccaaatttaatagacgatgacatgcatcaaacgtccagttacaaaaacatgacaccggtttcagagccaattaacattgcatcaataggttacgatgctaaccagacaggtgattatgctgctaaggatgttaccggtcaggttacattgctttcggcatttgataatcacgaaacacagtcgtccgatgaccgaacaggtgaagaaactgtcccggatgagtcggtactaaccgcagaactcctaagcgtgcttgaccagatgtcgggctctggtgctgctgatgttgaagcgaaggttgaaactacttcttctgaagagccttcgctggtcgggatggaatctggcactccaggagaaaagtttctgggctggctgaaatcatcaatccttggcggtacggttagtgtcaatgagggcgagagttttgcacatattctggctcagtttgtattcattgtttcacctgagtgtttttttaaatatttatcgctgaatacaaatgagtcactggataaatcggagttacaaaaaagctttgaagctctgaacgttcattattcacgaaatggtaaaggcctctggcattaccataaatacgatacgccggataaaagcggtcgttacaccaaaatgtcaggatacatgctgagtgctgacattatttacagaaaaggaacctgtccaccggacagcgtatggcttgcacgaagaaattaa

SEQ ID NO: 400613 - DNA, 954 bp, Salmonella enterica
atgaacaatgcatttgaagaagtgctggatgattattttttcagtaaatctttgcgcccggctacggagtggagctacaggaaggtagtcagatcattcatttcctttagtgggaaaggtatttcacctgagcaggttgataaaacgctggttttaacgtggcgccgaaaaattatccatgaggaaggactgagcagaacgacatggaataataaagtgactcatatgcgcgctatatttaatcacgccatcgttaatgggcttgtaacgatgagggaaaaccctttcaacggcgtaatcacccgccccgatgtcaaacgcaaaaaaacactgactgatgtgcagatgaataaaatttatctgcacatgctggcaagggaagaggatgaacggattggtatgatggagttaagaaaaagcgccttacggccagcatggttctggctaacggtactggatgcattgcggaggacaggaatgcgccagaaccagctgctgcacattcgcctggaggatgtaaattttgagcaccgctggattaatctccggcctgagggttcaaagaaccataaggagcaccgggttccgattactgaaaacctccgccccagacttgaaaggctctataacctttcccttgagcgtggcgcgaagatgcaggatcagttgtttaatctttctcgcttcgatggccggaagaatgaaatcagcagcaacatggattatccgccgttgcgtgcgtttttcagacggctttcacgagaatgcggttttacagtcagtccgcacaggttccgacacaccatcgcgactaacctgatgcgtttgccggatcgtaacctgaagatggcacaggacctgctgggtcattcaacaccggcggtcacgctggagtatgttgaaagtgacctggataaggtccgggacatgctggaggagctggatgcggcgtaa

SEQ ID NO: 400614 - DNA, 741 bp, Salmonella enterica
atgtcacataaaacaaaggcgaccacgaaggatcgccaatggcttcgcactaaacaggcacaggataaccacatgagcgccatttctgcaatttatgcaggtaaagaaaaagcgttgcacttaacgatctgcaatcagtacgttgggggtaaggcgtggtgctcactcgttgcggtttacgaccatttttccgcagtatccatgatgcgccacgccgcctgcaatggcgcggtgttctttggtggtgctggtatggctcctacctacgtagacaccaacgacacaccgcgccgcccctcaatggtgttgctggtgggggagcgttcgcgctcgctggctaacctgcttgccggtcttcccatccctgccagtaacgccaccagcacggcagtaaaaaaacacttgcatacttataacggcttgaattacgtttacgccgcacctcataaaacgggtgccgggcgtggaaagccgaagttgtcaaaggcgacaccagacgccgaaagcgtctttttttgtgtctgctatatgtgccattcgatggcgtggtgtgttatcaggcagcgcagctataatcgccgctacgttgccctcctcgcataccatgccggccacaatggcgcggtgtattgtctaccttctggggtaagtctaccccttttagtacgggttacagtcatttcccgggttaacagcacatcgcgccgcctaagaatggttatgttggcggggcagtcgtaa

SEQ ID NO: 400615 - DNA, 198 bp, Salmonella enterica
atggttgctacccctactcaaactcgccctgaatttatcttttactttctggccgttcgtcgtgcagacctgcacgacataccgcaccgtgaatccgttaccgtgcctgacaaactgacagcccgccgttcgctggtgaggcgctatgtgctttctttcgctggccgtattcccgttaagggggggcgtcatgtttaa

SEQ ID NO: 400616 - DNA, 189 bp, Salmonella enterica
atgcataacagaacatttcgcattaatggtcgtgcagtcaacaaacgcggcctgacggttggcattaactacgatgtaacagccaccagcgacagaaacgtcgtagcggaagctaaccgaatggcaaccactaacggccttaaacacattcggattgtctatgtacgtgagggggtaagccatgagtga

SEQ ID NO: 400617 - DNA, 204 bp, Salmonella enterica
atgagtgatatgattatgcaaaccgcaattgttaaagcctgtcagttatcatcaatcatcgcggttattgctgaaaaaggttcgggaaatcctgacagtaccaatctgatagcattagcggaagaaatatccggcaaccttgctacttttcttttagaaaaagaatgcgaagacaatacaaatcaagggggcgataatgtgtaa

SEQ ID NO: 400618 - DNA, 648 bp, Salmonella enterica
atgaataaattaaattctggcttaaatgccagcggcagcgctcaccctgaaatcagtatggcagtagccacgccggaaagtatcaggattatttacaacgctggtgctgtaaagctggtggcctacaaaaaagccgttacatggctgggtaaggggcgctatgactacgattcactgtcagggtacaggattacagaggctttccttgctggtgtagagatgggctatataccgttctatgatgatggcgttatgtcggtgtatcgctggattgcttcaattgtttatttcgatgagcaggcacataaaaacggcgttatcgatgtaccagaccccacacggaaaatctttacggcggcaatatacaagggcaagagtacatcaatcactatttacccgttaatgttgcgaaagcttattactgacacattagaggctacagcatttaaagagtacggcagaaaagcaggtttaaaggtggcgataatgtcatttactggcatggtggagccagcgggcgaagttctggccgtgtcgcctttcggtaatgagttttttagccgttcgctggagggacttatattgcacattcagaaaattaccagcggcagcggcggcagtaatccggctaaatccgttattcactaa

SEQ ID NO: 400619 - DNA, 492 bp, Salmonella enterica
atgacagcacaaatagcagcatacgggcggctggtggccgacccacagacaaagaccaccagcaagggaacaagtatgacgatggcacgcatggcggtattactcccatgcagcgcgtcacaggacgggcaggcgacattatggcctggcgtcctggcattcggtaaacaggccgacacactggcgaagcataccaaaggcgacgtagtgagtattgggggaacgatgcaggttaaccagtggataaaggttggtgtactggatgacatacagcgggatatcgctgcacgtagtctgactattggtgctggcgtactgaaagccgctattgccagctatacgcgccgtatccggtacaaaaaagcccttgccgctggtggatctcgttatgaccttaacgggcagccatgcggggaaataacgccggaacagcagcagacagcggcagatgatatcaacaagacaaagggagatcggggcaatggcagatga

SEQ ID NO: 400620 - DNA, 216 bp, Salmonella enterica
ttgattaacgtgcaaaagggggagtacatgaagttgccggaagcgtggccgctctatgctaaatggtttgtcgtctggctggtcattacgccaatgatagcccatcggattagctctggcctgcctggtttgctggtggttgctctcgcggtcggggttatcgttcaccttgtggatcgcatgttctcttttctttgtgaacatctgaaacggtga

SEQ ID NO: 400621 - DNA, 153 bp, Salmonella enterica
atggagccacaaaaactggcgttaatagcgctaatcgttgttggtgcggtgtgcttaggtgcgctgttacttagcaataaaaatctttgtgatgtcagcttccgaagcggcaaaacagaggtagtggctcacatggcctacgaatccaggtaa

SEQ ID NO: 400622 - DNA, 390 bp, Salmonella enterica
atggggcgtaattcatccggcctgcatttgagggttgccgaatggatattagaacggggtgaggctgcctgcgtttacgatgtggcgcaacaattcggtgtgaccattcgccaggctataggattgctttcgtctgtcgtgacggatagcgccattgaaacacaaacggggctggttattcctgaccgtcccggcggtcgctataacactaagcacgtcagaacggttagcgttctctctattaactacgaaacaatatccagccgtaaaagaacgcatcaatgccataactattatgcagaaagccaccggcaggaaacagacggggaaatgtcccgcgccgaaaaatgggaatgggtgatcaggaatgccagacggcggaaacgttga

SEQ ID NO: 400623 - DNA, 369 bp, Salmonella enterica
atgacaggactcattgaaatctattcccggcctgaggctattgacggatttttagcgctaatgctgaaacagcccgacaactaccgcgaacgggcaataagcgaacgtatatccgcgctggtggaatatgtggatcacgttaacgccgcgatgtggacacagcaggaacgggacaggctttcggattttgatgcacgctacatactgcccgctgtttctgaaatatggctacaggtcaaacaggaacttacagggagcagcaggccgctatgtgagttagccggtaacatcacggggctaatcagtctgaccagtttttacctttcccgcatcgaggacagcggcgataaaaacagagtgccagcctga

SEQ ID NO: 400624 - DNA, 465 bp, Salmonella enterica
atgaaaactacctacaaggccgccatcctagtagcaaccgcgctcacctcgtactctgcgctcgccatcaacactccaactaccgacgaaggacactccggtaagaataacgtgacactctcgtcacactccgtaaacgttgccacccaggtaaaaacacctccactcgtgttcactgatagcattacggccgcagcgaaagcggggacagatctcggagccaccggtctgatctctagcagtgtgttctcagcgaaagccgggcacaagtacgtcctcgacgccggcaccgttggcgctacagcaagcttctcaaccaacagcgcaaccgttgaaagtgacaagaaaggcctggacgcagactccgacgctgaggcgtacgtacaactctctactaccgcgaatacatcgctggcaccaggagtgcacaactacaccttcgttgtatcagactactcagcgtaa

SEQ ID NO: 400625 - DNA, 369 bp, Salmonella enterica
atgaacaggctcatcgaaatctactcgcggctggacgacattgatgaacgtttagcacgtatgctgaaacagccgtgtactcaccacgcgaaaatgataatcgaacgtataaccgcactggtggagtatgttgatcacgtaaacacagtgatgtggagacagcaagaacggggcaggctaacggaatttgatacacgcttcaccctgcccgctgtttctgaaatatggttacaggtaaagcaagaactaaacgtaaacagcaggtcgctatgtgagttagccggtagtattacgggactaatcagcctggtaagtttttatctttcccgcatcgggggcaataacgaaactaccagggtgctacattga

SEQ ID NO: 400626 - DNA, 609 bp, Salmonella enterica
ttgagtcttattgccactgcggaaattactgtaggggggatgcactctgatgaaacattagcactggataagctgccgttaaaatatgttgccctgagccactgtttccgcactgaggctggtgcatcggggaggacatctaagggactgtatcgcgtacaccagttcaacaaagttgaaatgtttgtcttttgcgcgcccgaggatagccagcgtttgcatgaagagatcctgcaaattgaagaagagatttatcagttactcaatctgccttatcgtgtgttgcgaatctgcgctggagatcttggcgctccggcgtctaagaaatatgacattgaagcctggatgcctggtaaagacggtggagaatatggcgaggtcacttcagcgagcaactgcactgatttccaggcacgtcgtttagggattcgatatcaaaataatgataaatcgctgcggggatatgttcatacgcttaatggcactgctatcgcgaccagtcgtgttatattagccatcctggaaaactatcaacagccggatggtagtgtggtcatccctcaagttcttcaggattatatgggcctggatagtattaaaccaaggtaa

SEQ ID NO: 400627 - DNA, 324 bp, Salmonella enterica
atgtcgcatcagcagataattcagacccttatcgaatggattgatgaacatatcgaccaaccgctaaacattgaggtggtggcaaaaaaatcgggttactccaagtggtatttgcagcggatgttccgtacggtaacgcatcaaaccttaggcgagtatattcgccagcgccgtctcctgttagcagccgtagaactacggacgactgagcgcccgatttttgatatcgcgatggacctgggctatgtatcgcaacaaaccttctcgcgtgtattccgccgcgagttcgatctcactcccagcgattaccgtcaccgcctgtag

SEQ ID NO: 400628 - DNA, 342 bp, Salmonella enterica
atgttgagcatggcgatactggacaacatacggttattaattcttgatatagaaaagagcgcccagggcaaactagaaaacgaaaaattaatttcactaattgattatgtggagcaattaaacgagcatataaaaaacacatgcagctatctcaatcacccttacctgaatgaaaataagttagttcacgcactgttagaaatccagatacaaacgagactaatgcagatcgggagggttaagagattccaggagttagccgtgtatcttttcaatattcgcgtactgatagacaacgcgataaatccactaagatcgcccagggcaacactcaccccgtaa

SEQ ID NO: 400629 - DNA, 1086 bp, Salmonella enterica
atgctgttcgatgaacttaaggaaagaacctgtacagacagaacgttaattaaaaaaactaattatgaatttcttgatcagtcaagtcttgatgaacatgcacaaataaggaaattgttaaatctatgttttctcaacataaatcaatcttcgaaaaatgaaataaaatctagagttcagtcctccttagaatcggttttccatgcagtctgttttgagcttattgtgggtcatttatttaaaactttagggtgttcattggaagaacaccctgaaattttaggaacagagaaacatcccgattttctggtcacccttcagagtggcgaacagttttatcttgagcttgtgaccattgatgaatatgatgattcatctattgaagagtttgagacttttataaaaaaattaagaaacgaaaaatattttactcatattagagagatgagtggcagaaaaataaatcataatgacaatataaaattacgaaaattaattagtggttggtggcataaaaataacacgtctatagttagccctgtaacttttgaaaatgaatccaaagatttcaaggtcgaacttgagatatcacctattggagcttttgccataagttcatcgatttctagcgtcaggtttcattcacaacttttagagaaattgaagaaaaaagccaatagatatggggaattaaaccttccatatattatcgctacaacttttagaccttcacggcattccgtagtccttcagttcatgcagagactgattgtagataccttgtacggtggtagtaaaatatataacctagagaaaagtaagctcgaaccaattcgtagtttgtggaacgttgatcgtgaagaagtaacgtacagtaatgttagtgccgtacttttttttgatgagttaacagtaatgagagccttgaaaccatttaaatattgtttgtttctaaatcatttttcaaaaaaacctgtttatgatggattaaccgatttctttgctatgttttacactgatgggataaatgaatactctcgtgatggatataatctttcagagatactaaaaggaacattggcttga

SEQ ID NO: 400630 - DNA, 894 bp, Salmonella enterica
atgccagatcgaaaaagtcgatatattgctttcgaacaatttcatcaagcgtcaaaagacttgttcgaagagtatgcaaagtccacaaaagataaacgcttggctgacttatattcgttttacgtaagacctggaggcagatacggaggatttgacaaaaaaattgtggaaattttctatggcagccgtccaattggttcaatcacaaaaattgtagatggttttaaacctattagaacattagaaaaagcccatggagctactcttcaataccaacgaacagatgatgggcaagttttgtgcattctgattccagcatcttcagagaactttcattacactgaagattttatagttctagatatagttagcagcccaattaaacttacaaaaaaatccaaatggcattggatattattccaagcatatatggagtccacttgtttagatgggaagcctaattacttacaaaaaatattaacggcgtatttgcgcacttttaaagagtatgttgttaataataccttgcaaaagcgaaagtctacaagatttttttacgatattactaagtacgcactaactattgggctaagtgggtttgttatttttctcattacttggttcaaagaatcgagaagtgataatcaagttgtagaaaaacagcaggaggtactaaaaatatttaatgatatatctaatagtgcacgtgaaatttccgatacgtcaattaaaatcaatgaaaatcttgaggcgcacaatggagaaatcactggaaatttgaaattgatgaattcaaatatgtcagaaaacactgcggtaataaaagaagggatatcaactctcaagggtgttattaaatgtgagaatggtaaagataaatatacagatgaatag

SEQ ID NO: 400631 - DNA, 957 bp, Salmonella enterica
atgagtctaaatagtgaagatgaggaaagagttactgaagatgatgctaaattaactgatagagcgaagaagataagtggtgagcgaaggttaagctcccttatggcaaaaaatcccggcattataaatatcatggaaatgtttttgtggttctatatttcgtttttagtttttatgtttcataaatctccagaggccaatgccgtgccttctgaaacacccaccttttccatgtttttaaatatgagttcaggggttaaagctttagttttaggcttgattccgttggcatttacgatggtgtatcgagtatctccgttacaaatggttcttaggcgcgctttgtcgattaatgacgaagttagaattaatcctatggctcttgatgttgtggatgataaacctcaaaaaactaaatcagatttggctgaagggtatttaagcgatttggttattagctccgctagattatctaaagatatatacagtcgtggtagtctgtatttactgtttggggttatattctcaatagtggggttggtgtttttttactcgcaagttcatgcttctgatccgctgtcgcccgtagctaatatttcgacgtctagtagcttcgtaaatgaactgatttatcttgctccgaagtttggtatacttttttttattgagttaatatcatttttcttcctcaagcaatatagagtcacaatggatgaattcagatattatgaagcgataaaacgttctcgtgaggaaaccttagcagtggtaaaactactttcagttaattctgagaatgtcgattacatggctgttctagatagattaaagtttagctccaatgttgggagacttgaaagcgggcaaacgacagaacttctggaagccaggaaattcgacaaagatgaattggattttttagccaaaattgccgaggttgtggctaagaaaggatga

SEQ ID NO: 400632 - DNA, 1914 bp, Salmonella enterica
atgaacggcgatatattaaccagtctggccgacggtattgatctgtcacttaatcagtttcttgcgaaaaagtcgctgaatgaggcgcgtgtggcacgtattcttgacaaggcaataaacattgaactggatgaagatgatccgtcgcagagtgggtgtgcaacgggacttcctgcgggccactataacgggagcgctggcgctttttttgcccgaggcaaaaaggttgtacaaatcagttccacggtcattattccctgcgccagacgctgttctcaaaacaaacagctcaatatgagcgttgatctgatgaccatcaatcacatcgggcaaaaggtcgttgtatcggtatcgctggacgaactggcaagaaacccggaactggtcattgcggatctggttgccaaaggctttggcgtcacgacgtttgttcattcaaggggttaccttgagaggtttatccatgcgtgcatgaagatggcgctgccaatgtatctggtggcggagtctatggggatggtcgaaggagaagcagcctttttgcatggtgatatgccgcttgccagagggatctccggttttgattaccttgttcctcataaatcggctttttcgggcattcgcccttctggctcgttagccgggtggaagacagtgatcaaagataatgcacacggatggcctcagttgttcgcactcagtagctcgttagcgtcaacactgcttggaatggccgggatggatgtggcgttgtttcatttttatggcggttcaacaacggggaaaacagttgttcttcaggtgggaatgtctgttcatgcccatggcggtgaacctggtagtcatccggatgtagctatcctgcgatggaatacaacagataatgcacttgaactcagtctgagtgagttttcggggctggttgcctgtattgatgaactgggtgcttacaatgaccgaaaattctcatcattgctgtataacatcacctctggtcgcgcaaaaattcgcctggataaatcactcagaagaagaaagcctgtgttatggaaaatgaacattttatcctccggtgaaatgtcgataccggaaaagctggcttcctacaacgagcagcttcagggggggcaggaacatcgtgcaatcagcctgaatattctgccggaagacgcagcaaaagagggggaatccgtagaagaggttcgtcgccgcgctgataccctcaaagcagaactggcggaacagtatggcacggcaggaaaagcgtttattgctcgttttctgtcgcagcagaatgatgatggtagcttgatgtcatacagtgaattatccgagcaaataaaagacacgacaacagtatgttgtcagatgctcgcgaaggaactgcagtcagacggatatgttctttcagatattcagcaccgggctttaaagcgttttgcgctttgtctggcggcaggggggatggcagctgagtgggatattttgccgtttgagccgcaaatgatcaaagattcggtgatgagcgcggttcgccgctggctggatgatggactgaaccagtacaacccggttaaagaagcattaagcgccattcaactggaacttatcaaacgacaggccgcgcattttgtaccgctacaggataaagaggcctatatacccagcaatcactgggggtatacacatcctaaaactcaggatttgatgatttttgcgcctgtatttgacgactggtgcaggcgacataaccgtaaatccgcagaggtagctaagctcctttctgccaaaaattatcttgagccggaaagtaaagggcattacaaaaaacgtgttcagaacagtgatgttgaaggtgttttctaccagataaaacgatcgtttctccactgtaatatttcagccgaattctaa

SEQ ID NO: 400633 - DNA, 1272 bp, Salmonella enterica
atgcaacacattgtcaaagtagtatttacaacccttctcttgatttgcagcacccttgcgtatgcacagcgtttaaccgtttccgcatacatggaggacgctgtgtcctgtacaacacaacctataagccagtcccttattcagagcgttcaggctgaatgcattctgaagggcaaaagtcgtgaactgagcgacagcagaactacgggttttaaggcgctggtcagtaaacgaggcaaggtcatgtttgccgcccgtttcagttgtggcgggagtaacgtatatcgccgtctgggtgattatccggcacttaccatcacgcaggcgcggtcagcagcacaaaaactaattgcagatatgcgggcagagtaccagctacgtggtgctaacctgttcgtttcgcataatttgctgttcagtggtctgctggagcgcttcgaacatgatgttctggacgctggtgtaaagcgttctgccgataccgatcgttcaaaaatccgtaactatctgcttccccttcttgggcattttaagattcatgatatcgatgagggcgttatcgggcgttatctcaatggcctgatcaatctgaaaccagccacacgtaatcgtcatctggctctactgaaagccatttttggttatggtcgcagaatgaagctggtgacgacgttacccactgagtttatccggatgctgccggaaaccacgtcccgtcgcagggcgatgagccatgaggcatttcagcgctggtttaaggcctgtgagcaaaaacaccacaaggaacccgatagtgcagcggtcatgctgctgatgtttctgggcttaaccgggcttcgactgggggaaactcgtcaccttcgtctggaggatgtggaatggtcacgtaaggtcattacgctcagacagaccaagaacggcaggcagcgccatgtcccggtgtgtgataaagcctttgtgctgctgacagaagcgcgtcagttcctgggggatagcggctgggttttccctggaaaaaacacggataatccggttgcagaaccccgccgtctgcaaaaaacactctgtgaaacagcgggtatcccgccttataccatccatgagttacgccactcttttgcgacaatccttgtcgaaagtggcgcggatatccacatggtcaaggaactgctgggccacagtacgattaaagtcactgagatctatgtgcattccagtccggagcgatatcacgctgcagtcaatcaggcaatggacgttgttaattcgtaa

SEQ ID NO: 400634 - DNA, 240 bp, Salmonella enterica
atggcgcgtatggcaacgatgaaagccagccgttgcaggcaacgtgtcaccggacagggagaacggcttatccgactgaccatggccctgttttacggtcagacaatatctgttcgctacatcatccggcagtttgacgtgtctccccgtacagcaagacgggacctcacccatctggcctttgtgctggaatccgctggccctcacctctggcgactggctccctctctgaaaccctga

SEQ ID NO: 400635 - DNA, 321 bp, Salmonella enterica
atgattatcgaaaaaaagtatgcgcttgttgatacaactgcaagactcaacgctgacctgagagattatgaacgtgaaataaacaacgccgccagtataacatttggcaatgacctcattgaggtaatcgtatatcagttcagttttgtcatcaaagtcagaacgaatagtgaaaagatcaagcatggtcttcttgttaactttggtaaaaacatagcaagacaggtttcatccctttgtgaatccgcaatgcgatactacccgaatgaaagacataaaccgagccgtcagctttttagatgcataaataaaaactcgtga

SEQ ID NO: 400636 - DNA, 816 bp, Salmonella enterica
atgaagccaaaggcagaggcaaataagttatcaaagatcctgagcatttttttgggagaggataggtttcctgttgatgttgaatctttagcgctagagtattctaaagaaacttctcctagtgatcctatagtgaaaataaaaaagagtgatgttgataattttgaaggcgccttaattaaacatccaaataaaagccaatggatgattttatataaagaaaatattcgttcagaaggtcgtaaaagatttacgattgcacatgagttagggcactacatgttgcatcgtgctgaaatggatgaatttttatgtacatctatagttggtgagcaatctctatcagtccgcgatatagaaaatgaggcagatacatttgcatcatatcttttaatgcctttggatgattgtagaaaacaaacatctcatcagcaatttagtatcgaattacttattcactgcgccaatagatataatgtatctcttatggctgcagcgttgaaattgaaggaaattcttccaaagagaattgtagttgttgcagctagggatggtatgattttatgggcttcctctaaccaaaaagcatataaaagcaaagtatatatcaaaacaaaaggtgttccacctatatcaattccagagggttcattaatgtcctcattatcaacgaatcctgttggtgaaagtaaaaaacagccagcaaatttatggtttcctgatgaaccgaaagatttacatttaattgaacatgtgtttgttgcaactgaaggatatgactatactctgggtgtgcttgaacttgaaagtgaatga

SEQ ID NO: 400637 - DNA, 324 bp, Salmonella enterica
atgggttctacattgggtaataaaatcaatgcaaggcgtagggagttgaaatttagtattgataaacttgctgaattgtctggaacaagtaaaagctatatttgggagttagaaaatagggaaagctctaacccttcggctgaaaagatagaaaatatagcaaaagcattaggtgtgacacctcaatttttactcgaaagtaaaagtgctaatcctgatgaggatgtaatagatgaggcattctttaggaaatataaaggtctttcagatagcgataagaaaaaagtgaggaagttaatagatgtctgggatgacgaggattga

SEQ ID NO: 400638 - DNA, 663 bp, Salmonella enterica
atgaaaaataaattcataaaaatcaatgacaaagttgttgagatcgatgatctcactcctacaggggctcaaatccttcttgtagctggtgtcaaagacattgttgagtatgttctgttccagaagctgaaaaatggtttgcttgaagagattcgtcctgaagaaaaaacgactctcgataaagagggggttgaaacgttcctgatgtttaactccgatcgcacttatcgttttacacttaatggcaaaatgtttgattggggagcaccaagcttaacaggggccacagtaaaatctctcgcagagtgtgattttgacagtaatgacgtatggcttgaaatgaaaaatgagaaagacaaactcattactgaccatgaacatattgaccttactcagccaaatgttgagcgcctttatacccaggaaaccagtattaacatcattgtcaatgcaaaaatgcgggtcgtaaatcgccgcgtgattagctactgggatgttgttcatctggcatatgaacatgccgaaaataaggaaacatcaatctattctgtagattacgctaaagggccaattagcaatccagaaggctcaatggttgatggtcaatatgttcaattaaccgacgggatgattttttatgtcactcaaactgataaatcttaa

SEQ ID NO: 400639 - DNA, 1194 bp, Salmonella enterica
atgtcactcaaactgataaatcttaatccttgcctgaaaagacttcaggatgagggctatgaactcgaaattagagatggtttccttatggttcactcagtaccatatgtaaactccaataaagaggttctgaaagggacccttatcactaatctggttttagtatcacccgatgttgttggtaaacctaatacccaccaaatgtatttcaatggggaacatccctgccatcctgatggaagaatattaacagccattcagcacaccactccaaatcaaacacttgggaatggcatcatagggaatcattggttttccaataaaccaccgtcaggtagctatgatgattattatcatcaggttactagttacgttagggttattgagagccaagccaaagctattgatgaaaatgtttcagcgaaaacatttatttcgcattaccttactaatgatgaagacattttcacatatcaagatacagcttcagctcgcattggaactgttcagctcaacaatctaattgcaaatcagaaactagctattatcgggttgggtggaactggctcttatattttagatatgatatctaagacctgtgtaagtgaaatacacttatatgataaagaccaattccaacaacataactcatttcgtgctcctggagccgcatcgatagatgacttagaaaaaaaacaaacaaaatgtgattactattatcaaacgtatagtaatctgagaaatggagtcattcctcataatgaaatgctgtcagaaactaacttacatgaactaattaattatgattttatcttcataagcatagacagcgccacttcacgtaagatgatcactgattatctataccaacataaaatcagctttattgatgtaggtatgggattaagttttactgaagacaaaagcagtattttcggcacttgtcgttctacattatgtacaaaagatatggatgatacgcctttaaaatcactgccaaccatatcaagagatgatgaagtatacagatcaaatattcagttggtagaattaaactgcctaaatgcagcatttgctgtcatacaatggaaaaaactatttggtttttattgtgacgacatgagttcgtatgaaatgacttacagtttagggttaaacaaaatagcaaataaggttatggagagagtagaatga

SEQ ID NO: 400640 - DNA, 447 bp, Salmonella enterica
atgaaaactctatccattacttttactgaatttatccccgagcaattagaagaaggcatactgtatgtttcgatgccatattctacgatagctcatctctgtgcatgcggatgtaagaatgaggtaattactccactttctccacttgattggagtatgacttataatggaaaagaaatttcattacatccatctataggaaattggcaattcccatgtagatctcactattggataagaggcaataaagttgtctgggccggaaatatgcacaacgatataatagaaaataatcgtagtgcaaacttagcattaaaaatgaagaaatctgaaacaaatattacttcacataattatactgaaaccggcatgaacgataaacctaagcaaacctcttatttcaatcaattaatgaacacaattagagagtggttaggatataagtaa

SEQ ID NO: 400641 - DNA, 183 bp, Salmonella enterica
atgaaagatgagcatctggtgccgctgtcttctcaggccgttaccctgctggagcagatgcaggtatacggtcacgcggcaacaaggcctgctgtctttgcaggccgcagcccgtcaggtaaaaggcgcagaatgtcagcagatgcagatgagccggaatatctcggcgtgaaggagcgttaa

SEQ ID NO: 400642 - DNA, 447 bp, Salmonella enterica
atgcctgcccgaacattatgccagaaatttttccgtggcgctctgagcccgtttcatcaatatcgtcagaatgctcttcttgatgctaccgtggctttgacccgtggtgcatcacttactctgacaagcatcggtcgctaccttcctggttcagcacaagtcaaaaacaggataaaacgcgttgaccgcctgtcaggtaatacctctttgtatgaggatatccctttgatattccgtaatattacatcactccttactcgccagttttcctggtgtgttatcgctgtcgactggagcggttacccgtcccaggaatatcacatccttcgtgccagtcttatctgtgatgggcgttcaatccctctgcttagtcggcttgtaccttcagcaaagcaaaataattcgctgatacaaaagaatttctcgatgaacttcaccggtgcgtaa

SEQ ID NO: 400643 - DNA, 447 bp, Salmonella enterica; identical to SEQ ID NO: 400642

SEQ ID NO: 400644 - DNA, 471 bp, Salmonella enterica
atgaacaagctgaaagaggatgttcgaccgatcgttagcatcattgctgatattatggttaataatccacggacatttccatcttgtgcattggtattaagtaatgtactaaaatttttagaagatgatgatgagaaagtagagttaattgaactgattaaatataaatttgaacctatcttggggactgggattttagatatctggctacaacgtatctcttatcacattgatagcgatatagaatataaagagaccctttgttctatcgtatctggcgcacacgataaaccacatgagcatgtttggaattcggagtggattactgacaataattttaagaacatagtgatggctaccacttttattgattctgaaaagcttgaagactgcgagccagtaatacctgaagatgaagttgtgctatatccttatgatagtgactatgattatgaggaagaagaagagtag

SEQ ID NO: 400645 - DNA, 399 bp, Salmonella enterica; identical to SEQ ID NO: 396846

SEQ ID NO: 400646 - DNA, 1197 bp, Salmonella enterica
atgaaaattataattgcaggaaaaaatgatatagcagtaaatgttacaagatggttacagaaaaaaaagaaaaatatagaaatatatgctatttgtaatgcgaatgatactggaatagataccttccagcgctctttcaaaaagtattgcaaggataatttgattccaattatttctcttgctgaagcatataaaatcgatgatgctatatttctttctcttgaatttgataaaatagttcagccttcaaaatttaaccataatgaattatttaacatacacttttcatatttacctaaatataaagggatgtatacttcagcatggccaattctcaacggcgaggacacaagcggggtaacattacataaaatagaccatggtattgatacaggggcaataatagcccaaaaagaaattataattcagccatttgaaacagcaaaagatttatacgaaaagtatatatctgaggggacaagtcttgtaatcgacaatataagcacactactaaatagcgagtatgtcgaaaaagaacaaaatataaaatattcatcatactactccaaaaaaactattgattattcaaatttagaattaaatttttcgaaaacggctttcgaaataattaatcagttacgtgcatttacatttagagaatatcagttgccaaaattagacggagtgaatatattccttggggatgttttgtcttcaagatctattatgaaacctggttctatattagaacgaaatgataaagaaattattgtgtcaacaattgattatgatgttgtactttataaagataatttcaaagaaatattggaagcttgtaagtatagtgattctaaatatattgctaaattaatcagagcgaaaagtattttatttgaaaaaaatatctatggatggagtcctgtaatagttgcagcctatcatggtaatattgaactaataaaatggttagtaagtaagggggcaaacattaatgatagaaattacaaaggaactacagtagccatgtatttcaaagattatatgttaaaaagcggggactattcaggattaaaaatgcttatagacttagggttggaccttacactaactgattataaagattacacggtttttgattatttagaaaaaagtgggaacaaaaatctatttcaatatatgatggagtttatgaaatga

SEQ ID NO: 400647 - DNA, 597 bp, Salmonella enterica
  misc_feature (474)..(483): n is a, c, g, or t
atgattgaattcttaaaccttaaaagaataaatgaacaatataaaaaagaattattagaagcttgtgaaagagtaataagttcgggttggtatattttaggtaaagaattaagtgagtttgagagtaattttgcaaattattgtgggacgaaatatgctataggggttgctaatgggcttgatgcactaaatttagtactccgtgcgtggaaaataatggggaaaattacagatggagacgaagttattgttcctgcgaatacttatattgcaacaattttagcaataacaggtaataatctaaaagcaattttaacagaaccggataaaaatacatttaatctatcttatcattctatagaaaaggctatcacatcaagaactaaaataattctccctgtccatttatacgggcagatcagcccaatggaagagattatgcagctagctaaagaaaataaccttttagatctnnnnnnnnnnttctcgaagacagcgctcaagctcatggggcatctattaataataaaaaggcaggttcatggggcaatgccgctggttttagtttttatccaggaaaaaatttgggggcattag

SEQ ID NO: 400648 - DNA, 1149 bp, Salmonella enterica
  misc_feature (1101)..(1137): n is a, c, g, or t
atgactgattctattgctatttttcaccctagccatcatctggggggaaccgagattttattttcaagattaattgatgaattagtacgaactggtttttcagtatccgtaattgattacggagatggtgttttgaaaaataatttaaggaaaaaggatgttgcttattatgactatgagatctgtcgggaaggggagaattggcgtgatttggttagagctaatatatttgtagtaagtgcaagaaatattattcgatatctttttttgtgcataaattacaagcaatataatacgcgtgttatgttttggcagctacatccatcggaattatattcagggcaattcccgtttactgcacgtgttaaaaaattactgggttataatggattgagatttttcctgcaattaatgcctgggataaggggcgtttgtcagataattaatgagctttccattagtaataatctaaaaataatggatgaagcttgttatatggagtctacatggattctcaattgtaagctaaaaaagaattaccttccgttgttaacaggaatgaaagaaataaaaatacaaaagggacactattataagagaccatgcaaagtaaaaaatatagcaattataagtcgcttggaagaatttaaaacatatggtgtaataaaagcaatagaagatattttagaaattaacgacaaaatatatatccatgttgttggtgatggtaaagatagatttctgattgaaaatatttttaaaagtaaaagcagagtatttttttatggatttataaataacttagaattaaatcagtttttttgtgagcatgctatagacattctttttgcgatgggaacctctgcccttgagggcgcatcacgtggtattccaacagtacgattaccttgcttggataaaccattaataaaaaaaaatgtctataagtttattcatgatcagaatggctattctttaggtgaatatctagatacaccattttgcagtgaaggttattactcaatgaatgtagtttttgaaaaaattaaccaagataatatatgtgaatcaacaatacaattcttcaataattattatgcnnnnnnnnnnnnnnnnnnnnnnnnnnnnnnnnnnnnnacttgtgattga

SEQ ID NO: 400649 - DNA, 189 bp, Salmonella enterica
atgcataaacaacttattgctcatattgtagaactggaggggctgtttatccagtatcgtgaggcactatgtcaggaagaaactcagttcagttttgtctataagatagaaacgttactgtgtacagcacacatctgctccgaaagaagagtgaaacacgtcagtacgaaagtgaacactggatattaa

SEQ ID NO: 400650 - DNA, 525 bp, Salmonella enterica
atgtgccgtggctgtacgttacatcaggatgagatactgatatgtgtattacatatctgttgtcagagacgaataatatacggatgcaatggttttaaggcttgtttatttttggcttcagtttcggagaaactgttaagactaaaaataaacaagtggagcgcggaaagaaaattcggtttcgaagaaactgttaattttcaggcaccgcgtccacctgcgaacattcgcccaaagcgaattgagcaggacggtgtgccgtctttgaccctggggggttctggcccggcgtccagccgggacattacccccatgtgtcatgcagggagggcgtccagcccggacgaaatggcacacgccgttgcccgtaatccgggcgtttcaggagacagacgaccacgggtcggatgtattctgaaagcgcggagaagggacatccacaggttaagcgcgcactgttttttcagccgtttatcggagcacggtatgggagcagcttatggagacagggttatgctcccgtga

SEQ ID NO: 400651 - DNA, 1290 bp, Salmonella enterica
  misc_feature (492)..(501): n is a, c, g, or t
  misc_feature (1259)..(1268): n is a, c, g, or t
ttgtcaggaaccactgataacggtgcaacaatacagctgacctttgatggacaaacctacacaatcattgccgacagtaacggcaattggagttttacacccgcagcctcccttcacgatggtgtatatgcattcactgcacaggtcacagaccttgcaggtaacactgccagtcacgcaggcaacttaaccattgattcgcagattccgacagttacagctaatttagtaccggctacggactctggtcttagcgatcacgataacataacgaataataagcacccaacattgacaggcgttacaaaagctaacgctactttaaccatcacgcttgatggccagcattatagcgttatagcagacaaggaaggcaggtggtcatggtctgtacctgattcgataacacttaatcagggattgaactcttatgctatttcagtttctgatgcagccggtaatactacaaaagtacctttcgctggcagtttnnnnnnnnnnaccctacctcccacatcaacaatcggattcgatcctgaatataactccggggataaagacgatgccattacgaatgtcaatactcctgtttttattggtcaatcagaacctttttctcaggtcacagtgattgttgataatcatacttatagtgttcgcgctgacataacaggggcatggcgtttagaacttcttgaggaattgcatgacggaacttatgacgttgagatatacgcaacagatcttgcagggaacgtcagcattgacaaaactatctgggcattcgagatcgatacttccataccgacagccacggccataatagaagcggcagatgatactggtgtaagtgacagtgatggtgtaacgcaaaataagcaaccaacatttactggcgtcacaacagctaatgcagacattactctcaatatcggcggtaatgaatatcatactgttgcagatgataatggtttatggcgaatcagtttgcccactgagcttacagataatgtttactcctatgatgtgactgtagtaaacaaggccggtacaagtgcaacaacaactggtacattagttattgatacgatctctccttcatccgatgcttcactcagtaaatcaagtgatagtggtcaaaaccattctgacaatattactaatgttgtcaagccgactctgacaggaaaaactgaaccatattctataatcgaagttcagtttgagggaaatagctattcaccaacggttgcagcagnnnnnnnnnngcagatggtgaatggatcctga

SEQ ID NO: 400652 - DNA, 714 bp, Salmonella enterica
  misc_feature (602)..(632): n is a, c, g, or t
atggataccataaccaacctggcccgacctatgctgagtggtgtagctgaacctggaagcatagtcactgtttgtatgtcaggtaataaatatgtagcctctgtcgacgatacggggcgctggacattcacactgcctaaagatgctgttgcgggaataaacaattatagcgttacatccgaagaccttgctggtaataaaacaatcttatcaggcaactttacatatatttcatcaggcattcttcctcccagagttaccgtacagcttgctcccgacagcgatagtggcgtaattggtgatgcgataacaaatcactcaacaccaacatttatcggaaatgcaacaccgggatgtcttatagttctggtcattaatggctatagttataccactacagcctcagctactgatggctgttggtctattgatgtgttaaatactctaagagaaggctatagtgattatatagttacggcaacagatccatcaacgtcattatccaccacattaaattccggtatttacatcgataccctgaatcctaatgttacgataaatctgaccgacgatacggataccggtatcaagggcgatatgannnnnnnnnnnnnnnnnnnnnnnnnnnnnnnagaaaacaaatatttacggggaaaacagaagcaggcgcgaaagtattactacatattgatgacgaagatatcagcaccatag

SEQ ID NO: 400653 - DNA, 420 bp, Salmonella enterica
atgattttacttatgtcagctttgctcgctaacttattatccgtgtctttggataaagaaaaaaacaaaagcaaactgaactttgcatctatttctcaggttgagaagaaggataagaactcgaaaggtagtcaagcacagaaaggtcagggagatgacaaaaatggacaaagtggtatatctgtttctggattgtttttgacaccacaaatccttaaaccattcgattactcaccaaatccaattgctatagaatgttcttttggtagtaatctaagttatgaagtagccagaaaatacttgacatacaattatatagtttccaaattaatgtttaaaaataaaaaagtgatagttttaccacttgaagaaaaaaacaatgaaaataatacttgtattattaaagagattacacgatga

SEQ ID NO: 400654 - DNA, 267 bp, Salmonella enterica; identical to SEQ ID NO: 381656

SEQ ID NO: 400655 - DNA, 237 bp, Salmonella enterica
atgacaaggatcattgaaatctactcacggcttgacgctcttgatgagtttttggcgctcatgctgaaacagcccgacaactaccgcgaacgggcaataagcgaacgtatatccgcgctggtgaatatgttgatcacattaacgccgcgatgtggaggcagcaggaacgggacaggcttaatgattttgatgcacgctacatactgcccgccgtttctgaaatatggttacaggtaa

SEQ ID NO: 400656 - DNA, 393 bp, Salmonella enterica
atggcgatcctgaaacaaactgaagcgctctccggacatctggcgtttattttccccggcgaatacgatcaggacaagtgcatgagcgacaacaccatcaacaaagcattgcgcgtgatgggctacgacacccgaaaagagatctgcagtcacggcttccgggcaatggcatgcagtgcgttaagtgagtcgggacggtggagcaaagaagcgattgaaaagcaaatgagccatcaggaaaggaacagcgtccgtgccgcctatattcataaggcaaaatatatggaggagcggatcgctatgatgcagtggtgggcggattatcttgataaaaatactgagcgatatgtgtctccttatcagtttgcgggacaccagaggcaagcgtcatag

SEQ ID NO: 400657 - DNA, 393 bp, Salmonella enterica
atggcgatcctgaaacaaactgaagcgctctccggacatctggcgtttattttccccggcgaatacgatcaggacaagtgcatgagcgacaacaccatcaacaaggcattgcgcgtgatgggctacgacaccagaaaagagatctgcggtcacggcttccgggcgatggcgtgcagtgcgctgagtgagtcgggacagtggagcaaagaagcgattgaaaagcaaatgagccatcaggaaagaaacagcgtgcgtgccgcttatattcacaaggctgaatatctggaagagcggatcgctatgatgcagtggtgggcggattatcttgataaaaatactgagcgatatgtatcgccttatcagtatgcgggatatcagagggaagcgtcataa

SEQ ID NO: 400658 - DNA, 447 bp, Salmonella enterica; identical to SEQ ID NO: 395965

SEQ ID NO: 400659 - DNA, 438 bp, Salmonella enterica; identical to SEQ ID NO: 396624

SEQ ID NO: 400660 - DNA, 207 bp, Salmonella enterica
atgagtaaaatcagggtattgtcagttgatgattccgcgctaatgcgccaaatcatgactgaaattattaatagccatagcgatatggagatggtggcgactgcgccggacccgttggtcgccagggatctatcgcctcagcgaactgaaaacgttatcgccgcagcagctacaacgttacttcatgcgcggtacggggccgcatga

SEQ ID NO: 400661 - DNA, 2961 bp, Salmonella enterica
atgaaactacattttgaatctgaccttacctatcagcaaaacgccataacatcggtctgtgatttgtttgaagggcaagagaaatgggaaagcgaaatgactgtgctggccccagctcagggtgcactctcatttgaaggcgcaacaggttcaatgcctgttaacccacaaatacccgaagatgatgtactgcttaaaaatctgaacaatgttcagttaaaaaaccagcttccaccttcacctgtgctcgacagccatgattttactgtcgaaatggaaacagggacaggtaaaacgtatgtttatcttcgcaccatgctggagctgaataaacgctatggcatgagtaaatttattattgtggttccttcagttgctatcaaggaaggcgtttataaaacactacaaataactgaagaacattttaaaagcctgtttgcgggagttccatacgaatactatctgtatgattcggcaaaacctgcggatgttcgaaattttgcaaccagttctgttatgcagatcatggtaatgactgtgggtgcgattaacaaaaaagatgttaacaagctctatcagtccagtgaaaaaacaactgtggacgatctggataagcccattgatttaatccgtgctacacgtccaattattattgtcgatgaaccgcaaagtgttgatggtggcttgaacggtgcgggtaaaaccgcacttgatgctatgcaccccatgttcaccttacgctattcagcaacacatgttcataaacatcatatggtgtaccgccttgacgccattgatgcttacaaccaaaaactggtcaaacagatcgaggttgccgggcttgaagtccaaaatgcaagtaatagcccctatgtaaaactggtcagtattaacaataagaagaatagcattagtgcgactgttattgttgatatagccgataaaaaagggaacgtaaatcgttcagagattaccgtatatgacggtatgacactcgatgacgaaacaggacgtgatatttatcagggttaccggataagcgagatccgaactggcaaagagggttatcttacactggaaacaccttctgatacctactatatgaaagtcggtgatgtcgtgggggatattgaccctatgctcatccagcgtcatatgatcagacgtacaatccgtgaacatctggataaagaacttcgcctgaatactcagcaaatcaaggttcttaccctgtttttcattgataaggttgatttatatcgtcagaccaatgaagaaggagtacgtgaaccgggtgaatatgcccgtatctttgaagaagaatatcttaaagcaatcaaaagccctgcctataaagatttacttccttctcatccagaacatgccaaagatgttcatgatggttatttctccattgataaaaaaggtgcatgggctgaaacaagcgaaagcaataatacaggccgtgaaaatgctgagcgtggttataatctcattatgaaaaataaagagaagcttttgagtttctcgaatccagtgaggtttattttttcgcactctgctttgaaagaaggctgggataaccccaatgtattccagatctgtagcctccgagagatgggaagtgaacgagaacgtcgtcaaacattaggccgtggtcttcgcctgtgtgttaaccaagagggtgaacgtgttcgtgatgacagcattaacattctgacagtcgttgccagtgaaaattatgaagcctacgctgaacgattacagtctgaaattgagagcgaaacaggcatacgttttggtgtgattgaaaaagatgcgttcgcccatcttatcttcgctgattcctcacaaggtttaggtatttccggttcacatgatatctggtctgaacttcagactgaaggttatattgaaaaatcgggaaaaattaccaaaaccctgaaaaaagaattattcgaaaacacttttgttgttagtgagaagtatgcctcactacaggaacaaattgaaactatcctgcgtaaatcagcagggcgactcaatataaacaatgctgatgaacgtaaaacaatcaaataccggaaagaagtcttaaacagcccggaattcgaagcgttatggcagcgcatttgtcaaaaaacgctgtatcggctagcatttgatgaagaagaattgatcaaatcctgtacgaaatcactttctgaaatgcagcctgtagcaaaagcaatggtcagtttcagcaaagcaacaatcaaacaaagtcaatctggccttgatgttaaagctctgtctaatggaacaacaagctctgtagttgatgttgcagagcagccattgccagatattcttggtgttctacaggaaaaaaccggactgacaagacgcagtttaagcaccatcctgaaagagagtggaagactcgctgattttgctaaaaatccacagcagtttatcagtgaagctataggccgaatcaactactgcaaacgcctgtcaattgttgatggtattaaatattatccactaaaaggagaggtgtatgcgcaaagtctctttatggataaagagctaacaggatatgcccgtaatctttttgaaacctcgtctaagtcagtttacgaatacgttcctaaagattctgaagtcgaaagccgtttcgctcaggaactcgaagaacaggatgaagttaagctttatgtgaagctgccgggatggtttaaaatcccgacgccactgggaacctacaatcctgactgggcgttagttattgaagacaatggtgaagaacatatttactttgttgtagagacaaaaagtaaacacattggtcttggtcatgaagaagatgcgaagatagcctgtggaactgcgcattttagtgctttaaaagcagaaaaaatcaatgcagcaaaatatgttcgagccacagccattacagaaataatgagcagcctttaa

SEQ ID NO: 400662 - DNA, 1803 bp, Salmonella enterica
gtgcaaaacctgaaagatgtcctgaaagaggtgccgggcgtacagctcactaacgaaggggataaccgtaaaggcgtgagtattcgtggtctggacagcagttatacgctgatcctgatcgacggtaagcgcgttaactcccgtaacgcggtcttccgccataatgattttgatctgaactggataccggttgacgctatcgaacgcattgaagtggtgcgtggccccatgtcctcgctgtatggctccgatgcgctgggcggcgtggtcaacattatcaccaaaaaaattggtcagaaatggcacggcagcgtcacggttgactccactattcaggaacatcgcgaccgtggcgatacctataacggtcagttctttaccagcggtccgctgatcgacggcgtgctgggaatgaaagcctacggtagcctggcgaaacgcgaaaaagacgagcagcagagttccgccaccaccgctacgggtgaaacgccgcgcattgaaggatttaccagccgggatggaaacgtcgagtttgcctggacaccaaacgaaaatcatgacgttaccgcaggctacggttttgatcgccaggaccgggactccgactcgctggataaaaaccgactggaacggcaaaactacgcgttgagccataacggacgttgggatctcggcaatagcgagctcaagttctacggcgaaaaggtggaaaacaaaaaccccggcaacagtagccctatcacgtcagaaagcaattcgattgacgggaaatacgttctgccgttagcgtctgtcaaccagttcctcaccttcggcggcgaatggcgtcacgataaactgagtgatgcggtgagcctgaccggcggttccagtactaaaacctccgccagccagtacgctctgttccttgaagatgagtggcgcatcttcgaaccgctggcgctgaccaccggtattcgtatggatgaccatgaaacctatggcgatcactggagcccgcgtgcttatctggtctataacgcaacggataccctgacggtgaaaggtgggtgggccacggcctttaaagcgccgtcgctattgcaattaagtccggactgggcgaccaactcctgccgtggcggatgccgcattgtcggtagcccggatctgaaacctgaaactagtgaaagctgggagctcggcctttattaccggggcgaagaaggcatactggagggcgtggaagcgagcgttaccacgttccgtaacgatgtggacaatcgcatcagcattagccgtacccctgacgttaacgccgcgcccggctattccaactttgtcggcttcgaaaccaacagtcggggacagcgcgttccggtcttccgttattacaacgtgaataaagcacgtattcagggtgtggaaaccgagttgaaagttccgtttaacgaggcgtggaaactgtcgttgaattacacctataacgacggacgcgatgtcagtaatggcgggaacaagccgctttccgatctgccgttccacaccgcgaacggtacgcttgactggaaaccggcgcagcttgaagactggtcattctacgtatcagggaattataccggacgtaagcgggccgacagcgcaacggcgaaaacgccgggcgggtacgtggtctgggataccggcgcggcatggcaggcgacgaaaaacgttaaactgcgtgcgggcgttctgaacgtgggcgataaagatctcaaacgcgacgactacggttataccgaagacggacgtcgttactttatggcggtggattaccgtttctga

SEQ ID NO: 400663 - DNA, 375 bp, Salmonella enterica; identical to SEQ ID NO: 376820

SEQ ID NO: 400664 - DNA, 663 bp, Salmonella enterica
gtgatccggtgcatcctcacggattttctgcagccagcctttattcacatcctgcagcagcgggttttcgctacggttggaggttttcgcacgcttcacgccgttaaagccgatcatgatgcggtccagtgcctgacgtttcacgatggcgtcacggatacgcacctggaaatcctgaaacttcgcccacaggtccagcttcgcgtaggtcagcaccgtgtcaaagttagtctgctcgcatttatattccacatcgaccatcagcgtcggatcgacaggttcacgctctttcgcggtggtatcagtggttccggcaatggtgctgccaacacccagccccagcaactgaccggactgctcagtcactggcgtgacgttaatcagtgtcaggaaagcggcggactgctggatctggtcttccagcgtctgctgcacggacggttcgacggtgaacttgctggacagttcttcaactgcaacaccgttcagacgcgccagctgctgcaggtaagcgttaaaagcaaagcgggtattcttcttcatcgggttttgtgctccatcagcaattggtcagagtgtcagcgggggcgttaccgcctgttgcacgctggcggtagtcctggcggctgtcttcatgactcagcttattcaccagttcgttaa

SEQ ID NO: 400665 - DNA, 165 bp, Salmonella enterica; identical to SEQ ID NO: 377078

SEQ ID NO: 400666 - DNA, 903 bp, Salmonella enterica
atgaatgctgccctgactgaacgactggtttatgtcgcccgcgcggcacgtgacgcggggcatggtaaacgcggtgcaatatacgacgctgcctgtgctgaacttggcatgtcccgcgccactctgctgcgcaggctgaaggaggtctctgtgactgataaacgcaaaaaacgcgccgatgccgggcgcagcgccctgacccgcgacgaagccgcgctgatatctgccacactgcgtgaggccacccgcaagaacggtaagcgtctctattccatcgcggatgcagtggaaaccctgcgggctaacggctttatctccgcaggcagaacagatgaaaccaccggtgagtttttcccgttgtccgaagatgccatcagccgtgccctgcgtaactatggcctgcacccggaacaactggatgcccctgcaccatatactgaagtggccagtctgcatcccaatcatgtctggcagattgatgcctcgctctgcacgctttactacctgagcaatggacataaagggctgcaggtgatggacagcgcgaagttctacaagaacaagcccgctaaccttgcccgtatcgccagtgaccgcgtgtggagttacgagattaccgaccatgccagcggctggatttacgttgagtatgtgacgggggcggaatccggtgagaacctgtgttctgtgcttatcaacgccatgcaggagcgtggcggcgcagacgtgttgcacggtgtgccgaaaatactctatctcgaccccggctcggcaaacaccgcgggtatgacgaaaaacatgtgtcgctcactgggcattgacctgatagcgcacaagccgcataacgcccgcaggtggaaaaggcgcgtgacattatcgaacgcaagctggagccgggtctga

SEQ ID NO: 400667 - DNA, 456 bp, Salmonella enterica; identical to SEQ ID NO: 381524

SEQ ID NO: 400668 - DNA, 885 bp, Salmonella enterica
atggaacgagcccatcgtattgatctaaagctattacgttatttcctcgctgttgcagaagaattgcattttggccgggctgctgcccggttaaatatgtcacaacctcccttgagtatccatatcaaagaacttgaacagcaactgggtacattgctgtttattcgtcattcccgcagcgttgcattaacccatgccgggaaagttttaatggaggagtcacgtcgcttgttagccaatgcaaatcaggcgctggcgcgagtggagcagattggtcgcggtgaagcggggcgcattgaactgggtgtggttggtacggcgctgtggggaagaatgcgtcctgcgatgcgtcactttttgaaagcaaatcccaatgttgaagtactttttcgcgaaaagtctccaggtatgcaaatggcgttgttagagcgtcgggaacttgatgcagggatctggcgtatggctatcgaaccagcagtcggttttaccagcatacgtttgcatgaatctgcattcatggttgcagttccggaagatcacgatctggcatccagagattctgtgccgctgtcggcgttgcgcaatgaatattttgttacgttgccttccgtacattctgattggggatttttacaacgtgtatgccaacaggcgggtttctcgccaatgattattcgggaagtggttgagccgcaaacggtgttggcgatgatcagtatggggatcgggattacgttgatggctgatggctatgcgcaaatgagctggccgggtgtggtgttccgtccgttagaggaacgtattccggcggatttgtatattgtgtatgaccagcagcaggcaacgccagcactggagaaactggtggcggcgttgacggtatga

SEQ ID NO: 400669 - DNA, 627 bp, Salmonella enterica
atgctatatgtcaacaacattaacgcattaaataattaccgtgaaaaacattcagataataacttacatggccccctccttttaaagctaaaaaattattttcatcagcataataaattgatggttataggacaggaaacctatggatggtgcaactctcccgatattaatgaacagcttgaaacatatgaggagttcgattttggcgtatcatattatagcagtccattctggaatatcataaggaaagtagagcgagcgcttggtattgaaccatatgcaattgcatggtcaaatctgaatcggtttgatgttgattgcggatcaccagattataccgagctagctagagatatatcatcgtttgattatatattaaaggaggaaattaatattcttactcctgatatatgtgttttcttcacaaatcataaatatgattatcgactaacgtctttatatgaagatttaatgtttgaaaacataaatggattgccagaaaaacatttcgtaagattataccatccagacctcccagaatatacgattagagcgcctcaccctaaaacaatcagaataaaaggatgggaaaatgatttcataaaatatatagaggctattaaatga

SEQ ID NO: 400670 - DNA, 1512 bp, Salmonella enterica
atggctatttttcatcttgattttaaaattgtgaaacgttcagaaggcaggtcttccgttgcgaaggctgcctatcatgctcgtacaaggataacagatgaaagaacaggtgatacctatgattatagtcgccgtactgatttgtacgggcatttcatattagctccagctaacgcaccagaacacatcgtaaaagactctacagcattgtggaatgaagtggaaaaagttgagcgccagaacaatggtcaaacatcccgttatttcgatgttgctattcccaccgagttaaacaatgacgacaagaaaaaacttgtccttgagtattgtcagaaaaatttcgttgataaaggcatgattgccgacatcgcttttcatgatcttgatagcgacaacccacatgctcacgttatgttgacgttaaaagccataggcccggaaggttttggtaaaaaagaaagaagctggaacgacagaaaaatgtctgtgttgtggcgtgagtcatgggcatctatggctaacagctatctcgaagccgcaggttcatcagaacgtattgaccatcgttcccttcaggcccagcatgaagaggcattagaaaaagcggcggctgctctggacaatgaagaacaagcgctatggcttgctaaagccgctgaaacaaaccgccctgcaatgaaacgtatccatagtgccaaatggcgcagtaaagctgctcaagagcaaagagccgcagaacaggctgttcgtgatgctgccaagcaagaagccgttgaagtctacaaaacattcagcgaacttgatcttgaaatcgtcgttgatgtcagaagctttacgattacacatcttgctgaaccagaagaaattgttttaccagaaacgcgatccagctcttctacaaatgaagaacaaagacctttactggtagcaccagctcctgatactcgtttgcgtggagtcaaatcttaccgtgataaaacaaaagtcagtaaggttgttgcttgtattccgccatcaatcagtatttctgattctggtacaaatactattctgaaaacatccacctctcaaaacccaaacagggcatccagaagcgcccctgaccatgaaagaaaggataagactactccacgtcaggataatattttcaaacgtttcacaactcttgtcatagatttcttcaaagaaaaatttgtatggcctagatcaagcagagttaagcatgatcctgtcagtacagaacatgataaacgtattgctgaaaactatgtctttgatgaagtattaggtcatcatgtttctcgtgctgaatatgagaaacaagctaagtttaacagtgatacttacaaaccaacacctgatgagattcgacgtttcccaagccgtcctaagcacgaacgagtcaatgcagataataacatggattttataccgactgtttcaacaataaatgataaaaatcatactcctcgtttaaggccacctacacgccgtggcctagataaactatag

SEQ ID NO: 400671 - DNA, 465 bp, Salmonella enterica
atgaagtttgttgcgccagaacaggcaccggaacaggcggaggtcatcaaaaatacgccgttctggcctgatgtgaacctgtcggaatttcgcagtgtgatgcgcactgacggcacggtgacgcagccgcgtttaaagcaggtcgtgctgacggcgatctctgaggttaacgctgagctgtacgacttccgcaaccgtcagcagatgctgggctggcggacacttgctgaggttcccgcagaaatgctggacggtaaaagcgagcgtatccggcactaccacaacgctgttttttgctgggcgcgcgctgtgcttaatgagcgttatcaggactatgacgccacggcgtcaggcgtgaagcgaggggaggagctggcggaggccagcggcgatctgtggcgtgatgcccgctgggccatcagccgggtgcaggatgcaccgcactgtacggtggagcttatctga

SEQ ID NO: 400672 - DNA, 651 bp, Salmonella enterica; identical to SEQ ID NO: 377161

SEQ ID NO: 400673 - DNA, 465 bp, Salmonella enterica; identical to SEQ ID NO: 377162

SEQ ID NO: 400674 - DNA, 204 bp, Salmonella enterica; identical to SEQ ID NO: 377264

SEQ ID NO: 400675 - DNA, 300 bp, Salmonella enterica
atgtttctggagggcgtgggactcgccctggaagacgattgtgaaatcgcggtatgcgcatattggcagggtgagatagtcgggtgcggttctctggccgggagcgtactgaaatgcatcgccgtttccccggttttacaaggggaagggctcagcctcaaactgctgaccgagctgcttacattggcctacgagttaaaccgcagcgagcttttcctgttcactaagccgcaaaatcggttgctgttttctggcgcgggttttggcccattgcgcaggcaggtgagctggcggtgttaa

SEQ ID NO: 400676 - DNA, 189 bp, Salmonella enterica
atgattgataaagagatcgcgcggggagaactggtggaactgctggccgataaacgtctgccggtagaaatgcctttcagcgccgtttactacagcgatcgcgccgtcagcacacgtattcgggcatttatcgactttttgagcgaatatataagaacagctcccgcaggagctgtgaaagaggggtaa

SEQ ID NO: 400677 - DNA, 447 bp, Salmonella enterica
atgccgtttacatttcatatcggaaatcatagttgccagatatcagaaaggtatttaagagatatcatcgataataaaagagaacatgttttttcaacgtgtgagaaatttatagattttttcaggaatatatttaccaggcgaagtttaatttctgattatagagaaatctataatctactgtgccaaaaaaaagagcatcccgatattaaagggcctttctctccaggaccattttcgaagcgagatgaagactgtacacgatggcgcccccttcttggatatattaaacttattgatgcctccagacctgaaacaatagataaatacactgtagaggtattagcacatcaagaaaatatgttactactacagatgttttacgatggagtattagtgaccgagacggcgagacggagtgttctgaacgttgcgtcgattttttaa

SEQ ID NO: 400678 - DNA, 294 bp, Salmonella enterica
atgaaaactacctacagctatgactttcaatacctgtgtaaaggggacatgcgacctcttgacgatggagatattgtaggatgttcttctgaagacaatacgcttctgatgcttccgaatgtgggggattatgtcgacattaccaataaggaaggccgtgagtcgtttggtgggaaagtgaaaacaaggctattcagatatactcgtgtgagtgaagaccatgttatttgcaacatcaatattgttgttgaagaggttgaagactctgtgtgggctacacttgtaaaagagtaa

SEQ ID NO: 400679 - DNA, 354 bp, Salmonella enterica
atgcctaaacagccacctattgcaaaagccgacctgcaaaaaacacagggagcacgcaccccgacggcagtgaaaaataacaacgatgtgatcagctttatcaaccagccttccatgaaagaacaactggcggcggccctgccccgccacatgacagcggaacgcatgatccggatagccacaacggaaatccgaaaagttccggcgctgggtgactgtgacaccatgagttttgtcagcgccatcgttcagtgttcccagcttgggctggagcccggcggcgcgctcggtcatgcctatctgctgccgttcggaaacaaaaacgaaaagtcaggcaaaaaaacgttcagttaa

SEQ ID NO: 400680 - DNA, 459 bp, Salmonella enterica
atgatcgaccttgcccgccgttccggacagattgcaagtctttccgcgcgcgtcgtccgcgaaggtgacgatttcagcttcgagtttggtctggaagaaaagctggtacaccgtccgggtgagaacgaagatgcaccagttactcatgtctatgccgttgcccgccttaaagatggtggcacacagtttgaggtaatgacccgtaaacagatagagctggtacgggcacagagcaaagccggtaacaacggcccgtgggttactcactgggaggaaatggcaaaaaaaaccgccatacgccgcctgttcaaatacctgcctgtatccattgagatccagcgcgcggtatcaatggacgaaaaggaaacgctgactatcgatccggctgatgcatctgtcatcacaggtgagtacagcgtcgtcgaaagcgctggcgtggaagagaacgtgaccgcataa

SEQ ID NO: 400681 - DNA, 126 bp, Salmonella enterica
atgccaatgatggccgagacccacatccagaataccgcgccgggaccgcctgcggcgatagccagcgccacgccggccagattaccgctgccaatccgcgccgcgaggctggtacacagtgcctga

SEQ ID NO: 400682 - DNA, 678 bp, Salmonella enterica
atgtatccgacggatcgtagtcaattaaattctgaacgtcaaacatatttggacggaaggaatcttgtcgatatgatttctactcctgcttgtatcagaaatagcgagggagattttataacctgcaacgtaaaatttcatgaggaaatcatacaacgatctgatgtaaaaaattggatttactctctccctgttcagatttctactgaactggtaaggaaagaacttgatgcaatgtctttatcatcatctatttttaaaattaaaaatgttaatttaaacggtaagttttggtgtgttcagtttttaccattacttttcggtaataaattaaatgtattgtggttatttttcaatgattgtcttaatataaaaaaagagtttaataataatatttattcaaaggagaatcatgagaaaatcatagcgtttaaacagtgggctacaagaacacaatggagagtttttttactttattcttatgggtttaaacatgaatcaatatcttccttattatcaataaaggaaggcgtgtcacgaaattctataacagaagttaataagttttttggttcaaactcaaagtataatttattaatgatatttcatacaagcggaatgtatgatttgtttttgaaagagttatacgatatttttcataatagagaaaacaattag

SEQ ID NO: 400683 - DNA, 312 bp, Salmonella enterica
atgggattatttgatcgaaaactggatatcagcattactgcccacaatcagatttttacttccgttcctccacaaatgaagattgtgaaaaattttggtctagtgaaagcaactacggcagaaataactttcaaataccgtaatgaagacgatgaactgctttctgcattgttctctgaagcgaccaaaataggagctaatgcgataattaacttacgatatacttcaggcgcataccaaagaaacgggcatggttttgtcacaagttacctaatagctactggtgatgctgtactgctggataatatataa

SEQ ID NO: 400684 - DNA, 147 bp, Salmonella enterica
atgataatgatgcaggttaaggaggccacggagaagaacgtgacagtaattccgggcggcgcgggacaggaaaccctggaaaacgcggccgtgctggagcgtaatgattgtgccaccaccagggaaggcaataacaatttatcctga

SEQ ID NO: 400685 - DNA, 303 bp, Salmonella enterica
atgagactcaggaaaggtcatggattgacgttggtcacacttgcgtgtttatccctgctgggctccctgccagctattgcggcaccgtccgttcaggccggtttttcaccggagggcagcgcagagcagctggtttttaagactattgaggctgcgcaacataatatccggctgatggggtattccttcacctctccggaggtggctggcgctcttattagtgcaaaacgtcggggagtggatgtcaggggggactggactggaaagccaatactgggaaaaacaataacgccagctgggtga

SEQ ID NO: 400686 - DNA, 726 bp, Salmonella enterica
atgttctacctcaccgaacaaaagctgtttcatatgctcaatgagcagtgccagtgtctttattcatccggtgacgacgagctgaaatacagcgaatttaagaatcagcatggcacagtgctgaataagccgccgcgcttcgttcactggatagggcatttgaaaggggatacagacgaaataaaggaacgggcggcgctgatgcggaatgattatgttcgggctgtgggagaaaagaaatttacgaaatacccctctcgattccccgtattctacagcaacgtcgaacagattaatgtcacgcaacaccgcgcttattcatccgtccgggttgaaggggagtatgtgaccgttaagacctatacggacgtgaaggacattctcccggatctggagaagctccgggcggcggggttcaccccggaagtcctcgatgaagtgttatttaaatccctggttattcctgttgctgaattttatgaactggccggggctgatcgcatacaggcgcgacgacagaccggcgtccagtaccgcgccacggttcgctatgtgggggaatcacggggtgtccgtgccatgcttggtctgatggtaatcgaccaggacagcgatccggcggtagtctttccggtgccggaagcgccacggcctcactcgcttgccgtcgctggccgtgaagttcagctccccgtcgagacaccgtaccaattctttataaaatag

SEQ ID NO: 400687 - DNA, 306 bp, Salmonella enterica
atgagtaaagatattgctgtagaaattctcaatcagttaggcggaaacaagtttatcgcaatgaccggagctaaaaacttcgtttggttagagaagggcggcttaattttcaaactaccttctaattttgccagaaacggtattaatcttgtcaggattaaactcgaaccatcagatacctataatatagaatttttaaaatcaagaggtgcatcacttaaaattattgcatcatttgagatgatttattgcgatcagcttcaggaaatttttaccgaaacgaccggactttatacgcatctgtga

SEQ ID NO: 400688 - DNA, 228 bp, Salmonella enterica
atgaataatcaacgtcgtaaatggatatcagaaattagtaataagctggcagcattgaaggatgatttatcaaatgctctcgatgaggaacaggaatattttgataatatgcctgttagtctccaaagtggttctaatggtgaaatttcacaaatggcaatcagctcaattgataatgctttatgtcagatagaggatgctatagactctctcggtgagattcagtaa

SEQ ID NO: 400689 - DNA, 252 bp, Salmonella enterica
atgaatgaaaatattttaaaagtgaataaaggcaattattcatatactataacattcgttaaaaataatattagcgagatgctacatgttgtcaaatacgtaaaaacaagaggaaaatatacttcaggaaaaacaaaacgagaacttgtttttgataagcttttaagcccggagcaggctttaattttagatgaaggagttttgagagagcgtattcaaaaatttttaaatgggggaaacaatgaagaataa

SEQ ID NO: 400690 - DNA, 168 bp, Salmonella enterica
atgaacgtattaaaatttaaaaacggtactgtttctgttggtgatatatttgttgcgtcctggggatatgagcaaaccaatgtaagtttttatcaggttatttctctccacggtaagaccactgttactgttcgtgagatccgcgccaatactcagcataccaaataa

SEQ ID NO: 400691 - DNA, 1125 bp, Salmonella enterica
atgcgtccggcaacatttgaagcagaacaaatcattgaggcaggcctggcgttacaggctgaaggaaagaggattaccggcttcgggctgcgtaaccggacaggcggcggtagtccagcacggctgaagcaggtgtgggatgaataccagtccacgcagacagccccctcaacagaacccgtggccgaactgcccgatgaagtggccgacgcggtaaaaggcatttcagcgacactggcagaacagctcgctaaactggcagcggaactgaatgataaggttgttaaggcggcagagcggcaggttgacgacatcacccgggcggcagaagaacaacaggcagaaacagagcaggagctggccgatgcggtgaaggccgtcacagccaccctcacaggacatgtcgtgcagctgctgcgggaactgaatgaccgggccgtcagggcggcagaatgccgggttgacgacatcacccgtacagcggaagaacagaaggcgcaggctgaacgtgagctggctgacgcggtgcaggcggtggatgacctggagcagaaactggatgccgtgacgactgacctgcggaaaacgctggaactgcttgacggcagccgtgaacgggagcagacatatcttgttgagctggcgcaggtgcgtgaacggctggctgccacggaagaacgactgaaggacgccgaaaaaagcggccgggaggcggcagaacagcacaggcagcagacggagaccctgcagcataaactggacgacgcggagcagcgcctgtctgacagtgtctcccgccatacttctgaccttcgggaagcgaaagtggaatacaacgcgacagtaagcgagctgaaggcacagtatatgcagacggaggacagcctgctgaagcgtattgacgctgccgaaaatgcgtccagggaggcgcggacctcggaggcatcactgctgggcgaaatccgggcgctgaaagagcagaaccgggaactgacggcgttgttgtacggaagtgtctccggtctgcttggcaacgctgacattccggaagctgatgaccccggggcgaaagcatcttctgtcgtcacgccggccacctcccggcagaaaaaggagcgcccgtga

SEQ ID NO: 400692 - DNA, 153 bp, Salmonella enterica
gtgagtgatgatgacctgaacgcccgtcgcgcagcggcgctgaccggggataaatgtttcagtcagggccggctgcgggatgaattccggatgaaaccggctcccggggtggtaaaagtggatacgggagtaaatacggcgtttaccggatag

SEQ ID NO: 400693 - DNA, 1110 bp, Salmonella enterica
atggcgcaaaaaataattcacccgagcattatttctgcggctgaagcgattgctgcgcgcccgtctcactctgataggcctttttttatttttgatgcagattcagccctggagcgagcccggcaccttactgcagcctgtaaggagtatttcccggacgccgttattgctgtttcggttaagtcctgctctctggggatatttctgcgcctgattgctgaagagggattaagtgcagaggtctgctcagcagacgaattcaagctggcccttaaggccggttttaccggcgatcggattatcctggacggcccttacaaaaactcagaggatctttcccttgcattggataagggtgcactggtccatattgacagtgctcatgagttgagtgaaatcattggtttaatgtccggttacaaccagaaaatcggcgttggcgtaaggctttcgcatatctatagcgacacgcagcgttcccgcttcggtgttaccgctgaagagtttcgggatgaaatcgttcctctcctgacttcctgtccagatatcagcctcagaggatttcacctgcataccggatccaatcttgaaaacccttctaaggtctctgactgtctccgagactggctgccgtttctggtagaaaacatgcctgagggaggccaccttgatatggggagcggattccctgcggactcgttttcaccggttgcggctgtaccaacagttgagcctgcagcgtttttcagggatattgtcagcgttctgtctgaatatgatcctgctttaattcaaaagtggaaactaattttcgaacccggaagaacactcagtgaagatcacggatatgctatcggaaaaacggtcagcgtaaaaaaccgctacgactcggaggttatccagacaaaccttggcatcaactggatcccttccgtgcataactggcatcattcccttttgccgttaggtcataatgagcacatcccggatgatacgactcagatactcgccggttttaactgctttgagaacgattgccttttccctagaggtccccttaatctcaaaaaaaaatcagttgtttattatccgcggctgcggtgcatatga

SEQ ID NO: 400694 - DNA, 552 bp, Salmonella enterica
atgcttgatcttatgcatgccgaacagtccctctgtgttgatgaaaacattcagctggcacctgcctcgtcccgctttgccactgagcttttcagtgtggttgataggaaccgtaaggaatttagtcaatatatggcatggcctcggtttgttaaaacggtagatgatgagtccggttttcttgacgcctgtctggcagctcatcagaaaaatgaagggaaaacctatgttattttgttcaacgatgcggctgtgggcctactctcattcaacagtatcgatagcgccaataaaaccgcatatatcggatactggctcgatatgagagtgcagggccagggcgtaataacccgagctctaaacgcgcttgtgaaagaatattcggaccgaaaattaataaaccggttcgtaattaaatgttccgtaagtaacttaaaaagtaacaaagttgcccaacgctgcggttttgtccttgagggcaaaatgcggaaggcagagttacttaacggcgtttttcacgaccagaacgtatatagctacatagcgccctaa

SEQ ID NO: 400695 - DNA, 1050 bp, Salmonella enterica
atgctgaatttaaagtcaatattatctcttgctctttcatcctgttcattattacctctatgtatacaggcaaaaattccagagtcgagaatgattaattatgaacataagatctcattaacaaacgagcaaaaaataaaccttgaaaaactcgccaatagtattcatgcggaatcgtttaaaaaattatattcatctgacggatggggaaagtatggtaaattttcagatttaggtatggaagtacaaggtagtttagcctatggcatggcgctggctgattcatcggatctagatattgcatttatatataaatataataatggcgattctatgattaaattcgatccggttcaatttaaaaatatcgcgattaattcgtttaaatctacatttgggaataaatatgtttatacaataaaagcaccagtggtaaatttaaagaataagacggaagatattgatattgcattctttaatattttaagccagtcaacaatgctatgttctacagcaaatagatgctctgaactaaactatggaaaagacagcgctaccgcttcatggtataaatcagagaggctgagtttatattctaaattagatgaagtatttagtgtcaacactgataaaagaaaattaatcaaccgagcagggaaaatttttaaagtatggcgtagtaaaacattttctacacaaacggtgaaagttccatctatagctttagttacaattatgtatgattttaaaaaagacaagaataatccagataattattcatcctcaattgaaatgttacgcgatatgacatactatggagtagttaaatatttcaaagataaatcgtgtagcggcgcttccagtgctgaaattaatctacctgtctaccaacaagacaggaatttacttaatagactcaatagtgctcaacgtatcgatttttgtaaaaacttagtgaagtttaatgaggcgcttgaatattcagcctcagaaaaggtaagtgaagccgaatcagtgaaaactcttgagccttttataggttcactgtaa

SEQ ID NO: 400696 - DNA, 231 bp, Salmonella enterica
atggaattggccacaacagtggcgcccattcaaccggtggggttaatggggccatgtgccaagaaagcgaacacatccaatcagcaacgccactgcaagacggtttgcccggccgtgccggttgttaatgaactccatatccgcttcatccaacagaaagaagcgggccaactgaacatcattaggttcgccggaaaactgaccatagctggcccgttgatcggcatttaa

SEQ ID NO: 400697 - DNA, 279 bp, Salmonella enterica
atgggcagtatcaatcatgattgccccaggtttttttatgctttccaacaaggtggcggtgataaacgggctcgatggtatggagataaacggcgtaagatttatgaatgggactcccagtatggcgaacttgagggggaccgtgccagtgacggtgaacatcctggggcgttcgatcctaaaacgggtaaacaggtaaaagcccccgattcgaaacgaattctggccattttaagtattccttttttcacggacgtgtttaatcaaaatttcccgtag

SEQ ID NO: 400698 - DNA, 261 bp, Salmonella enterica
atggctcacgaaatgacgttttcactcagctatgagcagcttttgcaggaaacggaagatcagattaaaaaatgcgatctccgcgaggctgagccttactacctccaggagctgaacaaagcacgggacttcctagctttctggcaccggctggcgctgaaagggcaggcaggaacaccagatgcccgttcctatgagcgcatcgacgccgaccgggagcgtctggacgctcttatccggaacgggagcagcgcaacatga

SEQ ID NO: 400699 - DNA, 660 bp, Salmonella enterica
atggcggaagaaaaagcgcggcaacagacgctttcactgcatgtcgttaacggtaacgagctggagagcggacgtaccgcacggtgtctgttcaccggagacggcgatgtgggccacggcagcgaatgccactggcctgttcaggaccggcaccagaacgttccggcgaaggcgttcagcatcagcctgcatgatggcgcattctgcctgcatccgctggcatcgccattatggctgaaccaggctaaagtcacggcggcctcagaccaggtgcagttacgtcagggcgatgagatccagaccgggcatctgatactccgggtttatctgaaccagggcgggatgcggcattacgatgaggagatggcgacgcctgaaaccatcgtttctaaccacgacctcctgtcggacacgctactgtccacggacggcgcgccggaatatccgggaatgccgtcccgccatcagctcgcggataccgttgttaatggcttttccaccgatccgttgcaggtgctccaggctgaaagtctgaccaccagggacaatccgcttgcgggtatcaccccggccctccgccccgttatccgatccggcgataaacggcgggatcaacacgccgtttatggatctgccgtccatgtatgccgatccgcatga

SEQ ID NO: 400700 - DNA, 255 bp, Salmonella enterica
atgcgcggagtcgtcgttcatcatgagcaccgtatcggttatatcgttatccgtgaccctatgggggagttcacggttgcagaacttctcggcggatatgatgttgagaaagggcatgtcatatccggtgatctccatagcctcggaggtgaaacatttttaaatgagactgaggatgaagatattgatgttttcgttcagggttatggcatgtctgaacagcaatcaattcttatgatccgacgtactcgctaa

SEQ ID NO: 400701 - DNA, 195 bp, Salmonella enterica
gtggataagaatgcgaaagcgcttttagagaagattgcaggcttagagcaagctgcaaagcgagggttgcagattaacgaagaactccaacagccattagctgaaggacaagtcatatccgttgattactgcaacgcaacgttaaaaagctgtgatctgtttcgtaaatggtttagcgagtacgtcggatcataa

SEQ ID NO: 400702 - DNA, 207 bp, Salmonella enterica
atggatcgtgatgaattggaagaggaccgcgcagctttcattgcgggtgagattggtggtgtagtgattcagttaatcattgatgggatcgaaatcaaccgtgacaatatcgttgagtatctggagtcaaaacgcaaagtggtagggaatgtgatccacaaggggatactgcgtgactcagctttaatggtgagaaagggggtataa

SEQ ID NO: 400703 - DNA, 213 bp, Salmonella enterica
atgcttgagaaacgtgtacagaagcttgaagatgatctggcagctattcgtactgacctcgcggtcattaagtcgaattacgcaaccaaagaagatatcgcctctattcgaatagaggttcaccagtcaatcgcagcacaaacaaagtggctagcagcaacaatgctggggataacagggcttgcgatggcagtagccaaactaattttctaa

SEQ ID NO: 400704 - DNA, 348 bp, Salmonella enterica
atggctagcgaacaaggctttgagttgattaacatggacatgttagtctcttacttctcggaaaagaatatcaatcttaaatgtactttatgtgggcatgataggctaacagtcccccaagtcagtgcaagtgcaggaatgccatgcaatatggcattaggaagttatgtaaatgtttttacagaaaaaagcatttattctgacaaggctaaccaatattatttttcactgatatgtaataactgtggaaatgaaacccatataaatgcgtttacagttcttaactgggtaaaagaaaaattccctgtaaatacggaagatgaaaaaaatgccgacgccgaacaataa

SEQ ID NO: 400705 - DNA, 465 bp, Salmonella enterica
atggaaagcataagctcacctgtaaaccctgatgtataccgagttgaagttctagatctaagcgtcagcgcagggccgggaacctatatgctttcggactatattgaagtgctttatgccattgagttcacgacagagcatgcccgttccctttttggtaaccgttctcaagatgacgtcaaggtcatgaccgttaacggcgatagcatggcacccacattgtcgtctggagatcggttattcgtcgatacatcagtccgccacttccggactgatggtgtctattcctttgtcttcggaaagacattccacgtgaagcgcctgcagatgcagggtaacaagctggctgttctgtcagataatccagtttacgaaaagtggtacattgatgagaaatcgcaagatcagctttatataatgggtaaggcattgattcacgagtcgattaaatataaccgtctttag

SEQ ID NO: 400706 - DNA, 264 bp, Salmonella enterica
atgccatctcaaaaattcaccgagaaagcagtgaaagctgcggggaaatctttatcagaagtagcccgacagtttggttttaaatcaacacagtctgttgctaactgggtcattaacaatcaggttccatctgaaagggttttacagctttgcgagttagggaaatggtccgtaactcctcatgaactacggcctgatatttacccaaaccctagtgatggtctcccagatgagccatcaaaaattagtggatcggcagcgtaa

SEQ ID NO: 400707 - DNA, 270 bp, Salmonella enterica; identical to SEQ ID NO: 372445

SEQ ID NO: 400708 - DNA, 168 bp, Salmonella enterica
atggcgcgcggcgccattctgataatacatttaattattgcatcgtccggaaacgtacttataacgttcgccctctggtacaaattccagccggtgggtaatacaggcaggcgcatcctctgcatgatgggaaacgaacagcagttgggtctctccctggcgaattaa

SEQ ID NO: 400709 - DNA, 558 bp, Salmonella enterica
atgcgtgatctgatccttcaactcagcaaaagttcgatttattcaacaaagccgctgtgcacctcacacgccatgatgcgcgatttggcggagcagtttcgcgccaccatgacgctgccggtattgttgcaaggggaaaccagtaaaggccaactgttacagcaatttgttagcgccggcaacgcgctgctcgtcgccaccagcagcttctgggaaggggtggacgtgcgcggcgatacgttatcgttggtgattatcgacaaattgccgtttacctccccggacgacccgctgttaaaagcgcgaatggaagactgtcgtttgcgcggtggcgatccgtttgatgaggttcaactgcccgacgcggtgattacgctgaagcagggggtggggcggctgattcgcgatgcggacgatcgcggggtgttagtgatttgtgataaccggctggtgatgcggccctatggcgccacgtttctcgccagcctgcctcctgcgccgcgcacgcgtgatatcgcccgtgccgttcgctttcttgcgattccatccgccgagtaa

SEQ ID NO: 400710 - DNA, 150 bp, Salmonella enterica
atggataaagtacctctcatctggtatcagcgtctcgctcttgcctttgtcatattgcttgccggatggaagctcacggggatggtgtgtgtttttacagtagccatgagcttagcaataaaagatgagctaaaggcactgcgggaatga

SEQ ID NO: 400711 - DNA, 951 bp, Salmonella enterica; identical to SEQ ID NO: 291414

SEQ ID NO: 400712 - DNA, 414 bp, Salmonella enterica; identical to SEQ ID NO: 291415

SEQ ID NO: 400713 - DNA, 600 bp, Salmonella enterica; identical to SEQ ID NO: 35542

SEQ ID NO: 400714 - DNA, 711 bp, Salmonella enterica
atgttatattggaaaaaaatgccatcactctggatcggtaatagactgacagagtttaatagtttagagacttcacatgccattgccgccataaagatatatataactttttgtctctttggaaaagaagaggatgatggagtgcgaaccgtaaaacttacgtttacagaaataagcaaaatagcttctatcagccgatctttggtaaatgaaggtctcaaattgctcgataataaaaaactaattaaatacctatcgcccgcgtcaaaaagaaagaaaatctatacagtggatgttgatgggtacattcatgacggatggtgtaagctgcctatggcaggcatcgttagcgaagacaggacaatcagcgccttccagtcaatgcataatagataccattttgagcttgtagcgcttcagctatatttataccttctatatgccagagataacttccaggagcatgtgttagctagaaaacaaactatttgcgaaaagcttgcttgccgcaatgtagatttaaataaagcaataacatatttaatacacataggtcttttaaaaggaattaaacaaaaggcagtggagtcttatcccatagaactttttcatgattcattttatttttatgtaaaaacaggagcaagcaatgcgcttacattcaaaaagcaacctcttgttaaccctccagaaaaagaaattccgtactga

SEQ ID NO: 400715 - DNA, 195 bp, Salmonella enterica
atgagtaaaaagcagcgccgtgaagggtttcgaaaagcggaagcatcactaagacttgagggaatggatcctagtggagtacctcgttatgaatgtttgaaaacgaggattatctctggcgaaacaagttatgaacaagggcgtaaagaaatattggattactaccttagaataaatcataagggcgaggagtaa

SEQ ID NO: 400716 - DNA, 249 bp, Salmonella enterica; identical to SEQ ID NO: 226127

SEQ ID NO: 400717 - DNA, 162 bp, Salmonella enterica
atgcccggagaaaagcaacaaacaggcgttagccgcaggacgttagtgaaatcagcggcgcttggctcactggcgctggctgccggaggcgtattctttaccgtttgggatgcgtaccgcggccgcggcggtgcagcaggctatgcgcaacgaagaagataa

SEQ ID NO: 400718 - DNA, 174 bp, Salmonella enterica; identical to SEQ ID NO: 385510

SEQ ID NO: 400719 - DNA, 318 bp, Salmonella enterica
atgcggggagaaaatagtgaaattgatttagtcgacgtttccttattccttataagaaaatggctaagtatcgtgatcgttacctttatttttgtcgccattggctatgtttttgtgagcgtgcagcatgatacaaaggttgtgagtattacaatcaaacctaatctggatacgcctgctacctatgcgttatgtggctatactaatgatattcaatgtaaaacaacggttatccttaaccagtttagccgtttcttgcctgcggaatataaaaataaaataagttttgacgcgaaaaatcagcttgttctttattaa

SEQ ID NO: 400720 - DNA, 453 bp, Salmonella enterica; identical to SEQ ID NO: 372308

SEQ ID NO: 400721 - DNA, 399 bp, Salmonella enterica; identical to SEQ ID NO: 379783

SEQ ID NO: 400722 - DNA, 342 bp, Salmonella enterica
atggcggaaacagcggttatcaatcacaagaaacgtaaaaatagcccgcgaatcgtccagtcaaacgacctcactgaggcggcatatagtctctcccgggatcaaaaacgtatgctgtatctgttcgttgaccagatcagaaaatctgatggcaccctacaggaacatgacggtatctgcgagatccatgttgctaaatatgctgaaatattcggattgacctctgcggaagccagtaaggatatacggcaggcattgaagagtttcgcggggaaggaagtggttttttatcgccctgaagaggatgccggcgatgaaaaaggctatgaatcttttccctag

SEQ ID NO: 400723 - DNA, 168 bp, Salmonella enterica; identical to SEQ ID NO: 5936

SEQ ID NO: 400724 - DNA, 642 bp, Salmonella enterica
gtgaatgcggacacctggacccgcctgcaggccttccgacatgctctggagctgacttcctgtgaggcttctctcaccgccgggtatgatcacctgaaggatttcccggccggttgcagcgagctggccagccagacgctgactgattatctgacggaagacggcagcaacctgtactcctgtattgtcggtatgcagtgggataatggtcctggcagatacggccacgtcattgccgcccctgccagggactatatcgacctgacccttgatcagtttccaggctatcataaccggattgtggcagagcccgttgagtccggcggacagctcgcggcagacctcaacagggagcctgccatcagtacagctgatggaatagtggccagcgcatcagataaggttaattacattactgaacagaaaaatcgccagccaatggtgatcattacagaatgttacaaactgatcagaatgacggcaagatttataccaatgtgccagtcatctcaactcttccagcaccagatattccctcgcttatttatcatttcagacgttggctcctgcagtttgtccaggaacaccttagatcgtttagctactgactggaaggtgacactgtccgtcctgtcgctatag

SEQ ID NO: 400725 - DNA, 333 bp, Salmonella enterica
atgaatatcctgatgacaggcactgctgcgcagacaccggtcatggatgtaacggaaataccagctgaaccacaggtcttccagtcggggacactgagtacagggctggagcttgtggatacgtatctctggatcttcaaacactttatggaaggaaaggtgttaaccagatcccttgcctgcctggtttatatcaagccctatagcgacaggacggacagtgtcaccttccagtcagtagctaaacgatctaaggtgttcctggacaaactgcaggagccaacgtctgaaatgataaataagcgagggaatatctggtgctggaagagttga

SEQ ID NO: 400726 - DNA, 1500 bp, Salmonella enterica
atgcgtgtgataatgaagcctttaagaaggactttagtattctttatcttttctgtttttctttgcggaactgtgtctgccagacagatcgagtggcaatcctgtatgaccagcccatacagtgactggtttggtacagaaagctcttcacctgagttgttatgcggatatctatctgtaccgctaaaatataccgacacaggtggggatatgtcagatgaaaatataccacttgtcagactggcgatgacaaagttgccggcaaaaagtaaacgtaaagggagtattattataataagtggtggaccaggattacccggaattaatccttatatcagttttgactggccggtcacaaatcttcgggaatcatgggacattatcggttttgatccacgaggtgtcggtcagtcctttcctgccataaactgccagcaacccaatcaagaaagattggggaatgtaagtgaaaagcaactaattttacagaaaattaatgcctgtatccataatacaggagctgaagtcattcgccatattggatctcatgaggctgtatatgatattgaacgcatcagacaagctctgggagataaacaactgacagctgtagcatattcatacggtacacagattgcagccttatatgccgaacgctttccatccagtatcagatctatagtttttgacggtgtcgttgatattgatgatttaaatgataatttttcatggaaactcaggcaggcccacagttatcaggaaacgtttgatcgttttgctgcatggtgtgccaggacaaaaagttgtccactttcttcagacaggaatcaggcaatacatcagttccatcagcttttattaaaattacataattctcctttaacagacagcaggggggaaagtatatcttcagatgatctcatatcattaacgacagagcttctgttatggcgctcatcatggccaacacttgcaacggccgtacgtcagttctctcagggtattgtcagcaatgaaattgaaactgcacttaattcttccatagcatcggaaaaagtcagtgatgctctgggtgtaatattatgtgttgatcagagtgatgaacaattatcacaggaacaacgaaaatcgcgaaaaaaagcccttgctgacgcatttccggccgttaattttgagagggaacagtccgatttacctgaattttgcgaattatggccaattcatcgcgatctgcaacagacacgcctgaagaatactgttttaccatccggtttactgtttgtggcacacaaatatgatccgacaactccctggataaatgcccgtaaaatggcagataaattttcagctccgttactgactattaacggtgacgggcatacgctggcgctagctggctctaatttatgtgtggatgaggctgttgttcgtcacctcctgtttccggggaaatctgaagatataacgtgtcagggaagtggtaccggagacactaactga

SEQ ID NO: 400727 - DNA, 948 bp, Salmonella enterica
atgcaaactaagcttctggcaattatgcttgcagcacctgtggtattcagttctcaggaagcttctgcttctgatttcttcggcccggagaaaataagtacagagattaatttaggtacaatgagtggcaaaacaaaagaacgggtttatgagcctgaagaaggtggacgtaaagtcagccaactgaactggaaatacagtaacgccgccattcttaaaggcgccgttaactgggagctgaatccatggttatctgttggtgcagctggctggaccactctcaatagtcgggggggggatatggttgatcaggactggatggattccgggactcccggaacatggacagatgaaagcaggcatcctgatacacgtcttaattatgccaacgaatttgatttgaacgttaaaggctggtttttaaaagaatctgattatcgccttgctattatggcaggttatcaggaaagccgttacagttttaatgctacaggaggaacttatatttacagtgagaatggtggtttccggaatgaaacgggagcgttacctgataaaataaaagtgattggttataaacaacattttaaaattccttatgtcggtctgacaggaaactaccgttacgataattttgagtttggtggtgcatttaaatacagcgggtgggtcaggggatctgataatgatgagcattatgtaagacaaactacattccgaagcaaagtaaaaaaccagaattactattctgttgcagttaatgccggttactatatcaccccagaggcaaaagtgtacatcgagggtgtatggagtcgtctcacaaataaaaaaggggatacatctctttacgaccgtagtgataatacttcagagcataataataacggggctggaattgaaaattacaacttcattacgacggccggtctgaagtacacgttttaa

SEQ ID NO: 400728 - DNA, 1221 bp, Salmonella enterica
atgtccaaattgataaacacatattttattactccgccagagaaaccgactcagtccggacctgagggtatccgatatgattttaatgatggtgcgcgtgtactgctccctgaggggaaatggcatgttcgtctgatggatgctgattcggggaacattctttttagctgcgatgcagataatggctgggtaaggagctgtaaaaaatacttcattcgttttcgtattcaggtattccataggggaaacgatacgcccttaatggatgaaacgttgaatttaaaaaatcagcctgtgctgatttcgtttcctaccggtacattaggtgatttactcggatggtttccttatgctgaaaggtttcagacgctgcataagtgtcaactggaatgcactatggcacaggagattattgaactactggcaccgcaatatccgcagattcaattttctactccagataatcctcatacgattacgccatatgcaacttatcgtgtaggactgtattttggtggcgatacaactaaccagccaattgattttcgccaggtcggttttcatcgttccgctggatacattctgggagtggatccccgagaatcaccagtccgacttaatctttcagctcccagaagcattaatgaaccttatgtatgtatcgcgacacaatccacttgtcaggcgaaatactggaacaacggcacaggctggagtgaggttgtagcccatctcaaatcgctggggtatcgggtactgtgtattgatctgcatgctcattatggtcagggctttgtctggaaccatattccgtggggagcagaagactttacagggaaaatacctctgcaggaacgggtgaatctgttacatcatgccagtttctttattggtttatccagcgggctctcctggctggcatgggcaactcatatccctgttgtactaataagtggttttacgcttcctgtcagtgaattttatactccatggagaatatttagttcccatggatgtaacggatgctgggatgatacttcactgaattttgatcataaagattttctgtggtgtccgagacataaaaacacccccagacaatttgaatgtacacgcctaattacgggtaagcaggtaaacggcgtcatcgacaaacttcatgcctctctggcagaacaaagtagtattggtatgaattattcaaggtggagtaatgaataa

SEQ ID NO: 400729 - DNA, 4164 bp, Salmonella enterica
atgaataaaatctataatattgtatggaatgaatcttctggtatgtgggtggtgacttctgagctaacccgcaaaggtggacaacggcatcgaaaaataaagaaaacaatgttagccgggctaattgcgggacttatgttgccggccataccggctatggcacaaatgtataatgataaaactctggagtatagtgattccgtcatggagttatccgctggcgatacggcaaccaatactaccattaatgggggagcacaatatatctccagtggaggtaacgctacaagtacgactattaatgaaggagttcagatagtatttgatggcggcacagcctcaacgacaaccatcaatggtggttaccaagaaatctcaagtggcggcctagccactaatacgatcattgatgggggagatcaatatatctccagtggaggtaatgctattgataccactattgaaaatggataccaaacagttttcagtggaggcaacgctacaagtacaattattaatgccgggttccaggaagtttccagtggaggcagtgctaccagtgccattattaatggtggattccagactctctacgataacagtattgccagtagcaccgtcattaataatggcttccagctcatttctagtggtggcagttctgttgacaccactattcaaggcgggattcaggaagttggtgaggggggaagtgcaagtgctacgactataaatgatggttttcagatcctcctcagtggaggaagtgccacaaataccactattaataatggttggcaggatatatccagtggtggctctgcaactcagacgatcattagcgggggtatccagacgatttacgatggaggctcagcgtcggagattacaatcaacagtggttaccaggtcatctcaagcggtggcagtgtaaccaccacgaccatttaccgtggtggggagcagcgagtttccagcggcggcagtgccgttgacaccaccattgaggaggggcttcagactgttctcaatggcggaaatgtctccgggactctcattagcggaggagagcagcgagtttccagtggtggtagtgctgtagacaccaccattgaggaggggcttcagactgttctcaatggcggaaatgtctccgggactctcattagcggaggtgagcagaacatttccagcggtggtagtgctgtagacaccaccattgaggtgggactacagactgtttttgatggcggaagtgttaatggcacgatcattgatggtggggagcagcacatttccagtgggggaagtgcgattaacaccacactggatggctatcagacagttttcaatggtggcaacgcaacaggcaccacaattaatggcgggttccagaatatttccagtggtggcagtgctaccagcaccattattaatgccggattccaggaggtttccagtggtggcagtgctaccagcaccactattaatgccgggttccaggctctctacgatagcagtatagccagcggcaccgttattaataatggcttccagctcatttccagtggtggctctgccatcaacaccaccattaaagggggattccaggaggttagcgatggtggcagagctattgagaccacaattactagtggctggcagaatgtattaagtggtggggttgcaactgagacgctcattgtcgggggagtccagacgatttacgacggaggctcagcgtcggagattacaatcaacagtggttaccaggtcatctcaagcggtggcagtgtaaccaccacgaccatttaccgtggtggggagcagagtattactaatgcaggccttgctaccgggaccatcattcgtggcggggagcagcgagtttccagcggcggcagtgccgttgacaccaccattgaggggggactgcagactgttttcggtggcggaagtgtctccgggactctcattaataacggggaacagcaagtttccagcagtggtagtgctgtaggcaccaccattaatgggggactgcagactgttttcggtggtggaagtgtctccggaactctcattaataccggggaacagcaagtttccagcggtggcagtgccgtggacaccaccattgaggggggactgcagactgttttcggtggcggaagtgtctccgggactctcattaataacggggagcagcgagtctccagtggtggtagtgctgtaggcaccaccattaatgggggactgcagactgttttcggtggcggaagtgtctccgggactctcattaataacggggagcagcgagtctccagtggtggcagtgctattgacacaaccattaacaatggagggacaatgagtattgccgcaggtggtagtggaacgggaataattcaaaataatggtggcgcaatcagagcgaacacatcggccatcctgagtggaacgaacgtaaatggtagcttcagcattactaatggtagcgccagaaatatgttgttagaaaatggtggactcctgatggttctgcagggtcatcaggctatagatacccaggtatctaaaggtggtgaattacaggttgagagcggttctgagctattgggtacaaccttgattaaagacgatggcaaactgtcaggcaaccagataaccaataatggggttctgcattttctcgacaatagttcagcaaactatagcggcacactggatggtaccggtagtctgaatctgaatgggggaaaattaactctcagtggtaatttttctcaggatagcggtatttttatccaaaatcatggaacaatgataatggataatctacgggctatggcaaatgtgacaatcgagcctgatgcaactctgcgcttagagaatggtagcctcctggctggacgcattactggggatgggaagaaaggtggaaatctgatagtggctgactctgtctggaaattatccggagactctactattaactcattagacatgagtaatggaaccgtggattttcattcaatacagtcccctcagtttaaaacaaaacttgagggagtaacgttaaatatcggacagttatcaggaaatggcaccttcttgatgaatactgatattgcatcatatactggtgataaattaaacatcacaggggatgcaaacggtaattttgttttgaatatcaaaaataccggtcaggagcctgtatccccgggtaacccattaccagtggtttataccggtggaggagatgctgtatttacagtaaacggaggaaaagtggatgcaggagtttgggaatattatctgagtaaagataatactaactggtatctaaaatctgatactacacaaccaggtaatccggaaccgggtatacccaatcctccagtacggcacaccacaaagtctactgatgctgtactgaatatggcaagcgctccgacatatatctttaacagtgaattacaagggctgcgattccgtaacagtgaaaaatcagaaaactcacgtacttctgggggagtatgggggcactatataggatcagataaacacatcagcagcaaaggagcgggttactccctgacccaatacggaatagtgacgggcggagataagcgttttgacctaagcgatggggtgttgtcattaggggcatttgtttccttctctgataacaatatcaggcataatcgaggagggaaaagttctattgatagtaaaagtgttggcttgtacatgacgtatgatactcacggatactatatagatggtgtactcaaattcaaccgtttcaaaaatgagttgcgtacccatatgagtgatggaactatggtttcgggagattatcatcaaaatggtttcggtggtagcctggaggtgggcaagtatttttctctgaatgagaatacctggttacttccttatgcccgaacaacagctcttgctgtgaatgatgacaatatcagtctatctaatggaatgaaggctgaaataaacacaacacattctttccagggtgaggttggtgttaatttagggatggaccttgatgttggtaaaaccaaaagcagagagtcactggcaggggattattgctcttgtttctgcggtaatcattcatgccataatatatactcaatgtaa

SEQ ID NO: 400730 - DNA, 126 bp, Salmonella enterica
atggccgtgtatggacggatgtggggatttcaggtggttacgggggatttctggccggacagaacctgcgccaaaagccccgaaggggctggcgatgattcagtgctgaaggatggtgctgtctag

SEQ ID NO: 400731 - DNA, 528 bp, Salmonella enterica
gtggctgatcttcaacaaacgtattcccgtcaggtaaagaacccgaattcggtgttcaccccccgtgaaggtgccaggacgcagccattctgcgagaagctaatgggaaaagcggtgggggggaccgaaacatttgcattcgatattgcctctgcgtgcgcgcgtgctaatggtaaacgtaaaccttctgttcttcgtcgcagagctattgatgctctgttgcaaggcatgtgcttctattatgatcctgtttcaaatcaagtgcatcgttctataaccgaacttgcatttgattgcggattagccagaaaaaatactcatggtcatttggccattgagcgagctgtcagagcaattaaatcacaggaagaagattttgggtttatagtctgttccccgtcatccggtttctacaataagcgctgcgcaataactttgacgcctcgtttttttgagtttttgggggtatttccgttggcgctgactgaagctcgtctggctgtcttacggagtgggtatggtgattaa

SEQ ID NO: 400732 - DNA, 216 bp, Salmonella enterica
atgaatggattcaggaacagttcacggaacggtcaggtctggcgatatcagcgtgccggagggctggtcgttattctggaagtcagggggcgctggatggaggctgctgaagcatggctacgtgctgcctgtgttgcggcgccccggacaaactggcagcagtttgcccggaaaagggctgaacactgccacaggcgctgccggggaaggctgtaa

SEQ ID NO: 400733 - DNA, 522 bp, Salmonella enterica; identical to SEQ ID NO: 21353

SEQ ID NO: 400734 - DNA, 198 bp, Salmonella enterica
atgaacatgcgtaatattaatgttattacagccctctctgtgccgggtaaaaccgtgtcagatgattttatgcatgctgttctcagtaactgcgccaaaagaatcgtacttcctacaccggagaaattcggttctgagtcattgccggacaattttaatatgactgctgtcggtgtgatgaagaattcagaaatataa

SEQ ID NO: 400735 - DNA, 591 bp, Salmonella enterica
atggcaaataatatgtcgtcccgtcaggcgtgccatgccgcccggtatgttgtcgcccgggttctgcgaggactgttctggtgtctgaagtacaccgtcattctgccactggccacaatggccctgatggctctgtttgttttatggaaggacaacaccacgccggggaaattactggttaaggagattaacttcgtaagacaaacagctcctgccggacagttcccggtcagtgaatgctggttttcttcctctgattcttcaggcagatcagaaatacaggatatctgccattaccgcgcggctgatgctgcagattatgtcagggagactgaccggtcactgatgcaactggtcaccgcattatgggcaacactggcactgatgtatgtctcgctggcagcgatcaccgggaaatatccggtgcgacccggaaaaatgaaatgtatccgggtggtaaccgcagatgaacatctgaaggaagtttatacggaagacgcttccctgccgggaaaaatcaggaaatgccctgtttatcttcctgatgacagaacaaacagaaacaacggagataaaaatgaacatgcgtaa

SEQ ID NO: 400736 - DNA, 648 bp, Salmonella enterica
atgtgtgcgatggatcgtagagaaagagcactcatcagtcaattgcattttcctcatagtcttggagaggctatttcgtttttaaaatatccagtatgtgtccgcttcgaggatggttcttttattcaggaaaataaccgctttgaaaaacttatcagatcgtcatttaattcatgtgatgaatggtttgatagtttaacgttggaatgtaaattacagttatccagagcagagattgaatcatgctcttcagtttatggtgtaaattgtaataatgacatattacttaataatatgttatggagtgtgatcatagaaagtgttatcacaccatgcggctatttctttatctggagatttatttgggtagcaaatgataatctgtcatcgtttgttgtgtctaaatacaccaatgaattaattgtactatctgatgaatatgtaggcattgagccatatctgatagggtttagccatcattattcatcagcaaagatgaacatcactgtgtctaaatcaaagaagaaaaccatgaaattatttaaacgacatggatttagttctagagatctctggttggatgaaatgattagaacagaaaagatacttcctttatatgctaaagtaaaagaaatattgggaagatag

SEQ ID NO: 400737 - DNA, 384 bp, Salmonella enterica
atggccaaaattcaggtttatgttaatgaccatgtgtctgaaaaaataaatgctattgctgtgcaaaggcgagcagagggagcaaaagagaaagatgttagttattcaagcattgcctctatgttgcttgagttaggattgcgagtttatgaagcgcagatggaacgaaaagaatcagcgtttaatcaggcagagtttaataaacttcttcttgagtgtgttgtaaaaacgcagtcaacggtggcaaagattttaggtattgagtctcttagccctcatgtttccggaaaaccgaagtttgaatatgccaatatggttgaagatatcagagagaaggtgtcggttgagatggaaaggttctttccaaaaaatgatgatgaataa

SEQ ID NO: 400738 - DNA, 741 bp, Salmonella enterica; identical to SEQ ID NO: 379812

SEQ ID NO: 400739 - DNA, 498 bp, Salmonella enterica; identical to SEQ ID NO: 381936

SEQ ID NO: 400740 - DNA, 384 bp, Salmonella enterica; identical to SEQ ID NO: 379821

SEQ ID NO: 400741 - DNA, 534 bp, Salmonella enterica
atgacaacggtgacgaagggcaagaggaagagcaggaatagtttagcctctgccgttgttgccggatgtgatatctcatcgatgttcaggccgccgcgcaggatgaaaatatcggatgcggtcagaaaatatatgcgcgtaccacgcgatgcgggaaattctgtggcatgggaatccaccctgaccccctatgtggtggaagccatgaactgcctgtcatcacgcagctacgatgccgtggtatttgtcgccccggcaagaaccggtaagacgctggggctgattgacggctggatttcctacaatattgtctgcgatccgtctgacatgctggtggttcagatgactcaggacaaggcgcaggagcactcaaagcggcgtctggcaaagatgtttcgccacagtccggcgatagcaagaagactcagccctcaccgtaacgataataatgtgcatgataaaacgtttcgtgatggctcgtttctgaaaattggctggccatcaatcaatgtttttttcgtcttcggattttaa

SEQ ID NO: 400742 - DNA, 207 bp, Salmonella enterica
gtgataaagatactcaccttcacctatgtgctgagcaagaacgcggtgacggaggggcatagttgcgacaacagtcagctcgggggctggggtagggctgttgcctttgttctcaaaattttcggagtggtcttccaatacctcgcctgtttcggtatcaacaccgtcaacgatgtgctggcgggccacggcggcggcttcagatga

SEQ ID NO: 400743 - DNA, 498 bp, Salmonella enterica
atgaagaagcagattcttgcactcgctttgctatcactgccactgattggcatggcaaaggactctggttatggcaataccgaatggggtatgaccccaaatcaggtcattgcagcccagaaaggaaaagctcatttaatcccccctcaaaagtataaagaccaatggggaaaagtgagcattgaagacgtgaatataggtagtggaatatatacagttacgtttatttttgacgcatcagataaattggtccaaaccaacgttgccagcaaagaaaagaaaaacgagggaatagcgaacgaccaatttaactcattaaatcaattacttacacagaagtacggcaaaccacagtttgtaagtgatgaaaaagcaacatggaaaactgatgctacaacaattgagctaaataagatgatcatctccggaattatggctcaaacactagttcgctacattcctaataagaccgtgatttctgacacgtctaacctgtaa

SEQ ID NO: 400744 - DNA, 588 bp, Salmonella enterica
atgataaggaatattttttttgcttctgcgatcgtagtagcgatctctggctgtacagcaatggataaattggcgggaatgggtgttgtttctcagcaaacatcaacctttgataactcgactgtcatagaggtatctccaaattcgctatacgatcctaacagcacttggggaacaccacttcagttgggcgcgatatggtctagtgcctatccagatgaggctggactaatcctttcctacaactcgaatgtatctagcggaaatgccgcatacttaggtttgacggggattgatataaatattgatggtaaaatatccagctataaagcacagcaacaaactaatctaagcagcagctcatataactccgtatccaagacaatctatacctctagcaagaatactatcgttatcccgtataaattgctggagagcatggtatcagctaaaaactgccgcattcgcatacgcacaagccaaggtaatcaagacatcgacttctcagcacaaagtatccccggaggtaaagcgacagcgatcgtttccattaaagagttcctggccaaagtcgaacgttttaaataa

SEQ ID NO: 400745 - DNA, 369 bp, Salmonella enterica; identical to SEQ ID NO: 14940

SEQ ID NO: 400746 - DNA, 459 bp, Salmonella enterica; identical to SEQ ID NO: 380368

SEQ ID NO: 400747 - DNA, 138 bp, Salmonella enterica; identical to SEQ ID NO: 380384

SEQ ID NO: 400748 - DNA, 192 bp, Salmonella enterica; identical to SEQ ID NO: 380466

SEQ ID NO: 400749 - DNA, 585 bp, Salmonella enterica; identical to SEQ ID NO: 380431

SEQ ID NO: 400750 - DNA, 438 bp, Salmonella enterica
atgaaaaacgtgatttatttttcagccagcacatgtgggttttatgattcgcgtgccttgagcgactatattctgcgaggtacatttccagacgatgcagtagaaatgacagaggaggaaatatcacatttctatatggttcaccctcctgtagggaaaacacttggaagtaatgcaggccgtccatcgtggactgatactccgccgccatctgaaaatgaattaatcgcagcagcagagcggaaaaagaagaacctgattgatgctgctaatgaatatataaacagtaagcagtggcccggtaaagcggcgattggcaggctgagaagtgatgagcttactcaatacaacctttggctggattatcttgacgaggttgaatctgttaatgtcgatgatccacaaaatattatctggcctcagcgcccggaaatataa

SEQ ID NO: 400751 - DNA, 831 bp, Salmonella enterica
atgtctatttacgggatatacggttacaacataactaacgttactgatttttcatttggtaaaataaccccaatacattcaagcgcccatagattattttatttaatgagagatactcaaaaactacatctcacttcttttctagaaattgacacggaatttaagagccaagaaagaaagattatttttcaacttgagaacacactaaccttcattgaacaaagacccgtcatcataaaaaacaaactcagagaacatgaagcaataagcaccctcgactcagattatccttcctgtttgtcaagcgaaactcctttacctaaccctgcaaacataattacagagaatgattcaaaagttaaattaattgagggtgcattccaaaaactaattatcaatactgatgactacctttccaaggtgatgcataaaaacatcatggtattttcgaatcctattaactacattgacatttcttactaccttttattttctggtttggagagcatagcaagacaacgcctcatggatatggattcaaatacaaatatagttatcgcaaattacttacagggatttggattcaacgtaaatgctgacaatgttaaaaatgaagcaagaagcatccaaacttattgccacttaagaaatgcacttttccacaatggagagtttcaaacaaaaccaataaatataaatggtaaaaccacaatttataaacttgaagattactacccattattacgtcgccttaactatctaacaatacttaaagagcttggcattaatagcaaaaatatcaattgggattacgtgaattacagaaactag

SEQ ID NO: 400752 - DNA, 858 bp, Salmonella enterica
atgagcactatcctgaaatgggcgggaaataaaaccgccattatgccggaactgattaagcaccttcctgctggcccgcgactggttgaacctttcgcgggttcatgcgctgtaatgatggcgacagactatcctcattatcttgtcgcggatattaatcccgatcttatcaatctctataaaaaaattgcccttgattgtgaagctttcatatcacgcgcaaaaaatatttttgcgattgcgaatagagaagtggcttattacaacatcaggcatgaatttaatcattcctctgaaattactgatttcatgaaagcagtatatttcctttatctgaatcgccattgttatcgtgggctgtgccgctataacttgagcggtcattttaatgtcccttacggtaattataaaaatccgtattttcctgaaaatgagatacgcgcttttgcagaaaaggctcaacgcgcaacgtttatctgtgccagctatgacgaaacactggcgctgctgcggacgggtgatgttgtttattgtgacccaccatacgatggcacgtttaccgcttatcacactgccggttttacggaggacgatcagtatcatctggcgtctattcttgaacgccggtcatcagaaggtcacccggttatcgtgtccaacagcgacacgtccctgacctgttcgctttatcgtaattttacccgccatcgcattactgcaaagcgcagcatgggcgtggctgccggtgatagtaagtccgcagcggaaataatcgccgtttcaggagcaacacgctttaaccgggtttattccacccacggggatgtgtgctcggttattttagaggtgcgggcgtga

SEQ ID NO: 400753 - DNA, 201 bp, Salmonella enterica
atgctgactaaagaaccatctttcgcgtcacttctcataaagcaaagcccggcaatgcactacggtcatggctggatcatggggaaggatggcaaacgctggcacccgtgccgctctcaggatgaactgctggctgacctgtccacaaccaaacaggggaaatcatggctattgaaggcgctacagcgactgttccattaa

SEQ ID NO: 400754 - DNA, 615 bp, Salmonella enterica
atgtcaaacacaaaagaaaccccttacgagatttcaaagttcaatttttcatcacaaagtggtgggagagaggccataacacgcattctgcaagcttatggatttagcacaaggcaagctctatgtgatcatctcggcgtatctcaaagcacaatggctaaccgctggatgcgtgacactttcccacatgactggcttatagcctgccatctggacacaggtatacccttgctttggctaactactggtaagggcaccccggaagctatgccaaatgaagatcatggattgactttgcaattaaatgaaatcacaaatgggattttaaacagcgcagccatgattcgttatgacctacgcctaattcctcaaaacaccacagatccgtttcttgtcaaatttgaatcgacgacttatctcgtcagtgaatgtaaagatgaaatcaatgacggcacttggctgattgagatagatggctttgcgagcatcagacaggtttaccgtctgcctggcgggcgagttcgtgtagaaaatggtcctgcatcatttgagtgtgcggcctctgatgtaaaagttttagggaaagtggcaagcaaaatagataacgtggactga

SEQ ID NO: 400755 - DNA, 549 bp, Salmonella enterica
atgagagttttagtcacaggcgttttaattttgtcatcatttgctgcaatagcagcacctgaacaattcaaaaacattaatgacttgatggaaaactataatgattatccaacttataccgtagacggtaaggattttccatctttcaaaattttgtctgaaaagcctttacacatccaaatctcgccgcgcactttatcagggagttcaacgaaagatattaagtacgaatcagacaaggcagccatttacgcagcatatcgtacgttgtaccaaacgcctgcagacagagtcaaagtcacagtactaccgatttcaattactccccagcctcgaaaggttgagtatatgacggaagataaatatgattttagcattacaaaaaagcaggcaataaatttactccgcaaacacggcaatatattgaatgaagaccagttaatgtccgctaatggtgaatggagcaaagcgtttgaaaagtgctgttaccttgaagaaggtaagcccggtttatcaatatttgctaaagagttaatcacgcaaaggtaa

SEQ ID NO: 400756 - DNA, 909 bp, Salmonella enterica
atggcctttgagcgccacattaaggatcaagcgcaggacaagccctggctgggggaaaaagcagataagcggcgagttactgaccttgttgaaacttggttcaacgctcatggcgttacactctctgatggcctcaagcgtaagtgtgcaatggaatttgcctgctttgctatgggaaaccctctcgccactgaatttaacgccaaactttttgcaacctaccgtgaacaacgtttaagcgggaaaattacacgttccgatcgggtaaaagcagtgacgccccgtaccgtcaatcttgagctggcgtacttccgcgccatgttcaacgaactgaaaagacttgatgactggagtgcgcccaatccgctcgaaaacgtccgggaatttaaaattgatgaggcagagctggcttggctaacagttgaagaagtcaagcaactgctggttgagtgtgagaaaagcaaagcggtagatttagtaaccatcgtcaaaatatgccttgcaaccggagcacgatggggtgaggcggagtcactgacaggcaagcaaataagccccggtaaaatcacttatatcaaaaccaagggcaagaaaaaccgcgccgttccaataagtgatgagctttacgaaatactcccaaaagtaagaacttctaaaccagtctttacggggtgctattctgcgtttcgcggggctattaagcgtgcagggattgaactacctgacgggcagctgtcacacgttctacgccacacatttgcaagccactttatgatgcgagggggcaacattcttgtactgcagcgcatccttggacacactgatattaaggtgacgatgcgctacgcacattttgcccctgatcatctaacagaagccgtggagttaaaccccttaaatctgatttga

SEQ ID NO: 400757 - DNA, 228 bp, Salmonella enterica
atgcccgtgagttttaccgctgaggtggctcaacagcttacgacgctggaaaggcgttatccgcagctacggacatttatttgcgatgtgctggcgcaagatcctcgcccggcttatcgtaagggtgaagagacgggcaaaacctatgccgtctggctgcatgattttaacgtgcgctggcgtgtggttaacaccggatttgaagtgtttgcgctggaaccacggtaa

SEQ ID NO: 400758 - DNA, 1824 bp, Salmonella enterica
atgcttaataactctactttcgattacaaaccacatttgaaatctgcatatatcgaccctatcagaacagtaacggttattgacgatgaatatccgactattgatgatttaattttaagcagcaaagatgacttttctcaagaaaacatttaccgactaaaagaaataattgatatcagtcggagtgaagaatacaactggcttttagatgtttacaatggcaaagagcaaaaggtccaagaaggtactgtatctaaccgtctttaccacagtgatttattaatcttagattatcatttagacggggaagactctggatattgtaagaagtcgatagatattataaaaaacttatctgagaatcgtcattttaatattgtcgcggtacataccaagggttatgatgggcaaaaaggttccgttaatgaagttctgattgatattattacgtcattacagaaaagaccaacaattagtattttaaatgagaaaattaagtccaaggtagatgatagtttagatgaatgggaaatcgacgagccaggaattagggacgatttggttaattccatatcaactatagatttattatccttaattcacaaatatgattccgacttatgttctgggaattttcagaacgaaacccttgatgttttctatgatatatacgggagaaaaccagatagcataaatatacaaaaaccattgattctaaaatggattatctcagaaaaacttgagagatatgcagatcaattcaatgacaagacctcaaaattttttgattggggaataaataatgactgtaattggataaaaacagaagacttatttatcacggtccttggtaaaaaagacacaccaatcagtgaaataccaaaccaacttttagaggcattatcaaattctaagccacatccgcataagcttattttatcaaagctcagaagtgagattgaaagtaatggcagctacgctgcaagtaacatactaaataagaagtttttacaagccgcatggttaaaagaacttcttgagaacaaagatgaacatgcaataaaaactgctgcatggcaagcagttactaaattgtgggaagaattagcatacgaaataaaagtaggattggatcaatttacgatcaacctagtccgagaactaaaaaaaatagactcccccttagattattttatcgataaatctacacttgatgacgaactagaacagatcaaacatgcaaattgtttcagctgttctaaaaaaattacttctcatcatctagttactggacatgtcttaaaattcaagaacaatcactggctatgtttaactcccatgtgtgatcttgttcctggccagaaaaacggaaataatttactccctgttacgctcgtgaagatgtacgatgcgaaagttgcattaatcaacactcgccaaaacatgcaaaaagagcttaatttggatagtctacctccaattaacgacgatgaagctattagacaaatattaaattactcgactcaaaacaatctattgttcattcagcctgagttggatggtaaaatacaaattcttagtttcactgttgggcttgatggaaaagcaaaccctaaagcaatggattgttatatagaaaatcaaggtattttctctgaagagaatacaataacgctcaaatatgctgaaccaacaaataatgaaatgaatgtgacatctgtagaagcaaaaatagttgcggagttacgctacgaatatgcattaaacttattaggtagacttggtgtatccaagtcccgggtaggattagattttatcaattaa

SEQ ID NO: 400759 - DNA, 2949 bp, Salmonella enterica
atggtaatttcagcagcttttcaaacaagagcaaggacaattgatcatctagggcgtgagcaaatagctgattgtccaaccgcaatttccgagctttggaaaaatgcatatgatgcttatgctcgtaatgtttctctaaatatatttgacggcaatacacctgtggcaactttagttgatgatgggcatggtatgtcgttagatgacattatcaataagtggcttacagtaggaaccgaatccaaggctacaaaaaaagatattccatatgaagatagaaacggaatagatcatattcgagcaaagcaaggtcagaaaggcatcggtcgtctttcttgtgcggccttgggctcattaatgcttttagtttccaaaaagaaagatagccctcttgtagcttgcctgctcgattggcgtatatttgaaaacccatatttgatgcttaatgatataaagatacccattatggaatgcagtgataacaatgaattaatcactgttataccggaaatgtttgatgctttgatgggaaatctatggggtgatggtgatgatatattacgagataaccgtattgaacaagcttgggaaaattattctgaattagaaagaaatgaaaataattatattacaaaagaagctatcgagaatactgtaattaatgctttttttgaggaaaggcattttcaatcttggcctgtgtggaataataaaaccactcacggcacagccatgtttatagctggaattcatgacgatttaatagctcagctatcaacagatgctggttcagaagctcaaggtgcagaggttcgggctaaagaacgctttcttcaaacattaaatagctttgttaatccatttaaaagagaaggcgaagaacagattactgatttcaatacaagtgttgtcgcatggaatggtaatctgcaacgatttattatcgatgaagttagaaactttgatatttcaaactttgaccagctagaacatatagttgaaggaagtattgatgaaagtggattattttccgggaaagtgaaagccttcggagaatggtttgataatattacagtcaaacctaaatctgcatataagaccagaaaagatactcgctttggccctttctttttaagattaggcacatttgaagttataagaaaaaatagtacattatcagatgaacagcatgcaaccttcgaccgtatccgtgatcagtttggtggagtaatggtttttcgtgatgatttacgtgttatgccatacggacgtgaagataatgacttttttgaaatcgagaaaagacgttcaaaaaatgctggtttatatatgttcagtaatagggcatgttttggtggtgtatgtataacgaaagaacataaccccaacctacgagataaagcaggtagagaaggtataattgacaataaagcatctaagttatttagagagatagtcgaaaacattttaatagaaattgcaaaaaggtttattggccgcgcatcaaatatacgagatgaaaagctagaggaaataaatgctaaacatgctgctttgaaagcagacgaagatagaaaaaaattattacgtaaagagcaaagaagaatcaaaacatcgattcaaagagatcgtatttctttagaacatttaagaaatgaattttatgaaatatcacagcttctaagcgacaagaataattttaaagaactagaggagctattacagctcaaagaaaacatcgacgtattggatggtaccctaaaaaacctatctttaggttcagtaccaagaaatttagggagtatagagaaagactaccgtcagtatcgcgatttagagattgatgctaaaagtcttttaaagcagattaataactctgtatactcagcgcttgatcattttactgttaaagatgattattcaattgctgagaaagactttcgtagcaaagcagccatattacatgcgaaaataagaaaattttccaataaaggacgcaatatattaaaagaagagatgttgcgtttcgaagagataacaaacaatacaaataaagctttccatgaaaaaacatctcaatatttatccgatctacaagaaaatagaacttcactcaaaaaaacacttgaaaatttagatcttgcttatcagattcaagacattgaaataggtcaaacctacgccccatatattaccgcattagaaagcttaagagaggaaattgatttagaaggcctcgcgatctcttcagtcaacgaaaatacacggttgaagaaacaggtagagcaagtgaatgcactcgctcaacttggaataactgtggagataattggtcatgaaatcgaaggtttcgatatgactattgagcgaggtataaatagactgtcatcaacaaacctcgatgaatatcagaaaaatgctttatcaagtattacccaagcacatcaatcattaagcgattcttggcgttttttaagcccattaaaattatcaggagataaggtaagagctttcttgagtgttaatcattttttcaacagtaaatttgaaaaagattcaattgaattttcttgctctactaatttcctagatatttcattatatgatcaaccagccagaatttatcctgtgtttattaatttagtaaacaactcacgatattgggttaaagaaactaaagaagagcgtcgaattattaggttagatgtacttgatggtttgatatatgttagtgataatgggccaggggttgatcctgatgacgtgtccgaacttttcactatatttttctccaagaaacaaagaggtggtcgcggggttggcctttatctctgcaaacaaaatttagcggtgagtggccatagtattttctacgaaacaagaacagagaaaaaaatactaaatggtgctaattttgtaattaattttaaaggaattaaaaatgcttaa

SEQ ID NO: 400760 - DNA, 1197 bp, Salmonella enterica
atgaaggcaattgacttatttgcgggggctggagggtttagtttatccgcccacaatacaggcgctatagatgttgttgctgctattgaattcgatagcgcggctgcaaacacctacagaaaaaatatgttagaaaggcttgagcataagaccgaacttttacaggaagatattttactcgtaggcccaaaaaagttaagaaaaaaaataaagctcaagaaaggcgagcttgatatgatacttggtgggcctccgtgccaaggtttttccagtcatcgaattaatgatgctggtgttgatgatcctagaaataaattacttttaaggtatttcgattttgtttgtgaatttaaaccaaaagcttttttggtagaaaatgtctccggtttgttatggaagagacatgaagcccatttgaaacgctttaagtttttggcttccaaaaatggttatactttaattcattgcgatgtattaaatgctcgtgattatggtgttccgcaaaatcgcaaacgagttttcattgcaggtgtcagaaatgacattttaaaaaaaagaaataatattgagtttccacctcaagctactcatttcaaccctaattctaatgaagtaaaaaacaattcaaaaaatacgtggagaaccgcatcctctgtttttgagaagatgaatgataacttaattcaaagatatatatctgaatactttcttaaacatacttcttactcaattgatgaagcacaagagctacttgaaaacctagaatatcaagacgcacccataagcgaaaaagatccatgcaacatacatatgataccaactgagcgtatggaagagcgtttcagagccacaaaactcaatggcagtagaagcgatgcaggaaaagaatttgagctaaaatgtcattccaatggatacgcaggccataaagatgtttatggccgcataatgattcacctcccagccaatacaattacaactgggtgtaacaatccatctaagggaagattcattcatccatgggaaaatcacggcatcactttaaggcatgcggcaaggttgcaaacgttccctgatgactatattttttggggtaatgcgacagagcaagcaagacagattggtaatgcagttccccctatgttaggcacaatattaataaatgcattacttaacataattgcacccaatagataa

SEQ ID NO: 400761 - DNA, 825 bp, Salmonella enterica
atgaatggtgcgatgattatgagcgatttacaagtaattgaagagttaaaaaaactgaaaggcagattacgtagcgaagttgcccctgcatatgactcgcgaggccgggagtttggccagaatcgttttagtgctctgaaaaataagactattaatatacttaatgaactcctgcctggtgaagctcagcgctttgaaaaagctatgattatcggtgcatgggctatgaggtgggatgaatctgaatcacagtatttctggaagaatgaaggaagacgatatgaagcatacattgattcgctactgatcgaccttcaaaacggagaatactcattacctaatgaaaccagcgataatcaggacaagggaaatagtgttttagcgaacaacaaagtatttattatccatggtcatgatggagaggcaaaagagaaaactgctcgatttatagaaaaattaggacttgaagcaattattcttagcgagcaagcaaatcagggtaaaacaattattgaaaagttagagcattatacggatgtaggtttcgcaatagttttatatactggtgatgatgctggtaatacagaagcagaagctggtataggcaatctgaatgcgcgagcaaggcagaatgtggtatttgaacatggcctgctgatggggagattggggaggcataaagtcattcctcttgtgtcgggaacgcttgaactgccaagtgatattcagggcgtcgtatacatcaatgataaaaattggcaattagaagtagctagagaaataaaatcggcaggttatgatattgacatgaataaagttctttaa

SEQ ID NO: 400762 - DNA, 1302 bp, Salmonella enterica
atgtcagaaagtctgcgacctaatgtcactcaaacgttacctgacgacagggaagagctttaccaccttgtctggcgcgagcctgcggagcgaataacttccctctatagcatcagcaaagaacaactgacaaaacgatgcgttgagttacggataccgagaccgctcgcaggatactggaaagcactggcgaaaggggccgctccgtcgataccagcactgcctgatttggagaagggcaagatagaaaaatcctccaaaaaaactagccaggccattcctccccccacaaaaatatcatcgaaagtagtagcgccagcaccgcgaaagcgagcaaggacagcgggtagtggctatgcactgatcgatgatctcaaaacttaccttcccgtctcttccgtcacaaaagacggttactacaaaccaacgaaaaagaagctactcgatctgaatgtttcagaaacgggattcaacagtgctatcgattttctgagtcggttctttgctgcactgggaaagcaaggttattgggtaaggttagctgaaggaaatgaagggcttcattgtcagggcatagacatcaaagaagatccaaaagagggcggtttgcgctatgacagtttatggcgcccttgttcagccagtattatctgcattggggatatgctgttcgcctttaacctagctgaaatgacggaatatgttccagcaaaagaggttgatggtcgatacatccgcgatgaaacgatgatccgcttgatgaggggaaaatatgacaagccatttcgctatgtcattaaacatgccttacctaccggacgattctttctacagctctactcgccatactcgtcaactgactggcaggttgagtttcgccagacaaagcagtgcgggcttataagccagatcccgaaaatcatttctgcgatgcatgaagctgttccgttgattaagaagcaattggaagaggcgagggtcaaagctgaagcccggcggatccagtgggaactggatgagacgatatatcgggaaaaggagcgaatcagaagggaaaaagaggcatatagcgctagcttagccaaactgaacggtatcatggtacagtgggccgaagataagcgtatagagcagtttctcagtgaagcagaaaaggatgtggcgagtcttgatgagcagcagaaggtgaatattatggaacgtctacaactggcccgtaaattcttgtcagagcatagagcagttgagttattacaaaaatgggaaactccgcaggaacgattaggcaaaaataaaatttga

SEQ ID NO: 400763 - DNA, 1575 bp, Salmonella enterica
atgggtgagataaaagctgaatttcgcatcatagatagaaaaacatacattaatagtgaggctagaaatgttatatatttgaggaaggattcatggaatgactatagctataggactttgtttaatatggaagttaaagatgctgatgctgtccttcataaaattggtggtgtaaagataggtttttttggacaaacaacagatattgcaagttatgaagaaataaatagttccaactttactaagctggatgacagattttttgctttaggtgatagcctggagttttatcaaaatataatggatttaccagatgaactaagttcatggattttgacaaacataaatgatgttgtaaaaaataatagattaatagataaggtattaaacgaagacgtttttaaaacttctttgttgagatctataaatattaacacgttgaagggccaatttacaaggcttgtgaatcatgatgttttgttaactaaatatgatttcgactatattcgaaaagatcattcttcctttaatgacttaaaacttaaatttaaagtaattcctttctcaacgccaccaactaatattcataccataatcggtagaaatggggttggtaaaactacacttttaaatgatatggtcagtgatgtaatacttgaaaaattagattcaccatcccatttttatgataatgaacagttcgatgagattgataagagttattttagtgcagtaatctcagtttctttcagtgcgtttgaccctttcatcccaatgagggatcaagaagacccaacgaaaggaacctgctattattatattggccttaaaaaagttagtagtctggctaatggattttcattgcgtacggaccaggaattgagggaaatgtgtgcttctagtctagaagaatgttttctcgaccaaggacgaaaggatttatggatttcagcaataaaaagtatagaatcagataataattttgctgagttgaacttaactagactatcgctattaaaaggtaaaaaacttaaaaacgagtgcataaatttgatgaggcacatgagttctgggcatgcaattgttttcttaactcttactaaactaatagagaaaactcaagaaaagacccttgttttgtttgatgagccagaaagtcatctacatcctcctttattgtctgcacttattcgagcagtgagtaatttattagtgaagagaaatgggattgcaataattgcaactcattcaccggtagttatacaagaagtacctagctcttgcacatggattctcacacggtatggaaatgaaatgtctccatctcgtcctgaaaaagagacatttggagaaaatgtaggattattaactagagatgtttttaggctagaggttgagcgatctggctaccataagttactgaaagatagtgttgatgatgggaaatctttcgagcaaataatgtctgaatataaattccagattggagctgaaggacaagcacttctacgaagtctgatacttgttagggacatggggcatcataataaaaataattctgatgatgaggagtga

SEQ ID NO: 400764 - DNA, 867 bp, Salmonella enterica
atgagaaaaatctcgtatcctcgtattgactgccatgacgtgtatttaacatgccttcaatcggtagctaatactgagcagggaagaggatataaaataaaattaactgctatctcacccttggtaaaggcggaatgggatgcatacgaagatagaacggggtctactgatttacacttattccaattctgtgcgcatggtaataaaaatcaacgaattattaatgatgtgacaaaacacgaattaatgacgttatatacagagtatatggttaaagggcgagaatccgcccggaatatttatgatatattgagatcctcttccaatgggctatgtcctctatgtggcataggatttgtgtcaactctcgatcattatcttcctaaagcaagatatccagttttttctgtgaacccaaaaaatttgattcctgcttgtgatacatgcaacaaaggtaagggaagtagcacttactctaccaaagagtctcaacctttaaacccttacttctcatcagatattttttatacacaagattggttgaaggctagagtaataaaatctagacctctttcttttgaattttatgtcgatcctcctgacgactggtcgccagtagacaaacaacgcgtacgaaatcattttacagattttaatattggtgaaaaatatagcatacatgcatcattattcttggattcaatcaattcaattataaacatgattaggtcgagtggaggaacgcctgaattagtaagtgagcagtttagaaatagtgctaataatgaaatgaacaatactctgctaagagctatgtatttttctgtgtccgccgatctggaaatatgtgggggagagtttttgtaa

SEQ ID NO: 400765 - DNA, 1125 bp, Salmonella enterica
atgcctatcacagcctactccaaaacctttaaacgagaacttgatgcttctcagctcgaaagtctttttaacgaacatcccattagtaatgaaatagctttcagagattttgtcaaagtagatatcgagtgtcctgcatgtaatgttactggtggacattatgttagagaaggcatatcactaactaaaggacataaagttaaacaagcctattttgcgttcagagatattgaaggtaatgatagtcatcaacctttttgcgatttttataccggtccagggaagcaaaatttaatatcaaatgaagggagaattgattttcgaaaatctaattcactcataacaagaactattgcaagaatggtatgtaatggtatcgcaaaagaagtattcactcaagaaagcatacgtaatatgcgtcaatggtttttggatttacggcaaaatggcgatttcacttttaatttaaatcctcacatggttgggatttcaagagcatcaatattcagaagcgaacgtaataatacgcaatatattgtcgatcctattgcatcaaaaaatgagtggtttgatattgacaaagaggtttatcagtcattgtacttcaaattcccatttttaaaattggactatcagaaaaacaatcacctttatgatataagacttcaatcagttataaaaaaggcaaaaagcattatattaaaagattctaacattataactttcgatcgcgccatattaaaagaaaaatatgaacaagcaacccaattttcgctatacattagaagtcaagaacctattctaaaaacaaacttaacttattcaatttcagcagtgagaaacaataatcatttaatggcactttctgcattactactattcatctctgaatgggatagtacactagctcaagaaaaggttaatcttttacttcagaatgacagtgccattgacttgaatgcaggtaatgtaattgggctaaacccttttattcattatagtgcgtggattattattaaagagttgaatagcttacaaaagctatatggtcaacatattgattttgacgatgagtttaactcagaaaaagccagactaagcaaactatataacatatcaatataa

SEQ ID NO: 400766 - DNA, 684 bp, Salmonella enterica
atgcccgaacatgcgccgccacacccggtgcgccgtcccggattgctcggctggatcgcattgctgcccggcgtgctggtcggcttttgcttgggcacgtggatgctggcaatagcgctggagtggctgggtgaggcgtttttatggcggaacacctgcgccagccacagtgagcaggtattgcaggcaacatggcagtggtggcggggttccgctggcgcaccggtgtggttagtagaaaatctggcgcttgccagtgatacgttgcggcaaggactcgcggcgctggttgcctcgctcaacggtcaaagtgggttgttctggacggaaaccgtcactacggtgatccgctgcgcgttactgtctgcgagcaatgtcaccctcacctttctgctacggctggcgattctgtggcaggcgctaccactgtttgctctgactatcgtcatcgggctgattgacggactggtacgtcgcgacttacggagattcggcgcaggccatgagtccgggtttgtttatcaccacgccaggcgtatgatcggttacagcttcgcggcaacaggattaatgtggctggcggtgccgttttttattgagccggaatttgtattagcgccaggttctgtggtcataggattaacatcgtccttagctttttcagcatttaaaaaatatatttaa

SEQ ID NO: 400767 - DNA, 609 bp, Salmonella enterica
atgcttaaacgtctggcctacctgatagcaggcagcgctctcctgctgctggcggcggcgatgttctggtgtttcaaccgcctgcataccctggcgctggcgcaacagcagacacaacgccagatggcgcaatggcacaaccaaccgcagccagacgacaattaccgagaactggaggttgccgtaaaagacattaccgggcgcatggaagcccttgctaaacagcttaacgatgccgccagcgctcagaccgaacgacttcaccccataaccgaacagctcagagtactggagggacaaatccagaccttgaacaccagttatcaacacctgcaacaacagaccgccacgcgcagccgcgccacggcaaaacgccccgtcccatctccgctttgggccgcaaaggcccctttttcttttattggcagcgagtttcgcgccgggcggcagttcgcagtcatcgcgccatccggctatcgctcattctcacagcttcagcttgttgcccccggcgacagcgtgcagggctggcaattgctgcaactggacggcagtcacgctactttccgtaaaggcgggcagcggctgacgctgaacgccggaggataa

SEQ ID NO: 400768 - DNA, 585 bp, Salmonella enterica
atgacagtagaaagtgcacttgagatagtaaaaaaatattctatacagtcccttatcgttattgtcatatgcatacctattgcaatctttttcatcaatgaatacaaatcacttcaaacgttaaaagatgctcataataaagaggtctatgccttttatgaaaaaatctcagcaaaagaaaatgaaataacacaaaaacagggagagaattataaaaaagaaatttaccttgaacaaatgaaaaaagaatatgaaagcaagcttgctgagttagaaaacatcagaaaaaatataaatagtgaatatacagcacttgcagccaaagaaaaggaatttactgattccaatcagaaacgtcttgccagtgaaaagcttcaggtaatgatgtctgagttttcaagttttggcgttgacttgggccattcgccaaagtgtgatgatagtgaagaaaaatggaaaagatacaacatggcaaatgctaagttacgagaagctgaagcctatgctcgcgcgaatggcttatatgacgcgtataagggatttttcacttcgaatgcaccatttttaatctcgtcatgtggttaa

SEQ ID NO: 400769 - DNA, 1689 bp, Salmonella enterica
atgttaaaaatgggaataactattattaaacctgattataatgaagatttcatcactttacgtaaggtttttatgcaaaatattatctcagtcatctgttgtatactaatgattagctatttttctctgggatatgcagcggatattcccaacggagtggtactggcagagaaacaagaactggttcgtcaaataaaagatgagccagcttcgctagatccggcaaaagctgtaggattacctgaaatccaggtaatccgcgacttgtatgaagggttggttaaccagaataaaaaaggcgaaattattcctggcgtcgccacccagtggagaagtaacgataatcgcacctggacgtttacgctgcgagataatgcaaaatggtctgatggcacgcctgttactgctcaggattttgtctatagctggcgacgtctggtagacccaataacactttcgccattttcctggttcgccgtgctggcaggaattacaaacgcaaagtcgattattaatggtaaaatcgcgccggaccagcttggggtagaggctattgacgcgcataccctgcgtatccacctggataaaccgttgccctggttcgccagactgaccgcctgttttgcattttatccggtacagaaaaaaaacgttgaaagtggtaaggaatggacacagccaggaaaattgattggcaatggcgcatatgtgcttacagagcgcgttgtgaatgaaaagctggttgtcgagcctaataaatattactgggataatgataaaacggcgttacaaaaagtaacatttttgccaatcaatcgagagtcagaggcgaccaatcgctatcttgcgggtgacatcgatattacagaaacgtttcctaagattatgtaccaacaactgatgaagaatattcccgggcaggtatatacgccgcttacattaggtactgactattatgcgtttaatactcaaaaggggccaactgcggactctcgcgttcgtcttgctttaagtatgacgattaatcgacgccttataactgaaaaagtgttaggtacaggtgaaaaacccgcctggcattttacccctgatataactgcaggatttacgtctacgccttcaccctttgaaaaaatgagccaggaaaaacttaatgctcaggctaaaagtttacttcgtgcggcaggatatggaccgcaaaaacaccttaatttaagacttctttacaatacctcagaaaacaatcagaaaatcgctattgctgtggcatcgatgtggaaaaaaaatctaggagtggatgttaaattacaaaaccaggagtggaaaacctatatcgacagccgtaataatggaaactttgatgtaatccgtgcctcttgggtgggggattataatgaagcctcgactttcttgtcgttgttaacctccactcattcaggaaatatttcacgatttaataatcctgcctacgataaaatcataatgcaggcaatgacagagcacaccttgcaggcacgtaatgcagattataatgcagccgaaagaatacttcgggaacaggcgcctattgctccgatttatcaggaaactaatggaagactaattaaaccatgggtaaaaggatatcctattactaatccggaagatgtggcttatagtcgcaccatgtatattataaagcatcaatga

SEQ ID NO: 400770 - DNA, 162 bp, Salmonella enterica; identical to SEQ ID NO: 379332

SEQ ID NO: 400771 - DNA, 702 bp, Salmonella enterica
atggcgaccattaatgcacgtattgacgacgatattaaggctaaggccgatgaggtattaaaaacgtatgatatcagccatacccaagctattactgccttttatcagtatatcgcccgtaatggttgcttgcccttcactattaccatgcaggtggaagaaatggacgacaagataatacagcagttcaggaaagccagtgcgattcttaattcattccgaagcaatattgatgtttccggtaaactggtctggaaagatattcgggaagaatacgacagattgaaaaaattacacgtaacagtatggaatgaaattccacaaagtggctccagatacagatttatatcggttgcagatgcgcttaaagaggcaatttcggtattggttgattttaaaaaatttggttatggctatcaggaaattgaggtttcatcggaggaaaatcgaaaattcagcacttccgtggcattgtttgaggagcagatcaagaaattccagatgggtataggtgaagactacttggctgaaacagatattctggcgctggaccaagaggttagaaaccttgaaagatggttcaatgaatctcgtgatgaccagaatctgagcaaggcagaaaagaaagccattaccaatgagtacaccataaaataccaaatgcatgaactggttgggctcagaagagtatccgtgcgctga

SEQ ID NO: 400772 - DNA, 873 bp, Salmonella enterica
ttgcactttggtgtacgtatcacagggaaagaacgcgccattatggcgaaatacatccagtttaatcagccacgcgccatgttctggctgggatttgacgttgaccgcatcggtgcagtcattgactggagcaaccgcaacccccccgcgtctacactgaccatcccctcccctgaaaatggacacacgcacctactgtacgcgttaaaaacctcaagacacactgcgccagacggaaaaataaaaccgttacgttacgcagcagctgtagagaatgtactacgtaaaaaaacaggcgctgatgctgggtattctggactaatctgcaagaatccgaaccacagtcactggaaaatagctgtatggcagccaaaactctactcactggactggttagctgactcacgcgatctgaacgctgcgaacgacaaagaaattgtcgctgattatgatttaggccgtaactgcaccctgttcgataaaatccacaaatgggcatacaatgctatctgtcaggggtggcctgagtatgccccatggctacaggcctgcgttgaacgtgctaaagcctacaacctgcagttctccgcacctttagacgagaacgaagtcatgggaattgctaaaagtgtcgctaagtggacaagtacacatttttcgaaaaattcatttgatgactttgttcgaaatacacacacacctgagcttcagtctgttcgatgggctattggaggtaaattaagtgggttaataagccgaggagggtggcgtcctctaggtgtgaaaaataagaaatcaatatctaatgaaaaaccatggatttcattaggggttagtcgttcaacttggtatcggaggtataaatatgagtga

SEQ ID NO: 400773 - DNA, 177 bp, Salmonella enterica; identical to SEQ ID NO: 21678

SEQ ID NO: 400774 - DNA, 303 bp, Salmonella enterica
atggaagatgttattctgctggatttcctgcctaaagagctgggcttcgatatgaatatgcatattctgtcgttcgaaccgggcgccagccacggctatattgaaacccacgtccaggaacatggcgcttatatcctttccggccagggggtttataacctcgacaacaactgggtgccggtgaaaaaaggcgactacatcttcatgggcgcttattccctgcaggccggatacggtgtaggtcgtggcgaagcattcagctacatctactccaaagactgtaaccgcgacgttatgatttaa

SEQ ID NO: 400775 - DNA, 654 bp, Salmonella enterica
atggctgagtattatccggcagagtttggtggcactgcttttaactgcccgaattgtggcgcttattctcaacagcgctgggtccgcttaaaatatggcgctaacgggatttatgagacacctttcgccttttctaaatgtgaacgatgcaatgagaaagcttattggtatgacgaaaccatgattataccagcgtcagcaaacgttgagatgcctaacccagacatgccagacgactgtaagtccgactacatggaggccagaagcattgttaacctttctcctaaaggcgctgccgcactcctgcgcttaagtcttcagaagctgatggtccatctcggtgagccggggaagcatatcgacacggacattaagtcgcttgtagccaaaggattgtctccattggtccagcgagctgctgatatttgtcgtatcgttggcaatcaggcggtccatccgggtgaaattaatattgatgacgaccctcagttagcgcatggtctttttaagctgctgaacattattgtcactgagcagattaccagaccgaaagaagtcgaagccatgtttaacagcatgccggaaagggcgctcaagggcattgaggaccgggacaggaaggcgagggaacagcagcaggcagctagcgagtaa

SEQ ID NO: 400776 - DNA, 492 bp, Salmonella enterica
atgatgttcaacaacaacaactggaagctgtcagtcaccgacatcaacctttatgaaaacactgtgagtctggacggtcagtcctatccgttgtcgcttgcgatcaagaccctcattccgggctacctgtccggcctgccagccaccagtcgcgaatcaatggaactgttagagaagctggctgaagctggcgtgacaatcggtaacttcttcagtaatgacctgatgaacgcctaccaacgccgccagcagaacaagcgagccgaagctgagcgtatcgctaaagagcagcgcattcaggccgagcgtatgcgtgaagagaacatgactgatgcagagtggcagaaagagctacagcgtcgcgaacaggtcaaagctgaacgccggacctacggtgagaacctccgcagtgctacccattccgctggtcgctcccgtgcttctatggtcgctgacattgagtccacggacaactggatggacagcctgtaa

SEQ ID NO: 400777 - DNA, 183 bp, Salmonella enterica
atgatgcgtagagggtgcacacttctgaaagatggtaggctccgggcttacatttggctgggcggcgttcttaggcgtaagtatgtgaccagtaaagcagatgcttgctcgtggtttgaagcactggagacgctacatactcaaggcagattacacggtagaggtcagttaaaacttagttaa

SEQ ID NO: 400778 - DNA, 165 bp, Salmonella enterica; identical to SEQ ID NO: 377078

SEQ ID NO: 400779 - DNA, 183 bp, Salmonella enterica; identical to SEQ ID NO: 375745

SEQ ID NO: 400780 - DNA, 1296 bp, Salmonella enterica
atggctaaggctgttggtcaacagatgaagcagataggtgaggcggtaaatggctatatcaatatcagatatgacaagctttctacgctgacgtcaagcagtagtcagtcaagcgatccgggtccccgtacttgtaatggttcaggttgtgaaataacgtatcaaacattaatcaatgaaggattattaccaacagcttacactggtataaacgttaaaaaatctccatataaaatactattaaaacgtgatggaactgctcctaactatgttattaatggtcttataacgacatcgacggcatggattgaaggcggtaaaacacgttatgatttattagggaaagccatgcaaacagcaggtatagatagcggtatgactaaaacaacatctattgcttctgggtatagtggtcaatggacagaaacgtctgctaattttaataatattacatccgctggacagttagcatttagagttggttttaatagtgcgttatattctgtatatttaagacgggatggaaccttgcccatgactggcgatctaaatcttgacggacataatattaacaatatcgctaatatcaatgctacaggaaatattacgacgacaggcgacctacaggcaagaaacattaaggctactggaaaaattgatgcggacggtgatatttcatcaggaagatatttgattgctaaaagcaaagatgaagatgcatcaataaaaattggaggcgatggcactggaaatcataattttatgtttgaatctcaaaaaagaacatctgttgttttttttccaagcgttaattctgcattgttaacttataaatttcgtgggaatataaacatattaagtccttctggggattcagttggtgttaaattaaatggcaccactggaaatatcactgcctctggaaacatagaggccgcccaaaatgtcaaaggcgctacattagaatccactggacgcgctacggtgggtgaatttgttcaattgaacggacaggctgaggttggaaaagtgtgtcaatctaatggattacaaggaagaacagcaaaagggaaaattttatcttgtgttaatggtgtatggaccggatcggttcaaataaataatagtcaatgtaaatggttttccccggctaatgctttttcatactttggagaatacagtgggcaacttcatgaaaaacctataatttgtccagcaggatatattatgacaggatctaaaatgtggggatgggcagaagccattatactctcctgttcatttttcatatcctga

SEQ ID NO: 400781 - DNA, 459 bp, Salmonella enterica
atgagggacgaaaagagcttagcgcacacccgatggaactgtaaatatcacatagttttcgcgcccaaataccgaagacaagcgttctatggagagaagcgtagggcagtaggcagcatattaagaaaattgtgtgaatggaaaaacgtacgaattctggaagcggaatgttgtgcagatcatattcacatgcttctggagatcccgccgaagatgagtgtgtcgagcttcatgggatatctgaagggtaaaagtagtctgatgctttacgagcagtttggggatctaaaattcaaatacaggaacagggagttctggtgcagagggtactatgtcgatacagtgggtaagaacacggcgaagatacaggactacataaagcaccagcttgaagaggataaaatgggtgagcaattatcgatcccttatccgggcagcccgtttacgggccgtaagtaa

SEQ ID NO: 400782 - DNA, 132 bp, Salmonella enterica
atgaatatctgttgggaaatcctgggcattgaacctaccacctatctggaatgtatccgtcaggcttatcttgccctgttgccctcattccaccctgagagcgatccgcagggttttaagcgattgcgctag

SEQ ID NO: 400783 - DNA, 318 bp, Salmonella enterica
atgaaaacctgttggcaagtccttggcattgaggccaccacggataccgacgccattcgtcaggcttatctggcgctgctgccgtcatttcatccggaaaccgatccgcagggttttaagcaattgcgagaagcctatgagaatgcattgcaggggacaacatcgcccgccattacggtggttgatgaggatcccgataccccgtgggtgaattatctcagggagatattcggtgatttgctggcggatggcgaacggcgctttcagccgcaggcatggcaggagtttatccaacagatcaataaattatcgatttaa

SEQ ID NO: 400784 - DNA, 336 bp, Salmonella enterica
atgcatccacgttttcaaactgcttttgcccagcttgcggataatttgcaatcagcgctggcccctatcctggcggaccaccattttcccgccatgctgaccgcagagcaggtctcgacgcttaaaaatacggcgggactggacgaagacgctctggctttcgcactgttacctctggcggcggcctgcgcccgtaccgatttgtcccattttaacgtcggcgcgattgcgcgcggcgttagcggcaactggtatttcggcgcaaatatggagttcctgggcgccaccatgcaacaaactgtgcatgctgaacaaagcgcgattagccacgcctag

SEQ ID NO: 400785 - DNA, 381 bp, Salmonella enterica; identical to SEQ ID NO: 373525

SEQ ID NO: 400786 - DNA, 210 bp, Salmonella enterica; identical to SEQ ID NO: 373825

SEQ ID NO: 400787 - DNA, 153 bp, Salmonella enterica
atgggcagtatgacgcgcggcgagtggctgatgctggcgaccgtcggcgtgttgctggtgctatggatttttggcagctcgctcggcgtggatgccacgacggcctcttttgtcggtctctcgattttattactgagcggcgtgctcacctag

SEQ ID NO: 400788 - DNA, 432 bp, Salmonella enterica; identical to SEQ ID NO: 373868

SEQ ID NO: 400789 - DNA, 366 bp, Salmonella enterica
atgttttttttaaagactctcataaaatatttgaaatcatcgcaaaatgaggtattggcaatgctagcaagatatattgttattgcaatctatggtctggatacattttttggaaaagacgtaatttttttagtttttgataaaaagaacaatagcgtttataattattttgaaagcgatagtgaagctttcgaatgttgccatgaacttaataacaaagatcttcattgccatattcttattgaagcaaaggcgacatataataacaatgatattaatataaactctccctatatcaaggaaaatgacaacattattattgtgatttctgaatacctgaagataattattgaaaaaatgatatag

SEQ ID NO: 400790 - DNA, 231 bp, Salmonella enterica; identical to SEQ ID NO: 26461

SEQ ID NO: 400791 - DNA, 162 bp, Salmonella enterica
atgcctgaagtaacaccttttcaggtgcttattgtggacgaccatccacttatgcggcgaggtattcgtcaattactggaactggacccggcttttcatgtcgttgccgaagcgggtgacggggcgagtgcgatctggcgaatcgcattgagcccgatctga

SEQ ID NO: 400792 - DNA, 387 bp, Salmonella enterica; identical to SEQ ID NO: 382213

SEQ ID NO: 400793 - DNA, 561 bp, Salmonella enterica; identical to SEQ ID NO: 379871

SEQ ID NO: 400794 - DNA, 270 bp, Salmonella enterica
atgtccctgaatatttccagatgctgcaatactaccagtgcttcctgtccccggagtaatagcaaaatcaccttggttggtttgtttcccaaaaacctgaagccttgtttcagtattggtggtggagatgctaacgattatgagttcagattagatactgttaagccgctaaccatctggcgaaatggtggcaccaatactgaaactatcaccaccaccgttatgaccattaaattgtccaccggatgtgatacttttacctgtatctaa

SEQ ID NO: 400795 - DNA, 717 bp, Salmonella enterica
atgcaattggatgaacattcaagaaaaattgctgcccttgttgcgtataatgaaaagcaaataaaagaaataaacaggataattactctgcttaatgaaagagtgaatgacttaaatacctttacagatactcttgaacgtgaaggtaaagttgtatctggaatttcttattccttgagggatagtgtgtctcatgttgatttttatcttaataaaggaatggaagaagtatcctgtaaattacagaaatctgtctcagacacactaacatcattactccgtgaaaaattatctttcacacttaatgatgtaaggcaagagtggactgattttgaagagcaaacaagtaaagagataaaggaatcattaaagcagacgaccagagatgctgaagttgcgacaggtataattagaaaaacaatggagaagtatacagtaacaaggatagtcgaaaaggtacttgtgttgcttgtattatttttattgttaatgattgctcctagtttttatgctgaatatctcaaaatgaatatcggttctctaatggaagaacagaaaaaacatgaatctatgttaaaagagtggaaggaaaaagcaccattggcagagttctctaagtgtggagagtatagagacgtatgcgtgttagttgatgataaaagcggatattattccaatgaacaaaccccaaataaaaaatatgccatactgaaatag

SEQ ID NO: 400796 - DNA, 573 bp, Salmonella enterica; identical to SEQ ID NO: 24914

SEQ ID NO: 400797 - DNA, 951 bp, Salmonella enterica
atgaatgactttataaatgaatgtatatccgctccgagaataaatggcatggaagaatttttctcatcaactgcatcaggggaaaaacacaaaccttttagactagtagaaatagatgagcggctttttcattcttatgattacattaagtttggcaaaaacctcacaaaaaacagcggccctttcgttaatcattatttttgcagcataccatacagcaaggaagaagaatgcagattaggaacgacagtaataaaatacgcaacaacactaaataaaaaattaaacgcatggtgtcttggtatggctgagggagcaatggcaagaaccatttcagaattatcaaaaggaaacatacaaacattaacaaccagtccaacaaaagaaaatgaacatgcattttttaattatggctcaagtgaaaatgcttattttatttgcactccttttttcctgttggaagaaaaactgaaaaaatcaaaccttaaccaatttaatcaaggattcgatattataatagaagataccacatttcaaatgtactcaccaaacagatctggtcaaataaaccacgtaaaaagactattaaataatgatggtattttcatatttacagaaaaacatagctcagaacatgatgaatatcaaaaaagagaaatccaaaaagattactcattcaaacaaaggtatttctcgaaagatgagattaacacaaaaaaggaaatcgtactcaacacaatgaatttaaatgaagttagtgttgatgatatgatttccgcaattaaacaacattttaaatacgcatcaatatattggaatagcggaaatttttactcaatcgccgccagcaattcactaaagcacatatccacatttataaatttattaccgaaagccgcaattcctatggagtatgtatatgaaaagctcccgcgaaatatatcatggtaa

SEQ ID NO: 400798 - DNA, 1770 bp, Salmonella enterica
atggacgaattaaacattggtaaagtcacacaagtaaaaggaaccactgtcaaggcaaaaataaaccatgacttgtaccaatctacatattttcacaatggaaaaatacttcgtggcatatctataaatgaatttgtgttagtccgaaaaggttatcaggatatagtaggcaagatcattggcgaggaaattgttgagaattttaatattagaatcgatgatattgaacaaaaaaaatatgaaagatttgttgatcttaatattctcggttatttttttgaagggaagtttttctctggcataaaataccttccaatgataaatgatagactgtatttgatttctgatgataaaatatctgagatatacagctttagcaaaagcactaaaaccccacttattaacattgggagatccatgttagaggaattaccaattaacatcccaataaatggagtttttaattctcatattgggatttttggaaatactgggagtggaaaatcaaatactttagcaaaattatatcaatcacttatcaatcgaattgacaacatagaactatttagtagcaaatcaaaatttgtcttaattgatttcaatggggaatatgggactcttgagagctcctttccagaactgtgtcaatcaataaagcttagtacaaaaaaagatggtggtaaaattcatttcggagaaaaagagttttgggatgatgaactattatcagtgctattctcagcaactgaaaaaacacaaaagccattcttaacccatctaataaagagcaagttaaaatatgatgatgaccttggtgagtatctaaaaagaactattaaaataatgtttggcactaaccctcacaaagagacagttaatttacttaaaagcctaataccttattttgaggaaggtgatcaacaaaaaataatagacgaactatctctatttacttggcattcaggtcaagataagtatacacaccctgatagctggctcgataacacagctgaagttctgcaacacactcaatctacatacaacagcaatttcaatatcactagtgtatttgatgaaattgctatacgtgcgacactacaactaataaactcagtctccagaaactatgtccaatatgaacatatatatccactaataaataaaataatagctatgagctcatctttggctaaagtcatagaaattaatgatgttcagcaaaataataaacccatatcgataatatcccttaaagaatgcaatcagtccataaaaaaaaccattccaatgatgattgcaaaatgttctttcttggaacacaagtcctctgacaataagatggaaagctttcatttgataatagatgaagctcacaacatcctatctgaaagctctgtaagagaagctgaaacgtggaaagactacagattagagttgtttgaggaaataataaaagaaggcagaaaatttggctattttgtcactatttcaagccagcgaccatttgatatatcgccaacgatcgtgtcacagttacataattatttcatacatcgcttggtaaatgaaaatgatctttatcttcttaaaaacaccttaagtactttggatgcagcttccagaacgctcataccaacgcttcctcctggtgcatgcataatttcaggaacagctttccatactccgctgcttgtgcagatcgatagacttgctgaagagagtgccccacaaagtgacacgcttgatttagagaatttatgggatctttaa

SEQ ID NO: 400799 - DNA, 1119 bp, Salmonella enterica
atgacagaaagtctcgattacatcgatctcaagaagctagaacttgatacgaagaaccctcgcctccctgaaggtgtggagcgaactccagaagcaatgctgaatcacatcgctttgactacatccatcgaagatttgatgaatgcgatagctgaaaatggattctttcctggcgagccccttatcgcggttaaagagggggataaatacattgttgttgaaggtaatcgccgcttaacggcagttaaacttattcataatccatatgaatgtgaaagaccaagttctcggatgatagaaatcgccgatggtgcagcaagcaagttggacacactagcaaagttgcccgttatcgtgcgtgatacaagagctgaaattttaccttacttaggtttcagacatatcacaggcgtcaagcaatgggaaccactagcaaaagctcgttatatagaacaactttttgaactgacttccgatactttacctactagtgatcgatatcatcaagttgcccgcgcaatcggcagtagaaaagatcatattaagcgaagccttgatgctttagctgtttacaaagttatggaagataataacttttatgatattgaagggttagatgaagaatctatcaaattttctatattatcaacagctttagcagatgagaaaattgggttctttgttggaatttctgaaaaagatgaagatgacgacatttcatcaaatgatgtaattattcatccagaatatatagatagagaaaacacaaaagaacttactatctggctttataaaaaagacgaatcaggaaagacaaaagttggagagtctcgtaatctacgaatgctatcctcagtaattgatgaccctaaagctttaacatcttttagaaatggagcagatctcaaggtcgcatatcagttgaccgaaaatttaaagcaagactttatatcattactttacaaagctgaatctgcgttaattgaagctgctgggattgtcgctactattgattacaaccctgaggcgttagaagttgcaagacgcttaagccagaatgtcaaacttattggtaatacgattaaagccaaaaaggtttctgacgatgaagatttttaa

SEQ ID NO: 400800 - DNA, 993 bp, Salmonella enterica
atgaagatttttaaaattggagatattcatcctagcgtcccacatctgtttgcggaccttgctgaacttgctgccgccataaactacactggacgctttgacttacataaaaatgacttaataaccataaagagtcaaagtaatacaagtgtagatgatattgatcaagaggatcaggaagaagaaaatgaaggaagtgatgctgagcgcaatgatcgtttagagagacaggttgaagatgtctggacacagctagattttagacaaaatttccttaaagatatttatccgtttgttgtaaatggtgattttatttcactgaaagaaaacttaacaaatatacaaaggatatatctgtttttgcttgcatgttcaagattacgttcatttaaaaaagccaagaaaggaataatacaattttgggctaagaatttcgctgttgttagcaaactttgcacaagtgcactactcccaccacatgcaacagtgagaatttttgatgctaactctgatgaccgtcggacctattacggcactgatttgagaaaagcattaaaaataatgggaagagatttagctgtcccttatattaatgaacaagaatgcgagagggcaagttcatctggagatgccggttttgatataatagctacagttgaatttgatgacaaactaagtagcaattatgctttattaggtcagtgtggtgcacaagaaactgaatggcctaaaaaaactttagaagctcactcactaaagttacgaacatattttcaagtgcattttgatattccaacactaatgtttactccaattttctatcggaattctaatggcgaatgggttgataatagtccttgtgcaggagttttggtcattgacagagcaagaatactgcaacttctcaaaaagacaaaccattgccctcaaatcgtagcagaaaaatggttcgtcgagtttgaacaaattatcaatgatctaaaagtcgattga

SEQ ID NO: 400801 - DNA, 939 bp, Salmonella enterica
atgccaactgtagtgtcgcttttttctgggtgtggtggttctgatgctggagttttgagggcagggtttgatgtgctcatggcaaatgacattttaccttacgcccgtgatgtgtatttggctaaccatccagaaaccgattacgtcttgggggatgtttctgctatcgaatcgtttccttctgctgacttgctggtcggttgctacccttgtcagggctttagccaaggcggggtgaggaaagctgataggaagattaatacgctctacttggagtttgctagggcattaagagtaatccaacctaaggctttcatagtagaaaatgtttctggcatggtccgtagcaactttgaacatctacttcaggatcagttcaaagtctttaaagaagctggttatagagttaactcacaaattctcaatgcttctcattatggcgttgctcaagatcgtaaacgtattttcatcgtcgggatacatgaaaaatttggtactgattacgttttccctcaggccacccatggtgagggtttaaaaccattttctacgattaaagatgcaataggatcaatgcctgaatggcctaccggtgagttttacgaagcagacttccattggtattatctatcaaggaatcgtcgtcaggactggggacaggtatctaaaaccatcgtagctaatccaaggcatatgcctctgcatccaatcagccctgttttagaaaagattgggccagataaatggcggtttacatcggattctccagctcgccgttttagcttccgtgaggctgctcgtttgcaaggattcggggatatgatatttcctgaaacagaccgtgcttcgatgaatatgaaatatacggttgttgggaatgctgtaccgcctcctttatttgaggcggttgctaaaggtcttccaaatatttgggactag

SEQ ID NO: 400802 - DNA, 192 bp, Salmonella enterica
gtggatagagagctaaacgagcacgttatgattgagcgggtcgaaatgattgcgcgtctgactgctgaaggtacttgtaaggaaagagatcgtgaaatcgcacttgggctgatagccgaacttgctaaagggaacttgatgaagaatagctcgttttctatagtgttttcagctaaacccattgaaaaataa

SEQ ID NO: 400803 - DNA, 906 bp, Salmonella enterica
ttgggccgttggtggagatataagtggatcacttttcatccgtcgttgacatttgcgcagtttttccgttttgctgcgggtgaagttgcgttgccggcattccgcacccgggccatttcgctggttctggctggcggtgttgttgctgccctgttaggcccgttcctggccagctacggaagcacactgttcagcgtgacctatatggggtcattcctctttatggccgtgctggcttcgctggggttacttctgctgtcgcgtttacacatgcctacacagaccgctgacccgtcagcacagaccggtccccgtccgtggttcagggtcatatcccagccgtcttatcttgtggcgcttttttccggtgcttcagggtttggcattatggtgctgggactgaccaccacccccattgccatgaaacactatgggtttgaactcccacagatcgctgtggttatccagcttcacattctggggcgtttcgttccctcctttttcaccggaagactcatcgaccggttcggtgtcactaccattatgctggcggggatcctgctcctgcttgcgtatattgcgctggtgctgtccggcgtcacgtggggattttttgccagtgcgttgatcctgatggggataggctggaattttctttacgtcggagggaccagcctgctggcaacgacctactcggcagcagaaaaaggcgtggctcaggcggcaaatgacatgagtgtctttatcttcagtctgatttgttccctgggtgccggcccactgttcaacgcatttggctggaaaaccatgcacctcatcctggttccctggatcatcagcctgattgcaccggtgctgtggctgatctggcataagaggcgtgcggtcagaccggctctgaaataa

SEQ ID NO: 400804 - DNA, 780 bp, Salmonella enterica; identical to SEQ ID NO: 153910

SEQ ID NO: 400805 - DNA, 981 bp, Salmonella enterica; identical to SEQ ID NO: 153911

SEQ ID NO: 400806 - DNA, 534 bp, Salmonella enterica
atggtaccaatgtccggaaccatcatgaacgaggctctgctggacagcatcagctgggttaaggtggatttgacctacttctggcagtacgaacagctcagctctcatctgggacccatccagataacccacaaggcactagtacgcttcgggcatctggcaaagaatgatgaaaactccagtgccataagaatcctgcgtcagcgtctgtcttcagaattcttacaagaatttcagatggctgaggatgagctaaagcgcaaacagtcgttgatgggcaccatggacgtgaaaatgctgtttcatgctcattaccccagccagaagatgctggtggctcgatataaaaatggttgggtaatggtggattgttttctgtttcatcataccaaacctaagaaaaaagcaaaaaacaaaactactgtggctaagcctcaacttaaagagactaaaagagaagggagtgaaaatggaactgggcattatggtgtgcatcgtgttgttactctccgtggcggcggcgtggatcagtaa

SEQ ID NO: 400807 - DNA, 570 bp, Salmonella enterica
gtgaccgataccgcccatagcgaccagtttttctgctttttctaccgcttcttcgaaatctttcgcacggtacatcgccagagtcggagacagtttttcgtgtgcgaacggttcgctttcatcaacgaccgtaacttcaccgatcagaatcttggtggtttctggtacggagaagcctgccagttcagcgattttgtaggctggctgaccgacgatagcggcgttcagagcgccatttttcaggataacgttttgaaccgctttcagctcctggccctgcagcatgtagccgccgtggctggcgaaacgttcgcgaacggcatcatagacggaatcaacaacgacaacagactgttcagaagcacagattacgccgttatcgaaggttttagacatcagaacagacgccacagcgcgtttgatgtcagcggtttcatcaatgacaaccggggtgttgcctgcgcctacgccgatagccggtttaccggagctgtatgctgctttaaccatgcccggaccaccggtcgcaaggatcaggttaatgtcagggtgatgcatcagcgcatttga

SEQ ID NO: 400808 - DNA, 1086 bp, Salmonella enterica
gtgagtgataaacttgctgcgttaatccagatagctcgaccttcaaattgtttggaattgagtgccggagagggcgctttaattgatgctgtgctcaaaaaatacccaaaagtgcatgttactgcagtggatatagattataaaaatgcttcctatcttaggggtaaatatccagatgttaatgttttatgcggtgattctacattgccagaactgtgtgatttaatcaacgattcatcttttgatatcgctttatgtaacccaccattcaaaagtatagttatcaactcttatatatcttcactggtttttgatatgactggtaagaaattcaaaggtgataaagtaagagctgagatagtttttttgcttttaaatcttaaaaaacttaaatcttccggtgagcttgcaattatactacccgatatatttttttcttcattaagttattcatggttgcgtgagtatttgattaacaacttttctgtaagtaaaattatagaatgcgagcataaagcatttaagaaaacagaggctaaaacccatatctatcatattaggaatgttttttccagaaaacaatctcaaattgcatttgaaaagaatggttgcgagatatatttatctaatatggattttatttttaaaaaccaatttcctgatgcttccgaagagtttgatgataagtttcttttatttcgaggaaaaaaatcaggaaaggaatgccgaaattcaggattaccttatttccacactacatcatttgatagcattctaacagaaaaagaaacaaattttaattcttatgatggcattgcattaaaaaatgacattttagttgcgcgggtcgggacacgggtgttaggaaaaaccgttgtgtttaaagggacatcagcattagttagcgattgtattttttgcttaagaataagtgatgaaaatctaagagattattttgttgatagatggttagatgataaagaaaaatggatatcagaaaatgcaaaaggcacttgtgctagacattttagtttgatttcctttagaaactatgtgagaaattgtatttctagttattataagtaa

SEQ ID NO: 400809 - DNA, 1701 bp, Salmonella enterica
atgaacaaacaaatttctacagaccttttggaagggcttgacgggtttgagtttgaagaacgtgctgattaccttccaccgtctatacttgctaaatggtcacctaacaataaacattttagagcaatacaaaaaaaactaacacaagttggagcaaaactcttagtaggtcctcgtggtgcaggcaaaactcactacatgagacacgcttatcttgattgcaaagaaaacaaaaatcttccactccctctctatgtttccttcaatcattatctccgacttgaaacttatattcacgaaacatcaaatgcaattgaaatatttcatgcatgggttctcgcaaagatagtattagcttgttatgatgattataacatttttccttttgaggaaatcactattgatgatatcaaaaactttattttggacattgaaaaacaaaattataaaaccgagcataataaagttataacatcgcttagtattgaatcgacacaagatattattgatacctgtgctaataaacaaggtcgtaaaagaaccgtccttttttttgacgatgcagccttaacacttacaaaagaatatatggttgaatttttcgatatatttcgaagcataaagacatccagaatatctccaaaagcatctgtttatccagggacaacacaatatggcccaagatttcatgttggtcaggatgctgaaccagttatgatttggcaagaggtagatcaaagcgattatatcaatttcatgctggaacttgtcaaagagaggtttaacaacatccctcaaattgatactgaaataaaccaactacttatttatgcttctttcggtataccgagggcttatataaacttagttagagcttatagtgagtcgaatgcaaaaacaaagcaatcgaaatttaatatggttattgaagagagatgcaaatatttatatgatgagtatatatccataatagacaaacttccccaatatggtgtttatgtaaaatccggttgggatttcttttataaaatagtttcagatttaaaggaaatcaatcacattaacatccgaaaagatggtgttaattataaaaaaattgtctctattggtattgaagatcttaatactgataaaattgaaagagttattagttttctcatagaagctggacttttgtacgatttatccagtacatcacacggagtaggtagaaccttacgaagattcacacctcattatgcttttttaattaaagaaaaaatcttctcagtaagcagaggttttaacgctacgaatttagttactattttagatgctccctcagaaaagcatcctttgagaagatcaatgtattctttaattacaaaacaaaactatgaagcaatttcactaacacttcctaactgttctaattgcggtgcaaaaagattagcagacaatcaaaaattttgtcatcaatgtggtaagcaacttgtggatgaatctgcatttcgcttgtgcatgaaaaagaacttagtagaacttcctttgacggatttccagaaatcagtcataaagcaaacaaatttcaaaactgttgaagatgttatatcttccaaaaacactgcaactgagtttatgaaagttaaacaagttgctcaaaaaagagcggcaactctggaatttaaagtaagaacttgggttaacgaatttttagcataa

SEQ ID NO: 400810 - DNA, 843 bp, Salmonella enterica
atggctaacaaaaaattcacatacagtatatcaggaacaaaggtaacaccaaatattaatactattgatttctttgacaaagaatatcaagaacctgatatcgcccctattgacatttacaataaaaagaaagacatacatataaaattattaggtgagcccagtgaatcttcagaatggaaattgctggttaatttagtaatgcttggatttgtctcccttgttgaaagctattgtcgttgcattattcgtaggatactaattacagataagcaagcaagatcctgtagctataaaaataatgttagctatgctgctgctgtttatcatagcaaagatatattaccggaggcattgctcgaagatgcttcttttatttcagaagcaaacattctagaaactataaaaacttttactggtttaaaaattgatcgccagaaagctgcctcagttatctcagccttacaaaaatatgatcaaatttgccaactgagacattgtattgtccatagatcgggattatttggcactaaaaatgctattaagttgggcttggaaaaacatcatttatttcttgaaaaaccaataatcataggctatgaggctatacagtctattgcatctgtttgtgataacgttgttaaggagttaaacgatgagctatttaatttacttttggatggtattgccgaacaatatgattggacaggtgacttaaggaaagacaagaaaatgttctcaccatattttgagatattttattcatcaatagcaaatccaaacaaaacagaggaacttaaaaaatgttatcacgcattctgtcaacatttcggttttaaataa

SEQ ID NO: 400811 - DNA, 465 bp, Salmonella enterica
atgaaaaagaatagcactgataacttaattgaatttagatacatgggttatttcttacttgctgtgatattacttcctttattgtctatgcttgtgtacatttcattcaactctgaatggatgaccaacaatccaaaatcttaccttttaggatacattttattttcttctttttgtctgattcgtttgtttatattgagaggctcttataaatatgctaatgatttaattctagcgatttctgccggttggataggaacaagttatttaacaacaggccaaaaaacatttgatgaactaccatctttggatttattaaaggataacccttttttattctatgcaatagcatttaaatttattttagtttgtagtagtttaatatcaaaaatcgttataactttaattgaattcattcgcgcatggatacaagaggagaaagatttcaacggcatcaatgcttag

SEQ ID NO: 400812 - DNA, 201 bp, Salmonella enterica
atggaaaatattaaaagttggattgttctttttttaatttttgtattattaaacgtaggtctttcactttggtgggacagccaaaataaatttttagcattatataatgtcactgtaatgacgttagatataatgctaacgccattggctgtagttttagctttttgtctattttttggcagtggatttcttaaagagtga

SEQ ID NO: 400813 - DNA, 228 bp, Salmonella enterica
atgggtaaagatcaacatgtagtgaaacgggatgatggttgggcagttcgtggtgaaaacaacactaaggacacttcgcaccatgcaacacagcaagaagctattgatgctgcaaggaagatcgcgaagaaccaagaaagcgaattggttattcatgggcgagatggaaaaatccgtgctaaagattcatacggtaatgatccatgtccacccaaggataaaaactaa

SEQ ID NO: 400814 - DNA, 411 bp, Salmonella enterica
atggctttcgtatctctatcaacgatggctgcgaaaactggccgtatggtacaaagcaaccacgttactgttactcaaactaaacgcgccactggtgctgtggaactgggattcagaattggtcgcactgctatggatgcaactggtatcgaaacaggtgaccgtgttgatatcctttacgacagtgaatcatcattgtggatgataaaaaaaatcccagagggtggttttggagttgcaggacaaaagaataaagcaggtgagtattcatcctgtgcaatcagaatcacactacggccagggtttcctcgcctgtctgatgatgatgatgcatcggtgaaacagttttcacaggattcagacactcagatggagaaaggacaaattatcttcaagttgggtgatgagtag

SEQ ID NO: 400815 - DNA, 564 bp, Salmonella enterica
atggaacacttgaccattcctccagcagtcgctcgtaatgagcttgcgttaaaattttcggctcatccagcagttttggtgatgctcaatcgtatgaagaattcacagattgttgttttgtgctcacttcttcggggtgaccgtttgacttctgctggaaacaatatcacggctgattttgaagtaactcggctccctgcgatcattgagattcttgagaagaaatacttcatccctgttcagcactgtaatgtcattacgacatcggttacagcgcggagtgcaacaactcaaacattctatgtaatggacaaggacactatctctcagattgtttctgagcctgaagcagtttttcaggagaagcggagagccttggttaaaaccgaagccttgaaagctcagaaaaaattagatggcttaattaagaaacatggcggagtcaccgaaaccttactgtatctcactcatcatgcttacaaggataaaatgttaagtaatgaagagtggagggagctagatgagaagttcattgagattctgaatgaactgaacgctgcgtag

SEQ ID NO: 400816 - DNA, 1173 bp, Salmonella enterica
atgattagtagtaagctaagtgatttcaaaatgaattgcgaaactcttataaaggataatgacattttttatagcgaaattttacgcatttttggttttaatagtaatgtccctatggagattgttatttgtagtttatataagaactatagtttcatgcattttgttttaaaagatgatgatatgaggaatgaactaacaaagttttactcttccattgatgctaattataatgcttttatggtggagtatttttcttataaaaaaattcaatcatgtgatgacatatcaaattacgcttcattagctgttgatcagctaatagagtatgagcaagttgatgcagagaatttacttcacaataaaaaagttgtatatatagatcaaaatattattagtgcatattgttctgagaaaaataaaaaactccggtcgcttttgaattctttaaaagaaagtggtgagtatgtgtttgtgtttagtccttatttggttgaagatgggattaaaatggattatgtatattttaatttatacttggcacaagtattaaaacttacaaatggtgtttttatttccaaggttaataatgaaatacgctatgtgaaagaagagttttatactttggttaatagagttattgaatggttacctgcgacttcggttgctgaaaatataaagtattataaagctaaattaaactatttcgcatatccatttgtacgaaaagatagcagaatagtttcaaaaatcaatgatgatatatctgattttttcatggctattgattctacaaaaaatatcatgataaatgatatcaatgccagttttttcgattttttacaaagtgttttgttgaatataacaaaccaattcgatctagaggacatgaaagcagggagaattagtgttgataaagacttcgattatgttgaaattatagagagagttagcgaatttttagatattattaattataaaactgaaagggttcgtgataagaaaaaaatactatcgagctaccaggatgttcagcatttagcacatgcttggaaagctgattacttcctaacaaacgatgataggttaattgaacgtggtggttatatatatagtttgttgggggtgaaaacaaaatttataaaagaaaaagaactggctgatttgaagtag

SEQ ID NO: 400817 - DNA, 1755 bp, Salmonella enterica
atggcggtggaaaaactgattgtcgaccatatcgacacctggaccacggcgctgcaaacccgctccacggcggggcgcggcagctcggggaagattgagctgtacggcattaagaagctgcgcgagctgattcttgagctggcggtgcgcggcaagctggtgccgcaggatccgaacgacgaaccggcatcagagctgctaaaacacattgcggcggaaaaagccgagctggtgaagcaggggaaaattaaaaagcccaagccgctaccggagattagcgaggaagagaaaccgtttgagctgccggcggggtgggagtggataaagattagtgaaattggtcatgattggggacaaaaaacgcctgatgaagatttcacttacattgatgtcggctcgataaataaagagtatggcattattgaagagccatctattctttcagcaaaagatgcaccatcccgagcaagaaaaattgttcaaaaaggaaccgtcatatattcaactgtgcgcccatatttattgaatatagcgatcattgagagcgccttctccccagagccgatcgctagcacagcctttgctattattcatccttacaccgcgatgaatgctaatttcatatattattatctacgctctcctgtatttattaattatgttgaaagttgtcagacaggagttgcctatccggcaatcaatgacaagcagttcttttctgggataatcgcagttccgccgtcatccgaacaggctcgcataactaaaaaaattaaagaacttatgtccctctgcgaccaactggaacagcactcactgaccagtctggacgcccatcaacagctggttgaaaccctgctaaccacgctaaccgacagccagaacgccgatgaactgaccgaaaactgggcgcgaatcagcgaacatttcgacacgctgtttaccaccgaacccagcattgaggccttaaaacagaccattctgcaactggcggtgatgggcaaactggttccgcaggatccgaacgacgaaccggcctctgagctactcaaacgtattgcgcaggaaaaagcacaactggtgaaagacgggaaaattaaaaagcaaaaaccgttaccgcctattagcgataaggaaaaaccgtttgaagtgccggagggttgggaatggtgtaaatttggtttaatttctgagtttattaacggagatcggggaagtaactatcctaataaaaatgaatacgttgttcacggaatcccttggataaatacaggtcacatagagaaaaatggaactctatcaataacagatatgaatttcattactgagaaaaaatttaatgagttaagaagtggtaaaattcaaagcggagatttagtttattgtttacgcggtgctacattcggtaaaacagcattcgtaaaaccatatgaatctggtgctatcgcatcttctctaatgatcattagaccgtttattagagaaatgggagaatatatatataattatttaatcagtccatttggacgctcgcaaatttttcgttttgataatggttcagcgcagcctaatctatctgctaatagtgtgatgctttatgcttttgcatgtccaccattacaagaacaatttagaattcataaaaaaataactgagctatttcatatatgcgataatttgaaattacaaactcaatccgcccaacaaacccagctccacctggccgacgccctcaccgacgcagccatcaattaa

SEQ ID NO: 400818 - DNA, 156 bp, Salmonella enterica
atgtttatgtatgaaaaatatttaagtgatatttttcagtgggttaaaaaaaagatttccaacgcaacaaccctgtcaatggctaaaaagatacgtcgagactatcaaagcggccattatcgggtatatgagtttaatcaatattcattatggtaa

SEQ ID NO: 400819 - DNA, 426 bp, Salmonella enterica
atggtaaagtcgttacagttttcggtaaatctagagggccagaaatctggcctcaaggtactacacgaactggtggcagtggttctgcgcagagaaatgctaatgatcatggttttagttataatcctggagcggttaggtaaccttatgcaattcaaaataagcactacagactttgattttattgttaataatattagtgagttgtcattaatagaaaaattgacagaatcaaaaaaacatggtgagtataatgcaaaagggaaatatccaacaggaaagtatattatagacttgtctactgatgaggttaatagtattatagagcaattatcaaattccttattgagttttggtgttgaccagaatggagaaataaattcaattggaatgcgtatcgaatcaattatagatatattcatctga

SEQ ID NO: 400820 - DNA, 234 bp, Salmonella enterica
gtgacagagctggaaacacatttgctgaacgccttagagcagctgcaacaggactatatgcagcggctgagcgaatgggagagcgccttcgtggaattgcagaagatgttttcgcttacgcaacgggacaacgcgatgctgaacgagcgggtcatgcagttgagtcagcaggtgcagcacttgagcgagcagacagaacgcttgagccagttatacagcgagaactggagataa

SEQ ID NO: 400821 - DNA, 225 bp, Salmonella enterica; identical to SEQ ID NO: 383690

SEQ ID NO: 400822 - DNA, 885 bp, Salmonella enterica
atgattattggattcggaaataatgtcgtctcctcactggcggctgatattaccgccagccagacgaccattcaggtgatgcctggtgtgggagcgatgtttgctaatttgctgaccagcgattatgcaaacagctcaaaccctcttaaaacttacgccaaaattacactgacagacgcaaaagaaacagtttttgaggtatgccatctgacagcagttaataatgacatgctgacggttattcgcggtcaggaaggtacaacagcgaagggatggtcactgaatgacgttatagcgaattttgcgacgcgaggatctgaaaatcagtttgtacaaattgaagagctccagagtgggcattatgtcgctggtgtggccggaggtacagaaaataatctgacgctggagttaccagcaacttatttcgtcaatggtggagttgactggacattgcgcactccacttgtggttattccggcgctaaacaataccggagccagcactctgcaactgacgatgggaggacgtgtgcttggcatattcccactatacaaggggaataaagcagagttatcggccaatgatattattaaagatattcctgtcttatgcgttctggataatacaaaaacctatttttctgtgcttaatcccctggagatttatttgggatcacggtatttgcagaaggaccagaacctgtccgacgtaccggataaggccaaaggtcgctccagtcttgaggtctacagcaaaaccgaaagtgatgaaaactacatggctaaaagccagtgtggtgcggatatcccgaataagccgctgtttgtacaaaatatcggagcgctccctgcatcaggtgtaagcgactcgtcagaaccgtattga

SEQ ID NO: 400823 - DNA, 702 bp, Salmonella enterica
  misc_feature (678)..(687): n is a, c, g, or t
atgaacgatacactttctaatacccagcaatcacgtgagacaatagaatgtgatgttcttattgtgggagcaggacccgccggattatctgcagctcttaaacttaaattacaggcaaatgatgcaggaaaagaactgtccattatcgtccttgataaaggagctgagcctggttctcatattctcagtggggcagtcatggatccccgagcgctgaatgaactaattcctgattggcaggaaagaggcgcacccattaaacagcctgttactcaggataaattactgttactgacgaatgaaaaatgtattaatttgccggatgcattgattcctgataattttcgcaaccatggaaactttatcgtaagcctcggtaatctcattaaatggctcgccggtcaggcagaaacgtcaggcgtggatatttatgcaggcttttcggcaactgagatactgtatgatcaggatactaacattatcggtgtagtaactggtgatatgggacgtcatcgggatggcagcaagaaagaggggttccagagtggaatagaaattctggcaaaatatacaatttttgccgaaggggcccgcggtagtctggctaaagaactgatcaaaaaatttcatcttgatacaggcaaagccatatccaccatgaaattgcaggcaggcatnnnnnnnnnnagagttttagcatag

SEQ ID NO: 400824 - DNA, 156 bp, Salmonella enterica
atgcgcaagaagttccttattataattaatttcattatggcattttttactgtaactatttatttgcagaaaatgttaaccatatcgttatttatgatatgccgcaagacttacgggatttttttgaaaccgctgattcctgtgaaggatggataa

SEQ ID NO: 400825 - DNA, 873 bp, Salmonella enterica; identical to SEQ ID NO: 372313

SEQ ID NO: 400826 - DNA, 1797 bp, Salmonella enterica
atgttcatactcttcgccgagcgaaaagttggggaacagcacgggccggccgcgcaaggcgtgctggcagccgtgcagaccctgcgtgagatgaacgccgacaacctgcgcaaggtgccggccgatgcacccacggccttcatcaagccgcgctggaagccgctggtgatcaccccggaaggcctcgaccggaaattctacgaaatctgcgccctgtccgagctgaagaacgccctgcgctccggcgacatctgggtcaagggctcgcggcagttccgcgacttcgacgactacctgctgccggccgagaagttcgccgcactcaagcgcgagcaggccctgcccctggcgatcaacccgaacagcgaccagtacctggaagagcgtttgcagctgctggacgagcagttggccaccgtcacccgcctggccaaggacaacgagctgcccgatgccatcctcaccgagtcagggctgaaaatcaccccgctggatgcggcggtgccggatcgggcgcaggcgctgatcgaccaaaccagccagttactgccgcgcatcaagatcaccgaactgctgatggacgtggacgactggacgggcttcagccgccacttcacccacttgaaggacggggccgaggccaaagacaggacgttgctgctgtccgcaatcctcggtgatgcgatcaacctcgggctgaccaagatggccgagtcgagccccggcctgacctacgccaagctgtcctggctgcaagcctggcacatccgcgacgaaacctattcggcggccttggccgagctggtcaaccaccagtatcgccacgcctttgccgcccactggggcgacggcacgacctcatcctccgatggccagcgcttccgcgcgggtggccggggcgagagcaccgggcacgtcaacccgaagtacggtagcgagccgggacggctgttctatacccatatctccgaccagtacgcgccgttcagcacccgcgtggtgaatgtcggcgtccgcgattccacctatgtgctcgacggcctgctgtaccacgagtccgacctgcggatcgaggagcactacaccgacacggccggcttcaccgatcacgtctttgccctgatgcacctgctaggcttccgcttcgcgccgcgcatccgcgacctcggcgaaaccaagctgtacgtgccgcagggcgtgcaagcctacccgacgttgcgcccgctgatcggcggcaccctgaacatcaagcacgtgcgtgcccactgggacgacatcctgcgcctggccagctcgatcaagcagggcaccgtcaccgcctcgctgatgctgcgcaagctcggcagctacccgcgccagaacggactggccgtggccctgcgcgagctgggccggatcgagcgcacgctgttcatcctggactggctgcaaagtgttgaactgcgccgccgcgtgcatgccggcctgaacaaaggtgaggcgcgcaactcgctggccagggcggtgttcttcaaccgccttggggaaatcagggatcggagcttcgagcagcagcactaccgggccagcggcctcaacctggtgacggcggctatcgtgctgtggaacacggtgtacctggaacgcgccacccaggggttggtcgaggccggcaagccggtggacggcgagctgctgcaattcctgtcgccgctgggctgggagcacatcaacctaaccggcgattacgtctggcggcagagccgcagactggaagacgggaagtttcggcccttacggatgcccggaaaaccttag

SEQ ID NO: 400827 - DNA, 1572 bp, Salmonella enterica; identical to SEQ ID NO: 113265

SEQ ID NO: 400828 - DNA, 924 bp, Salmonella enterica
atgttacataaaaaatcagcacaagaaaatgtagccttcgggcttgctgtacttaaatactatcttcgtttcaactccaaagagaatttacaagatgctaatgtgagttcggaggaattgataagcaatttaataaacattttgaaagatactaattttgtttgcacgtcagaaatttcagccacatatccaggaatagatgccttagacaaagaaaataaactaggccttcagataacacatacaaaaaatacttcaaaaataaataaaacaatagataaaatacgcattaataaagttaacgaaaaaattgacaccttatattttttcattacatcggaaaggcagaaaaaatacactatcaaagcacaatgtccaaaactaaatgtcacaacaaataatatattagactttgatgacctagctaaactgttatcgaaaagtcaggataaactgagtaaagcagaatccgaacttatgaaagcaatgcctcgtctctaccaagaaggaaaagaacggtatcaagcaatgcttaataacattcttgaaaccagaaataaactagatcgaagagtattcactgctaacaaaatcttagaagaacctgaagaaatgctgttgtccctcaaagagatcaggatagatatacaaaaagatggcataatgaacaaagccaatcctgctgtctctgattcatttaataaaataataaatattattgatgatgtagagagtaaaattgctgtacaatatcccgatgaatacaaaaaatataaagcaaagatccttccatcgtggaattctccagaaaaagaagaatgcttagatattttaatggctataagaaaagatgttttgaaacaaatagacaatattgatattgaggtaaataagctaaaaagcattcttgataataacatttag

SEQ ID NO: 400829 - DNA, 273 bp, Salmonella enterica
atggcagcattagcaccaataaaaagaaacataacagccgaagctatggctaaaaaattaaaagtatctgctcgtcgtgttcgtcagttgattgcacaaccacgaaaagactatgaatcagaagcagaaaacagaagaaaaacagcttatacgttacaccatgagaaaggcttaaaatggcgtgaagtagctgaaaaaatgaatacaacagaacatgcagttaaagcattagcaaaaagatacaaacaaatcgaccaagaaaaaaggggctaa

SEQ ID NO: 400830 - DNA, 861 bp, Salmonella enterica
atgatactacaaaaagaatatagcagaagtgattttataaatcaaattatatcaaagcctttttgtaccgatgactttaatcgtgacgggatttatagagcaaacaaaagacaagctttaaccaagatttacattgaacataataacgatagtttcattaactcaatcgtgtttgatatagatacagaaacagcggcgatatcttggcaggacgccaatataccaatgcctaactttataactcaaaacccaaagaacggacatgcacatctattttatgctttaaatagtcctgtttgcataactgacaatgctagtaaaaaaccgcaagtattattaaagggcgttgtagaaggtttaacagctcgtttaaatgcagatgtatgctataccggaaagataactaaaaacccactaagccctcattggaggacgttttggaataacacagaacgatatgaattaaactatctacgcgagttcgttgatgaaagaaaaagactaacaaaaaaagtattggttaagacgtcagaaaacaaaggaagaaacacaactttatttgataatcttcgtttctttgcttatagcgtaatttttaaatatcaaaaaacaaatgatttttgcggttttttatcagcattagaacaagaagcagacgttataaataacgagttcaaacctcgtttagaccataaggaaatacaacatacgattaaaagtatttctgaatgggtttggaacaagtttgattatgaaactttcagtgacatacaaaaagcaagaagagctaaaagaactataaaacaaaagcaaatagaaatcgatcttttatctcaagcattaatgattaatgaggagtag

SEQ ID NO: 400831 - DNA, 1260 bp, Salmonella enterica
atggctttatataggttagaaatgcagaacgttagtcgttctgatggtgtcagctcagttgcaaaggcggcttatcgtcatcgttccgtcatgatagatgaacgaacaggagaaatgcacggcgagaaatcagctaatcgtgacgatctcgtttatgctgaaatattagcaccaaaagacacgcctgattttcttaccaagtccagtaatgatctttggaactttgtcgaaaaaacagagaagagaaaagacgcaagaaccgcaaaagaatttaagatcactttaccgtgtgaattttctaatgaacaaaatataaaactactgaaagattttttattaaatcactttgtcgataaaggcattatatgtgactttgttttacataatgataaagataataaaaatcctcatgctcatgtgatgattacgacaagagaaataaccccgtcaggtttcggtaaaaaagtcagagaatgggatacagaagaaacgctgcacaaatggcgtaaagattgggcaaaagttcaaaataggcatttaaaaaatgctggcttaaaatctcgtgtaagtcatagaacactagaagaacaaaaaaacataatgatcgatttagctaaaaaagcagaggatgcaaaagattttgacaagtctattttatatctagcaaaagctattgaactagatcgcccaccgatgcaaaacctatcacgtaaaaaatggaggacaaaagaggggcaggaacaacgcaaacgtgaccaagctatcagagatagagcgaagcaggatgcaagggctttcaggttgttgagaggtgttgcagttgttgatgttgcttcattcacagttcaaccgctgcagaaaaaagagcagtcaaaaaataatgacttttcagaaaaaaaatcgtggtggcgttcgactgttaattttataaaaaatattaaagctaagttctcaactaaaaaagatattaaaaacgatgtccatgcatcagacgatttaatgactgatcccgtcactggtttaccgattaccaaacagaaatgggatgagatggcagaaagagcaaacgtgaggactccacaggctgcgatctcatacaaagttaagcaatcacacgctgacagtgagaaaacgcctcagaatgcgttacaggacgttttagacgtatcagagagtaaatcggtcaaggtgaagtctgtacctgttccgggttctcgtaagcgtcgagttgtcgaggaagacagcagtgacaagggttag

SEQ ID NO: 400832 - DNA, 396 bp, Salmonella enterica
atggataaaaaagaaatagaaaaaagactattgatttttacaagcgagatcgacattgaagatattaaaaacgatttcatcaataacgaaattaatgaagatgcttttactggctatttaaagctgtattacgctatcgataatgcaatacacaacaataaaagatcattgtttgaagtgttgatatatttgataaataaagatcgtgaaaataaagaccataatgaaccaattataactgattatgatcttgtgtatttaacactaaataattacataaatatctatgagttgaaaaggttgtttttattacaaaaaaatatcaatgattttgattttaaaagtatgatgtcagaaatagaaaaaattaaacgagaggttgaaaatgggaagtaa

SEQ ID NO: 400833 - DNA, 279 bp, Salmonella enterica
atgggaagtaaaaaaacattagagcaaaaattggcacttgcacaagatagattatctaaacttaaaaaagaagcatcgcagaaagaaagaaaagctagagaacataaaaaatttactgttggcggtgaagttacaagagtgtttggtttagattacgatctagctcttgtagtgggttttcttgaacactttaacaagttaagcgatgagcaaaaacaagcgttaaaaaacaatggtgaaagattgctaaaatcacgtctagaaaacgcttccaagtag

SEQ ID NO: 400834 - DNA, 165 bp, Salmonella enterica
atgctcagcccggtggtgatgcatctgcgccacaaatttctcacccggcttaacagtgatacatcgaacgaggtaatttttgccgctatcaatcacattatattttccccaggggcggaaaacttcttgatgatgtttatattcgttcctatcattccgttttaa

SEQ ID NO: 400835 - DNA, 336 bp, Salmonella enterica
atgaaattttttataggcgacaaaatggccgttgggatctttgcgtttatagatgcccatttttttcagctcgtcatacgcgggcaatgccggatctcttgcctgcattttggcgtacagatattgcagccattgcgcctgtgtacggccttcggtaaaccgctgatacacatcgtcaccgaggcgtctggctatttcgctgagtacccagtagatgggcttgcgctcgaacttaggcgttgtcgccggttggataaaaatcagatatcccatattgccggcgtaatcattggggatgatatcttcctgttcgacggtcatgagatccggcagtaa

SEQ ID NO: 400836 - DNA, 861 bp, Salmonella enterica
  misc_feature (792)..(822): n is a, c, g, or t
atgttcattgccatttatatactaatttctatatatttaagcaatgccaaaaaatccaatttaatactctttgtatatgccatatcatcgatatttgcaggttgctcaaatgaaaatacatctcttgtagttgtattaatttctgtagcatatttttttataatgaatagaaataaatatctactgattggcgtattcggatctgcaataggcgcaggggttctcctgctggctccgggaaacctatcccgtgcgtctacaatacaagactggtacaaccaaccacttgcatggagggttcttgagcacttttcagaaaggctgccatcagcaatgggggcatattggcaggtctatattgcatttataatactactaatctctgtagtgttatcaaggaatagtagcagcaaacttatgtttggaagctttttattcatactgggtgcaattgctgcaaatgttgcgttccttgcatctcctgcaatgcccagcagggctctcaatggagcactctgctttatgattctttcgatttcctttgttgctcattctgcatttacgaaatttaacaaagcttccatttatttatctattactacatatgcaatggcttttttatatttcattccatcatacattctctattactcatcaattaaatcaataagcaaacaaacggagattagggaagaaataatagacagggcgaaagataacaaacaagatcaagcgataattcctgattattactttccaccggtactgcatgcaggcccaagtcttgatacnnnnnnnnnnnnnnnnnnnnnnnnnnnnnnnacagtgaagcaatgtctagatactacgggattgatgtaa

SEQ ID NO: 400837 - DNA, 1632 bp, Salmonella enterica; identical to SEQ ID NO: 380387

SEQ ID NO: 400838 - DNA, 246 bp, Salmonella enterica
atggaatcccgccaattatccgctacagcacatgagatgatgaataacggtgacgccttcgcgcatcagcaaatggctcagacacagaaacccagcgccccgactactgtggaaaatgcgacacccttttctgaaatggacgactatgaaaaagcaatggtcatccatcaatcgatgaataatgcccattctttctcccacgagatccaggctgaggagcaccataaacagattaaacgcaattag

SEQ ID NO: 400839 - DNA, 237 bp, Salmonella enterica
atgttaaaagttaccacacttattgcttcattattggctgcgccgctggcgttttccgcctccgcccagccgctaaccggcgttgaatatatcagcgtttctgcggtgtcagcaacgccgtcaatgcttgaagacgctattgccagactggcgcaaagtaaacaggcgtcgtcatggaaaattacgtccatgcgtattgataatacgggttacgccactgcgatattatataaataa

SEQ ID NO: 400840 - DNA, 561 bp, Salmonella enterica
atggataaatatcttcgtctgttaagtcagggggatcggctaggattaacattaattcgcctgagtatcgccatcgtttttatctggattggactactaaaatttgtaccctatgaggcagacagtattaccccgtttgtggcgaacagcccgtttatgtcttttttctatgaacatcctgaagaatatcgtcagcatctgactcatgagggcgaactaaaaccggaggaacgcgcctggcaaacggccaataatacgtatgcgttttcggatggtctgggcgtggtggaattgattatcgcggcgctggtactggctaaccctgtcagccgctggttagggctggcgggcggcgtgctggcattcctgacgccatttgtcacgctgtcgtttttgatcaccacgccggaggcctgggttatgccgctgggcgatgcgcattatggttttccgtatttatcgggcgccgggcggctggtattaaaagatacgttaatgctggcaggtgcggtgatgatcatggcggactccgcccgttcgttacttttacagcgacagtag

SEQ ID NO: 400841 - DNA, 1176 bp, Salmonella enterica
atgaataagatcatcaaacgtttagagatcatcaaaagcgccatcgaacttgaggacgaagagattatccgtcagcagctcatctacctgaaaaatgagccgcaggatgccgtaatcagcgcgattgcccaggcgattgaagctcgtcgattcagtgacgccatgcaagagatcgccgcctggctacaggctcaacgggcgctctcgacgtggcaagatccctctattgccgccagtaaactggagctgaaagcgcttgaagcccaacttcgcgatctgattgacaaacgaaatgcgcgggtacaaatcctcgacgatttcaacgacctctatcatctgcgtctcgggccgttgatgagccgtattctggagttgcgtaaacagcttgcagtgagtatgcagcgtaagcaagaagccgaaataaaacgccgggaaaaggattatcaatcctgcctgcaatttatttcccaggccgtggatcaactggcaacgctaaaacagcagtggacaggattgaatgccgcctcgcgcgaagcggtgggcatccgtcagcgaatccagcagcagacggagttaatcaccgcgttgttggcggaaattcgcgagctggaagcggatttttcccatcaggacgacagcgcattccgccaggcgcaggaaaatgcggaacaggactatcaccagtaccgggagcagcagcaggaagcgcaattccgctacgcccgcgatcaacgtttgtcggcagacgaacgcagtgaattaaaacgtttgtggcgtcaggccagccgcctgtgtcacccggatgtggtcgccgatgaattaaaagaaaaagcgcaccagatgatggtacaacttaatcaggcgcggcagaatgccgatctggcggcaattcgcgcgttattgacgcagctgcaaagcggtctggaaccgatgatggcaagcgacaggctcaataacctggaacatctgcgccataaaatacgccagctccgcacgcaaatcgacgcgctgttgaaagagataacgcaactggaaacggaaaatgcctggcggctcgcctcttccgttgcggataaggaagcctatttctccgagcaggaacgggcgctaaccgaaattcgcaatacgctggaggcgcaggttcaacaggtggaacaggaacttctgtcagggtag

SEQ ID NO: 400842 - DNA, 1395 bp, Salmonella enterica
gtgaaaaacgcgtcaactgcatccggcgccagcgtgtcggatgccgcgtcgaagaatgaaccgacgcttcaacgggggttgcaaaaccgccatattcagctaattgcgctgggcggcgccattggcaccggactgtttctgggcatcggcccggcgattcaaatggcggggccggctgttttgttgggctatggcgttgccgggattatcgcttttctcattatgcgccagttgggtgaaatggtcgtggaagagccggtttccggatcgtttgcccacttcgcctggaaatattgggggccgtttgcgggctttttgtcgggctggaactattgggtcatgtttgtgctggtcgggatggcggagctgaccgcggcgggcatctatatgcagtactggctgcctgacgtaccaacatgggtatgggcggcggtgttttttattatcattaatgccgtgaatctggtgaacgttcgtctgtatggcgaaacggaattctggttcgcgctgattaaagtgctggcgattatcggcatgataggttttggtctgtggttgctgttctccggccacggcggcgaacatgccagcattgataacctctggcgttataacggtttcttcgctaccggttggcatggtttgcttctgtcgctggcggtgattatgttttcttttggcggactggagctgatcggcattactgcggcggaagcgcgcgatccgcaaaaaagcatcccgaaagcggtgaatcaggtggtataccgtattttgctgttctacatcggttcgctggtggtgttgctggcgctctatccgtgggtagaggtgaaatccaatagcagcccttttgtgatgatcttccataacctggacagtaatgtggtggcttcggcgctgaatttcgttattctggtcgcgtcgctttcggtgtataacagcggcgtttattcgaacagccgaatgctgttcggcctgtccgtacaaggcaatgcgccgaaatttttaacccgcgtcagccatcgcggcgtgccggtgaactcgctgatgctttccggagcgattacctcgctggtggtgctgatcaactatctgttgccgcaaaaagcgtttagcctgttgatggcgctggttgtcgcgacgctattgctaaactggataatgatctgtctcgcgcatttacgttttcgcgcggcgatgcgtcgtaaagggcgcgagacgcaatttaaggcgctgttctatcccgccggaaactatttgtgcattgcgtttctggcgctgattctggtgttaatgtgtacgatggacgatatgcgattgtcggcgattttgctgccggtatggattgtattcctgtttatcgcgtttaccgttttgcgccgtaaggctcattaa

SEQ ID NO: 400843 - DNA, 1248 bp, Salmonella enterica
atgcaggaattgatatcccaggtagaagatttagcgggaattgaaatgaatcacaccacgtcgctggtggtgatatttggtattatttttctgacagcagttgtcgtgcatattattttgcactggatagtactgcgcgctttcgaaaaacgtgccagcgccagttcccgcctgtggctgcaaattattacccaaaataaattattccatcgtctggcttttacgctgcaaggcatcattgtcaatattcaggccgcgctctggctacaaaaaggcagtgaggctgcggatatcctgacgacctgcgcgcagttatggattatgacctacgccctgctgtcgttattttctctactggacgtgattttcaatctatcgcaaaaatggcctgccgcctctcagttgccgctaaaaggaatatttcagggcattaagctcatcggcgcaattatcgtcggcattctgatgatctcactgctgattggccagtcaccagcaattttaatcagcgggctgggcgcgatggccgcggtattaatgctggtctttaaagacccgattcttggcctggttgccggtatccagctttccgccaacgatatgctcaaactgggcgactggctggaaatgccgaaatatggcgcagatggcgcggtcattgatattggcttaaccacggtaaaagtacgcaactgggataataccatcaccaccattcccacctggtcgctggtttccgactcattcaaaaactggagcggcatgtctgcgtccggcggacgccggattaaacgcagcattaatattgacgcgaccagtatccattttctggatgatgatgaaaaacagcggctgttaaccgcgcaactgttaaagccgtaccttaccagccgtcatcaggaaatcgatgaatggaataaacagctggatgcgccggaatcagccttaaatcaccgccgaatgaccaatatcgggacatttcgcgcctatctgaacgaatatttacgccaccatccgcgcatccgtaaagatatgacgctgatggtacgccaactggcgcctgacgatcatggtttgccgatagagatctacgcctttaccaataccgtcgtgtggctggaatatgagagcatccaggccgatattttcgaccatatttttgccgtggtggaagagtttggcttgcgtattcatcagacgccgaccggcagcgatattcgcgcgctgtcagggacattgcgccattaa

SEQ ID NO: 400844 - DNA, 654 bp, Salmonella enterica
atggatatcgtttctgtcgccttacagcgctactccactaaggcgttcgatcccagcaaaaaactgaccgccgaagaagcggataaaataaaaacactactacagtacagcccctccagcaccaattcccagccgtggcactttattgtcgccagtacggaagaaggcaaagcgcgcgtagcaaaatccgctgccggaaactacacgttcaacgaacgcaaaatgctggacgcctcccatgtggtggtcttctgcgccaaaaccgcaatggatgacgcatggcttgagcgcgtcgtcgatcaggaagatgctgatggccgtttcgctacgccggaagctaaagcggcaaatgataaaggtcgccgctttttcgccgatatgcaccgcgtctcgctgaaagatgaccaccagtggatggcgaagcaggtttatctgaacgtcggcaactttctgctgggcgtcgccgcgatgggtctcgacgccgtccccattgaaggtttcgacgccgaggtgctcgacgctgaatttggtctgaaagaaaaaggctataccagtctggtcgtggtgccggtcggccatcatagcgtcgaggatttcaacgccgggctgccgaaatcacgtctgccgcttgaaaccacactgacggaagtctaa

SEQ ID NO: 400845 - DNA, 369 bp, Salmonella enterica
atggacggtcaaacactgcacgcctgtgcaaaacgctttgcgctggaactgccttttaccgaacactgctggcctttcggcccacagtacgatgtgtttaaagtcggcggcaaaatattcatgcttttcactgaacatcactgtcgcccagtgatgaacctgaagtcggatccccaaaaatccctggtaaatcaacaaatataccccagcattacgcctggctatcacatgaataagaaacactggatttcagtctatgcgggcgaggatatcaccgtctcgctactcaacgatttgataaatgactcatggaatctggtcgtagacgggctgcctaaaagagagcaactgcgcctgcggccgcgctga

SEQ ID NO: 400846 - DNA, 582 bp, Salmonella enterica
gtggctcgtccgaagagtgaagacaaaaaacaagcattactggaagcggcaacccaggcgatagcgcaatccggtatcgccgcctcaacggcggtgattgcgcgtaacgcaggtgttgcagaaggaacattgtttcgctatttcgcgaccaaagatgagctgattaatacgttgtatttgcatttaaagcaggatctctgccagtcaatgataatggagctggatcgatccattaccgatgccaaaatgatgacccgttttatctggaacagttacatcagttggggtctgaaccatcccgcgcgccatcgggcgatccgtcaactggccgtcagcgaaaagctcaccaaagagacggaacaacgggccgacgatatgttccccgaattgcgcgatttatgtcatcgtttcgttttgatggtgtttatgtcggatgagtaccgcgccttcggcgacggcctttttctggcgctggctgaaacaacaatggatttcgccgcgcgcgatcccgctcgcgctggcgaatatattgcgctgggattcgaagccatgtggcgcgcgctgactcgcgaggagcaataa

SEQ ID NO: 400847 - DNA, 342 bp, Salmonella enterica
atgaccatttccgctcaggttatcgacacgattgtcgagtggattgatgataatttgaatcagccgttacgtattgatgatattgcccgtcatgcggggtattccaagtggcacctgcagcgcctttttatgcagtacaaaggggagagtctggggcgctacgtgcgtgaacggaagctaaaactggcggcgcgcgacctgcgcgacaccgaccagaaggtgtatgatatttgtctcaagtatggttttgattcgcagcaaacctttacgcgcatttttacccgcacgttcaacctgccgccaggcgcttatcgtaaagaaaagcatggccgtacgcattga

SEQ ID NO: 400848 - DNA, 249 bp, Salmonella enterica; identical to SEQ ID NO: 369176

SEQ ID NO: 400849 - DNA, 1119 bp, Salmonella enterica
atggcgctgaatgattttcacgtttctgaaccttatacgcttggtattgagctggagatgcaggtgatcaatccacctggctacgatttaagtcaggactcttctacgctgatcgacgccgttaagccccaacttactgcgggagaaattaagcacgatatcaccgaaagtatgctggagatggccacgggcgtctgccgcgatattgaccaggcggcggcccaactttctgccatgcagcacgttattttacaggcggcgtcggaacaccatctcggcatttgcggcggcggtacgcacccttttcaaaaatggcagcgtcaggaggtctgtgataatgagcgctatcaacgcacgctggaaaatttcggctacttaattcaacaggcgacggttttcggccagcatgtccacgtcggctgcgcgaacggcgacgatgcgatttatcttttacacgggctgtcgcattttgtgccgcactttattgcgctctccgccgcgtccccctatatgcaaggagctgacacccgttttgcctgcgcgcgcctgaatattttttccgcttttcccgataacgggcccatgccgtgggtcagtaactggcaagagtttaccggactatttcgtcgcctgtcttacaccacgatgatcgacagcatcaaagatttgcactgggatatccgccccagcccggcctttggcacggtagaagttcgggtgatggatacgccgctcacccttgatcatgccatcaatatggcagggttgattcaggcgaccgcgcactggctgctgaccgagcgtccctttaaaccgcaggaacaagactatctgttatataaattcaaccgttttcaggcttgccgctatggtctggagagcgtgctaatcgatgtctataccggcgaccgccgtcgcctggcagatgatacgctgcgtctgctggataacgttaccctctcagcgcgcaagctgggcgccgacagcgccattgacgcgctacgtctgcaggtgaaaaaaggcggtaacgaagcgcaatatatgcgggagtttattgccgacggcggatcgctgataggcctggtacaaaaacattgtgaaatctgggcgggacaatag

SEQ ID NO: 400850 - DNA, 705 bp, Salmonella enterica
atgcggacatctcattttccccttccctttgccggacactggctgcatatcgtcgactttgatgcgagcagctttcacgaacacgacctgctatggctgcctcatcacgatcggctccggtctgccggacgcaagcgtaaagctgaacatctggcaggccgcatcgccgccgttcatgcgctacgcgaggtggacgtcagggcggtacccggtattggcgacaagcgacagccgctatggccggacggcctatttggcagcatcagccactgtgcgtcaacggcgctggccgtcatatcccaacagcgtatcggcattgatatagaaaaaatcatgagtcaacacacggcgacagagctggcgccgtccattattgatagcgatgagcgccaaattctccaggcgagctcgctcccttttccgcttgccctgacgctggctttctccgccaaagagagcgtttataaagccttttcagaccgcgtcacgctcccgggattcgatagcgcaaaagttacctcgcttaccgccacgcacatctcgttacatctgctgccagcctttgccgccatgatggctgaacgtaccgtccgtacagaatggtttcaacgtagcaatagcgttattactcttgtttctgcaataacgcgctttccccacgacaggagcgctcccgcttctatacttagcgcaatcccccgataa

SEQ ID NO: 400851 - DNA, 2256 bp, Salmonella enterica
atgaacaagaagattcattccctgaccttactggtcaatttagggatttacggggccgctctgcccgtgatggcagaagaaaaaaccgatagcgctgcgctcaccaatgaagacaccatcgtggtgaccgctgcccagcaaaacctacaggcgccaggcgtatccaccatcaccgccgatgagatccgcaaaaatccgcccgcgcgcgacgtgtcagaaatcatccgcaccatgccgggcgtaaacctgaccggcaactccaccagcggtcagcgcgggaataaccgccaaatcgatattcgcggcatggggccggaaaacacccttatcctgatagacggtaaacccgttaccagccgtaactcggtacgcctgggctggcgcggcgaacgcgatacccgcggcgataccgcgtgggtgccgccggagatgatcgaacgcattgaagtgctgcgtggccctgccgccgcacgttacggtaacggcgcggcgggtggcgtggtcaatatcattaccaaaaaaggcggtagcgagtggcacggttcctggaatacctatttcaacgcgccggaacataaagacgaaggcgcgaccaaacgcactaactttagcctgaacggcccgttgggcggggatttcagcttccgtctgtatggcaacctcgacaaaacgcaggcggatgcgcgtaatattaaccaggggcatcagtctgaacgtaccgggagttacgccgacacgttaccagccggacgcgagggggtcattaacaaagatatcaacggcgtggttcgttgggattttgctccgcttcagtctctggagctggaggccggttacagtcgccagggcaacctctatgccggcgatactcagaacaccaatacgaaccaactggtgaaagataattacggaaaagagacgaaccgcctctatcggcagaactactctctgacctggaacggcggctgggataatggcgtaaccaccagtaactgggtgcaatacgaacatacccgtaactcccggatgccggaaggcctggcaggcggcaccgaagggattttcgatcccaaagcatcgcaaaaatatgccgatgccgatttgaatgacgtcaccctacacagcgaagtgagccttcctttcgatctgctggtcaatcaaaacctgacgctgggtaccgaatgggcccaacagcgtatgaaagaccagctctccaactcgcaaacctttatggggggaaatatcccgggttacagcagtaccaatcgtagcccctattcaaaagcggaaattttctctctgtttgctgaaaacaacatggaactgaccgacagcaccatgctgacgccggggctacgtttcgatcatcacagtattgtgggggataactggagcccgtcgctgaacctgtcgcaaggtctgggggatgactttaccctgaaaatggggatcgcccgcgcttataaagccccgagtctgtaccagactaacccaaactatattttgtacagtaaaggtcagggttgctacgcgactggcgcgggaaccggcatcggctgctatatgatgggtaacgatgatctgaaagccgaaaccagtatcaataaagagatcggtctggaatttaaacgcgatggctggctggccggcgtcacctggttccgcaatgattaccgcaataagattgaagcgggtacagtgccgttgcagcgtatcaataacggcaaaacggatgtctatcagtgggagaacgtgccgaaagcggtcgttgaaggtctggaaggcacgttaaacgtaccggttagcgacaccgtcaactggacgaataacgttacgtatatgctgcagagtaaaaacaaagagaccggcgaacgcctgtcgattattccacagtacacgcttaactcaaccctgagctggcaggtacgtcaggacgtttctctgcaatcgaccttcacctggtacggcaaacaagagccgaagaaatatgattatcagggcaaccccgttaccggaacagataagcaagcggtcagcccatacagtattgttggcctgagcgctacctgggacgtgaccaaaaatgtcagcctgaccggtggcgtggataacctctttgacaaacgtctgtggcgtgaaggtaacgcgcaaaccgtcagggatactcaaactggcgcttatatggcgggtgctggcgcgtacacctataacgaaccgggacgtacgtggtatatgagcattaatacccatttctga

SEQ ID NO: 400852 - DNA, 1215 bp, Salmonella enterica
atgaaagaggcgctggcaacgggaagtgaggcctggtggaggacgaaaaccgggccggaatggatacgggaaaaagacggaaattatcgggtcactttttggtggcgcgacccgcagggaaacgaaacacactccccgatacggcgtgtctgggtctacatcactggcgtaaccgatcatcatcaaaacgcgcagcctcagacgatggcgcgtattgccggaacggatgtctggcgctggagcacggcgcttagcgctaactggcgcggcagctactgttttattcctaccgagcgagatgacgtttttgccgcttttgcgccgggcgaaacgtccgatcggaacgcgctgcgtgaaggctggcgacagctattaccgcaggcgattgccgacccgcttaattcgcaaagctggcggggaggacgtggtcatgcggtttcagcgctggaaatgccggatgcgccccgtcagccgggatgggatcgtcctgaaacgtcgtactcaccgcctttgatgatgcagtggcatagcgaacgtctgagtaactcccgccgcgtatggatattgacgaccggagacgaggcgacggaggaaagaccgttggctattctgctggacggtcaattctgggcggaaaatatgcccgtctggcccgcgctcgcctcgctgactcatcaacgcctgcttcccggtgccgtctatctgctgattgacgcgattgatactcaacaccgcagccaggagttgccctgcaatgccgacttctggctggcggtgcagcaggaactgttgccgcaagtcagagccgtgacgccttttagcgatgatgccggacgaacggtggtcgccggacagagctttggtggcctgtcggcgctgtatgccggcctgaactggccgacgcgttttggctgtgtactaagccagtcaggatcgttctggtggccccatcgcatcaccccgccggagggggaagtcattacccggctgaaaaccggcgcattgtgcgcgcgcggactgcgtatcgtactggaagccggcgtgcgtgagccgatcgtgtttcaggcaaatcaggcgctttatgcccaactgaatacctcgcagcagtccattttctggcgtcaggttgacggcggacacgatgcgctttgctggcgcggcgggctaacgcaagggctgatgctgctttggcagccgcttatcgacacgctttaa

SEQ ID NO: 400853 - DNA, 219 bp, Salmonella enterica
atggaattcagtaatcccttcgataatccgcagggacagttttacatcctgcaaaatgcgcagcgtcaattcagcctttggccagcggcgtgcgcgcttcccgcaggatggggcgtggtatgcgaaccgcaatcgcaggacgcgtgccagcagtggcttaatacgcgctggacaacactgaatccggcgcattatgccgataagcaggaggcgaaatga

SEQ ID NO: 400854 - DNA, 3885 bp, Salmonella enterica
atgacgcagcgtttaccgttagtcgccgcccagccggggatctggatggcggaaaaactctctgatttaccctccgcctggagcgtggcgcactatgtggaactgaatggcgagctggatgcccccttgctggcaaaagcggtagcggtagggatgcaacaggcggatacgctacggatgcgttttaccgaagagaacggcgaggtctggcaatggatagatcctgagcacaccttcggcgagcccccgattgccgatttacgcgaccagcccgatccgcatcacgcggcgctggcgttaatgcaggcggatttacggcaaaacctgcgcgcagatagcggtaagccgctggcgtttcaccagttaatccgcattgatgatacccgctggtattggtatcagcgctatcaccatttgctggtggatggctttagcttcccggcgataacccgccagattgcggcgatttatcgcgcctggcagagcgacgcccctacgccggagtcgccttttaccccctttgcggatgtggtcgaggaatatcagcgctatcgccagagcgaggcctggcagcgtgacggcgccttctgggcgcagcagcgccgcgagctgccgccgccggcgtcaatttctgccgcgccgctgccggggcggtcggcgagcgcgggtattctgcgtatgaaattgagcgcgccggcgggggcgtttcgccaactggcggcgcacatgcctgagataccgcgagcggatcttgccctggcgctggtgacgttgtggctgggacgattatgcgggcgaatggattatgccgctggatttatctttatgcggcggatgggatcggcggcgttaacggcgaccgggcctgtccttaacgtgttgccgctggcggtgaaccttcatgcgacggaagatctgccaacactggcgaagcgtcttgcggcgcagttaaagaagatgcgccgccaccagcgttacgacgccgaacagattgtacgcgatagcgggcgagccgcaggggagacgccgctatttggcccggtgctcaatataaaagtatttgattatcatctggatcttcctggcatacaggcgcaaacccataccctggcgacggggccggttaacgatcttgaactggcgctttttccggatgaaaacggcggtctggatattgaattgctggcgaatgcacagcgttacgatgatgccacgctctcccgccatgccttacgattgatggcgcttatcacgcagtttgcggataacccggcgctgtgctgcggcgatgcgcaaatgctgctggcggaagaacaaacgcaattaacacaccttaataatacggcggtaacgattcccgccgccacgcttagcgatttggtggcgcagcaggcgcaaaaaacgccagaggcttccgcgttggcagatgcgcactatcattttacctaccgtgaaatgcgtgaacaggttgtggcgctggcgtacgcgctgcgggaacgcggcgttcagcctggcgatagcgtggcggtggcgttgccgcggtcggttttcctgaccttagcgctgcatggcattgtcgaggcgggcgccgcctggctgccgctggataccggttatcctgacgatcggctgcgaatgatgttggaagatgcgcagccgaaactgttaattacgactcaggcgcagctggcgcgctttcacgatattccggggatggaatatttgtgttatagccaaccgctaccggtcagtgacgccactccgctggggctgtcgctaccgcatcataccgcttacatcattttcacctctggttcgacgggcaggccgaaaggggtgatggtgggacaaacggcgatagtcaaccggctgctgtggatgcaggatcactatccgttgacggcggatgatgtagtagcgcaaaaaacaccgtgcagttttgacgtctcagtatgggagtttttctggccgtttatcgccggggcgaaactggtgatggctgaaccggaagcgcaccgcgatccgctcgcgatgcagcggttctttgcgcaatacggcgtcacgaccacccattttgtgccgtcgatgctggcggcctttattgcctcgctcacgccagcgtcggcggggaaaagctgcgcttccttaaagcgcgttttctgtagcggcgaggccctgccgacggcgctgtgccgcgaatgggagacgttaaccaacgcgccgctacacaatctgtacgggccaacggaggccgcggtggatgtgagctggtatccggcctgtggcgatgagctggcggctgttgacggcaacagcatcccgattggttatcccgtctggaataccggtttacgtattctcgatgcgcatatgcagccggtgccgccgggcgtggctggcgatctctatcttaccggtatccaactggcgcagggctatctggggcgtccggatcttaccgccagccgttttatcgccgatccttttgcgccaggcgaacggatgtaccgtaccggagatgtggcgcgctggctggattccggcgcggtggagtacctggggcgcagcgacgatcagctcaaaattcgggggcaacgtattgaactgggcgagattgaccgcgtcatgcaaacgctgccggatgttgaacaggcggtagcacatgcctgcgtctttaatcaggcggcggcgacgggcggggatgcccggcaactggtcggctatctggtgtcgcactccggtttgccgctggatttaccggcgctgcaggaaaaattacgccaaaaacttcccgcgcatatggtgccagttgtgctgttgcaacttaccagcttgccgcttagcgctaatggcaagctggatcgtaaagccctgccgctgccggacctgacgccgcgcgtgaaagggcgtgcgccgcagtccgcaacggagattgctgtcgccgcggcgttttcccgcctgctgggctgtgagattaacgacgttgaaagtgatttctttgcgctgggcggacactcgctgctggcgatgaaactggccgcgcagctaagccagacgtttaaccgccaggtgacgccggggcaggtgatggtggcgtctgacgtggcgcagttaagtaagctgctcgatactgacgatgacgaacgctcgcgcaatctggggttcgggccgctgttgccgctgcgtgaaagcgatggtccaacgttattttgtttccatccggcgtcggggttcgcctggcaatttagcgtattatcacgctatctcagcccgtcgtggtcgattatggggattcagtcgccgtgccccgctggccctatgcaaaccgcaaccacccttgatgaggtatgtgaacatcatctggcgacattgctcgcccggcagccgaatggcccttattatttattaggctattcgctgggcgggacgctggcgcaagggatcgccgcccggttgcgcgcgcacggcgaaaccgtggcgttcttgggattactggacacctggccgccggaaacgcaaaactggcgggaaaaagaggcgaatggcctcaatccggacgtattggcggaaattgaacgcgaacgcgcagcgtttgtcgccgcgcagcagggaaatgcctccgacgccttatttaccgccattgaaggcaattatgcggatgccgtccgtttgctgacgacggcgcatagcgtaccgtttgatggacatgccacgctctttgtggcggataaaacggtgccggaaggcgtatcgcctgaacagagctggtcgccgtggatagcgtctttggctatttatcgccagccgtgcgcgcatgtagatattatttctccctccgcttttgaaactatcgggcccatcatcagcgaacttattaataaataa

SEQ ID NO: 400855 - DNA, 1137 bp, Salmonella enterica
atgccatctcttaatgtaaaacaagaaaaaaatcagtcatttgcaggttactcactgccgcccgccaacagtcatgaaatcgatttgtttagccttatagaggtgttatggcaggcgaaacgtcgtattcttgctaccgttttcgcctttgcgtgcgtggggttgcttctgtcctttctgctgccgcaaaaatggaccagccaggcgattgtcacaccggcggagtcggtacagtggcaggggctggagagaacgttgaccgcgctgcgcgtgttggatatggaggtaagcgttgatcggggcagcgtatttaatctgtttattaaaaagtttagctcgccctcgctgctggaagaatatcttcgttcttctccgtatgtcatggatcaattaaaaggtgcgcaaatagacgagcaggatcttcaccgggcgattgtcctgctgagcgaaaaaatgaaagcggtggacagtaatgtcggcaagaaaaatgaaacgtcgttattcacgtcgtggacgctgagttttaccgcgccgacgcgggaagaagcgcaaaaagtgctggctggctatattcagtacatctccgatatcgtcgtgaaagagacgctggaaaatattcgtaaccagctggaaatcaaaacccgctatgagcaggaaaagctggcgatggatcgggtgcgtctcaaaaatcagcttgatgccaatattcaacgtcttcattattcgctggaaatcgccaacgccgccggtattaagagaccggtttacagcaatggtcaggcggtaaaagatgatccggatttttctatttctctcggcgcggatggtatttcccgcaaactggaaattgaaaaaggggtaacggacgtggccgagatcgacggtgatttgcgtaaccgtcaataccatgttgaacaactggcggcaatgaatgtgagtgacgtgaagtttaccccgtttaaatatcaattgtcgccgtctctgccagtgaaaaaagatggcccgggtaaagccatcattattatcctggcggcgttgattggcggtatgatggcctgcggcggcgtattactgcgtcacgcgatggtctcgcgtaaaatggaaaacgcgctggcgatagatgaacggttagtctga

SEQ ID NO: 400856 - DNA, 795 bp, Salmonella enterica
atgaccgaatccgtagcccgtttgcgcggcgaccagttaacgctgggttatggcagctataccgtcgcaaaaaaccttaatgtttcgattccggacggccattttaccgccatcatcggccctaacggctgcggcaagtcaacgttgctacgcacgctaagccgtctgatgacgcctgttgacggccatgtctggctggatggcgaacagatacagcattacgccagtaaagaggtggcgcggcgcatcggattgctggcgcaaaacgccactacgccgggcgatatcaccgtacaagagctggtcgccagagggcgttatccgcatcagccgttatttacccgctggcgtaaggaagatgccgatgccgtcgccagtgccatgcgtgcaacaggtatcacctcactggcggcgcaaagcgtagatactctgtccggcggccaacgtcagcgggcgtggatagccatggtgctggcgcaggaaacgtccatcatgctgctggatgagccgacaacgtggctggatattagccatcaaattgatttgttggaattgttaagcgatctcaaccgcgaaaaaggctatacgctagccgccgtcctgcacgacctgaatcaggcctgccgatacgccacacatttgattgcattacgcgaaggtaacattgtcgcacagggcgcgccgaaagagattgttaccgctgagcttatcgaaaaaatctatgggctgcgctgtatgattatcgacgatccggttgccgggacgccgctggtggtaccgctggggcggcgatag

SEQ ID NO: 400857 - DNA, 990 bp, Salmonella enterica
atgtttctttctcgtcggcttatcgtaagttgcctgcttctggcggctggctgcttcgccattggcttatggagcctgcaaagcggcgccgtgcctcttgataccgtgcagattattgccgcactgctgggcgacgcgccgcgtaacatcacccttgtcgtaaccgaatggcgactaccgcgcgtattaatggcgctgctgattggcgctgcgcttggcgtcagtggcgcgatttttcagtcgttgatgcgtaacccgctaggtagccctgatgtaatgggctttaataccggcgcctggagcggcgtactggtcgcaatggtcctgtttggccagcatcttaccgcgatcgcgctggcggcaatggcgggcggtatcgtcacgtcattgattgtctggctgctcgcctggcgtaacgggattgaaactttccggttgattattatcggtatcggcatccgcgcgatgttagtcgcctttaatacctggcttctgttgcaggcgtcgctggaaacggcgctcaccgccggcttatggaacgccgggtcgctcaacggtctgacatgggcaaaaacctggccttcggcgccgctgattattgtgatgctgacaggcgccgcgctactggtgcgtcgtatgcggctgctggagatgggcgatgacagcgcctgcgcgctgggtgttagcgtggagcggtcacgcctgatgctgatgctggtggcggtgtcgctcaccgcagctgcaacggcactggctggccccatctcgtttattgcccttgtcgcgccgcacatcgcccgccgtcttagcggcacagcgcgctggggattaacccagtcggcgctgtgcggcgcgttattactactggccgccgatgcgtgcgcgcagcaactgtttatgccttatcagcttccagtgggcgtggtcaccgtcagcctcggcggtatttaccttatcgtcttgttaattcaggagtcccgcaaaaaatga

SEQ ID NO: 400858 - DNA, 1008 bp, Salmonella enterica
atgtcatgctcgttttccgtgacgcgcgcgtttgccgtgcccggattgttgttattactgagtctcgccgcggttttaagcctggtcattggcgcgaaaccgctgcccgccgccgtcgtgctggaggcgttcaccggcgtgtgccaaagcgccgattgcaccatcgtcctggatgcgcgtttgccgcgtacgctggccggattactggcaggcggcgcgttgggtctcgccggggcgctcatgcaaacactcactcgcaacccgctcgccgacccggggattctgggcgttaacaacggcgccagcttcgccattgtactgggcgcggcgctgtttggtttctccacgccgctggaacagcttttcatggcatttagcggcgcgcttatcgcatcgctgattgtcgccttcaccggtagtcagggcggcggccagttaagcccggttcgcctgacactggcgggcgtggcgcttggcgcggtactggaaggattgaccagcggcatcgcgctgttaaatccagaggtctatgaccagcttcgcttctggcaggcgggatcgctggatattcgcagcctgcaaacgttgaaagtcgcgctcgcgcccgtggttatcgctgggatcgtggcgctatttctgagccgtgcgctgaacagcctgagcctcggcagcgataccgcgacggcgctggggagtaaagtggcgcgcacccaacttatcggtttactggcgattaccgtcttgtgcggcagcgcaacggcgctggtcggccctatcgcctttattggtctgatgatgccgcatatggcgcgttggctggtgggcgcagaccaccgctggtcgctgccagtgacgctactggcaacccctgctctgctgctttttgccgatattattggtcgtctgttggtgccgggcgaactccgcgtatcggtcgtcagtgcgtttatcggcgcgccggtacttatttttctggtacgccgtaaatcgaacggaggcggcctgtga

SEQ ID NO: 400859 - DNA, 1245 bp, Salmonella enterica
atgaatcgacaatcctggctgctcaatctcagcctgttgaagacgcaccctgcatttcgcgcagtatttctggcccgttttatctctattgtctcgctggggctgcttggcgtggcggttccggtacagatccaaatgatgacgcactctacctggcaggtagggctgtcggtaacgttaaccggcggcgccatgtttattggcttaatggtgggcggcgtactggccgatcgctacgaacgcaaaaaggtgattctgctggcgcgcggtacttgcggtattggctttattggcctgtgtgtgaacgcgctgctgccggaaccatcattgctggcgatatatctccttggcctgtgggacggctttttcgcgtctctgggcgtgaccgcgttactggcggcgacgccagcgctggtcggaagagaaaatctgatgcaggccggcgcgattaccatgctgacggtacgtctgggatcggtcatttcgccgatgttggggggcatattgcttgccagcggcggcgtagcctggaactatgggctggcggccgccgggacgtttattacgctattgccgttactgacgctgccgcgactgcctgtccctccgcagccgcgggaaaatccatttctcgcgttactggcggcatttcgttttttgctcgcctgtccgcttatcggcggtatcgcgctgcttggcggtctggtgacgatggcaagcgcggtacgcgtactctatccggcgctggcgatgagctggcagatgtcggcggcgcaaatcggtttgctgtatgcggcaattccgctgggggcggccattggcgcgctgaccagcggacaactggcgcatagcgttcgtccggggctcattatgctggtttcgacagtcggttcttttctggcggtggggctgttcgccatcatgccggtctggatcgcaggtgttatctgtctggcgctatttggctggcttagcgccatcagttcgttattacaatacaccctgctgcaaacccagacgccggaaaatatgctggggcgaatgaacggcctgtggaccgcgcaaaacgtcacgggagacgctatcggcgcggcgctgttaggcggtcttggcgcaatgatgacgccggtcgcttccgcgagcgtgagtggattcgggctggtgattatcggtttgctgctgctgttagtgctgggcgagctacgccgttttcgccagacgtcgccggttagcgatgctggctga

SEQ ID NO: 400860 - DNA, 957 bp, Salmonella enterica
gtgagactccccgccttttatcgttggctgcttttagtggttggtttatcaatttcaggaatatccttagcccaggacgccggttggccccggcaaatccaggacagccgcggcgttcatactctggaccacaaacccgcgcgtatcgtctctaccagcgtgacgttaacaggctcgctgctggcgattgatgcgcccgtcgtcgccagcggggctactacgccgaataaccgctttgctgacgatcaagggtttatgcgccagtggagtgacgtagcaaaggctcgccatgtcgcccggctgtacatcggcgaaccgaatgccgaaacggtcgccgcgcaaatgccggatctcattttgattagcgccaccggcggcgactccgcgctggcgctttacgatcagctctccgctatcgcgccgacgctcgtcatcaattatgacgataaaagctggcagagtttgctcacgcagcttggcgagatcaccggccaggagaaacaggccgccgcgcgaatagcggaatttgaggcgcaactgacgacggttaaacagcgaatcgccctgccgccgcagccggttagcgcgctggtgtatactcctgccgcgcatagcgccaatctgtggacgccagaatcaacacaaggcaagctattgacgcaggtaggctttacgctggcgacattgccccaagggctgcaaaccagcaaaagccagggtaagcgccacgatatcattcagcttggcggtgaaaatctggccgccgggttaaacggcgaatctcttttcctgtttgccggcgacaacaacgatgtcgcggccctttacgccaatccactgctggcgcacctgccagcagtgcaaaataagcgcgtctatgccctgggtacggagacgttccgtctggattattacagcgcaacgttgctgcttaaccggctagccgccctgttttag

SEQ ID NO: 400861 - DNA, 1176 bp, Salmonella enterica
atggatatgtcactggccgaggacgctcaggagacaatggcaacacttgctcccgatcgctttttcttcatgtcgccgtatcgcagttttaccacttccgggtgcttcgcccgttataccgagcctgcggttgccggcgattcgccggatagccctttccagcagaaattgcgccagcagtttgccgaggccaaatcgcagggcatcgccaaccctatcttggtgggggcgatcccctttgatacccgtcagccgtcgtcgctatttatcccgatggcgtggcagtccttttcccgccagcaaaagcagcgcacggcgcgttattttactgaccatcagtcgctgacggtgacggcgcgaaaggcgattcccgagcaggatgcttttgaagcgatggtcgcacgcgcggctatgctgaccgccacgccagacgtcgataaagtggtgctttcccggctgatagatatcaccactgatgtggcggtggatagcggagcattgctggagcggctggtggcgcagaatccagttagttacaacttccatgtgccactggcggatggcggcgttctgctgggcgccagccccgaattgctgctacgcaaagagggcgagcggtttagttcgctgccgttagcaggctcggcacgccgacagccggatgacgttctggatcgcgaagcgggaaaccgactgctggcttcacaaaaagatcgccatgaacatgagctggtgacgcaggcgatgaagcagatcctgcgcgatcgcagcacggaactgcaattaccttcctctccgcagttgatcaccacgccgacgctatggcatctcggtacgccgtttgagggcaaggccaacgccggagaaaacgcgctgacgctggcctgtctgctgcatccgacccctgcgttaagcggtttcccccatcaggccgcgaaaaagctgattgctgaactggaaccgttcgatcgtgaactgtttggcggcattgtcggctggtgcgacgccgaaggaaacggcgagtgggtagtgacgattcgttgtgcgaaattgcacggtaatcaggtgcgcctgttcgccggcgccgggattgttcctgcctcttcgccagtcggcgagtggcgggaaaccggtgtcaagctctctacgatgttgaacgtttttggactgcattaa

SEQ ID NO: 400862 - DNA, 1611 bp, Salmonella enterica
atgcgtatacctttcacccgttggccggatgaatttgcccgccgttatcgtgaaaaaggctactggcaagacgtgccgttgaccgatattctgacccgccacgctgacagcgataagatggcggtcattgaaggcgagcgcgcattcagctatcgccagctaaaccaggccgcggataatctggcctgcagtttacgccgtcagggcatcaaacctggcgaaaccgctctggtgcaactggggaatgtaccggaactgtatatcacctttttcgccctgttgaagcttggcgtagcgcccgttctggcgctgtttagccatcaacgtaccgaacttaacgcctatgcgatgcagatcgcgccgacgctggtgattgccgatcgccaacatacgctgttcgccggggaggactttctcaacacgtttgtggctgaacaccgctctgtgcgggtggtgttattgcgcaacgacgacggcgatcacagcctggacgcggcgatgcggcaggcggcggaagatttcaccgccacgccatcacctgctgacgaagtggcctactttcagctttccggcggtactaccggcacgccaaagcttattccccgtacccataacgactattactacagcgtgcgccgcagcaatgagatttgcggtttcaacgaggagacgcgttttctgtgcgcgattcccgccgcgcataactacgccatgagttcgccgggcgcgctgggcgtttttctcgccaaaggaacggtagtgctggcgaccgatcctagcgccacgctctgtttcccgctgatcgaaaaacaccagattaatgccacggcgttggtgccgcccgcggtcagtctatggctacaggctatccaggagtggggcggcaatgcgccgctggcgtcattaaggttattgcaggttggcggcgcgcggctttctgcgacgcttgccgcccgtattccggctgaaattggctgtcagttgcagcaggtcttcggcatggcggaagggttagtgaactatacccggctggacgatagcccggaacggattatcaatacccagggaagacccatgtgtccggacgacgaagtgtgggtggcggatgccgacgggaatccactgccgccgggcgagattggtcgtctgatgacgcgcggcccctatacttttcgcggctatttcaacagtccgcaacacaatgccagcgcctttgacgccaacggtttttactgttccggcgatctgatctccattgatcaagacggctatatcaccgttcacgggcgtgaaaaagatcagatcaatcggggcggcgagaagatagccgccgaagagatagaaaacctgttactgcgccacccggcggtgatccatgcggcgctggtcagcatggaagatgaactgctgggggagaaaagttgcgcatatctggtggtaaaagagccgctgcgagcggtacaggtacgccgtttcctgcgagagcagggcgtggcggaatttaaattaccggatcgcgtggagtgcgttgcgtcactgccactgacgccggttggtaaagtcgataaaaaacaattacgccagcggttggcgtcacgttcaccgctctga

SEQ ID NO: 400863 - DNA, 858 bp, Salmonella enterica
atggccattccgaaactacagtcttacgcgctgcccaccgcactggatatcccgaccaacaaagtgaactgggcatttgagccggagcgcgcggcgctgctcatccacgatatgcaggattactttgtcagcttttggggccgcaactgcccaatgatggaccaggtgattgccaatatcgccgccctgcgccagtactgtaaggaacatcatatcccggtctattacaccgctcagccgaaagagcaaagcgatgaagatcgcgcgttactcaatgatatgtgggggccgggactgacgcgctctccggaacagcagaaggtggtagaagccttaacgccggatgaggcagatacggtgctggtgaagtggcgttatagcgcgtttcaccgctcgccgctggaacagatgttaaaagataccggacgtaatcagctcatcattaccggcgtgtatgcgcatattggctgtatgaccaccgctaccgatgcgtttatgcgcgacattaagccgtttatggtggcggatgcgctggcggatttcagccgggaagagcatctgatggcgctgaactatgtggcggggcgttcaggtcgcgtcgtcatgactgaatcgctgctgccgacgccggttcctgccagtaaagcggcgctgcgggcgttgattctgccgttgctggatgagactgacgagccgctggatgatgaaaacctgattgattatggcctggattcagtacgcatgatggggctggcggcgcgctggcgtaaagtacacggcgatatcgacttcgtgatgctggcgaaaaatccgaccattgacgcctggtgggcgctgctctctcgcggggtagagtaa

SEQ ID NO: 400864 - DNA, 756 bp, Salmonella enterica
atgccctgtattgatttttcagacaaaacggtatgggtgaccggtgcggggaaagggatcggttacgcgacggcactggcgtttgttgacgccggggcgcgggtgatcggcttcgatcgcgaatttacgcaagagaattatccctttgctaccgaagtcatggatgtggcggatgccgggcaggttgcgcaggtgtgccagcgtgtgttgcaaaaaacgccgcggctggatgtgctggtcaacgccgccggtattttgcgtatgggagcgaccgatgcgcttagcgttgacgactggcagcagacatttgcggtcaatgtgggcggggcatttaacctgttttcccagacgatggcgcagtttcgccgtcagcagggaggggcgattgtcaccgtagcctcagatgcggcgcatacgccgcgcatcggtatgagcgcctacggcgcctctaaagcggcgctgaaaagcctggcgctaaccgtagggctggagctggcgggctgtggggtgcgctgtaatgtggtgtcgcccggttcgaccgacaccgatatgcagcgcacgttatgggtaagtgaagatgccgaacagcagcgtattcgcggtttcggcgaacagtttaagctcggcataccgctcggtaaaatcgcccgtccgcaggagatagccaataccattttgtttcttgcctccgatctggccagccacattaccttgcaggatatcgtggtggacggcggttcaacattgggagcctga

SEQ ID NO: 400865 - DNA, 414 bp, Salmonella enterica
atgatctggaaacggcatttaacgctggatgaattgaacgctaccagtcagaacacgctggtggcgcatctgggcattgtttacacccatctgggcgatgacgtgctggaggcggaaatgcccgtcgatgcccgcactcatcaaccgtttggtctgctacacggcggcgcatcggcagcgctggcggagacgttgggatcaatggccggttatctgatgacccgcgacgggcagtgcgtggtcgggaccgagttaaacgccactcaccaccgcgccgtctcgcaggggaaagtacgcggcgtttgcctgccgctgcatctggggcggcagaatcaaagctgggaaattacgctctttgacgagcaggggaggcgctgctgcacttgtcgcctgggaacggcggtaatgggatag

SEQ ID NO: 400866 - DNA, 2106 bp, Salmonella enterica
atgaataaatcagggaaatacctcgtctggacagcgctctcagtattgggtgcgtttgccctgggctatattgcgttaaatcgtggggaacagatcaacgcgctatggatcgtggtggcgtcggtctgtgtctatctaattgcgtatcgtttttatgggctctatatcgcccaaaaagtgctggcggttgacccaacgcgtatgacgcccgcggtacgtcataatgatggtctggattatgtcccgaccgataagaaagtgctgttcggtcaccattttgctgccattgctggcgcaggtccgctggtcgggccggtactggcggcgcagatgggctatctgccggggatgatctggctgctggcgggcgttgtgctggcgggagcggtgcaggactttatggtgctgttcgtctcgacccgacgcgatgggcgttcgcttggcgagctggttaaagaggagatgggcgcgacggcaggggtgatcgcgctggtggcctgctttatgatcatggtgatcattctggccgtcctggcgatgatcgtggtgaaagcgctgacccatagcccgtggggaacgtacactgtcgcgttcactattccactggcgatttttatgggcatctacctgcgttatctgcgtccggggcgcatcggcgaggtgtcggtcattgggctggtatttcttattttcgctattatttccggcggatgggtggcggcaagcccaacctgggcgccgtactttgattttactggcgtgcagcttacctggatgctggtgggttatggttttgtcgcggcggtactgccggtctggctgctgctcgcgccgcgtgattacctctctaccttcctgaaaattggtacgattgtcggtctggcggtcgggattctgattatgcgtccgacgctgactatgccggcgctgaccaaatttgttgatggtaccggactggtctggacgggcgacctgttcccgttcctgtttattaccatcgcctgcggcgcggtatccggtttccatgcgctcatctcctccggcacgacgccgaagatgttggccaacgaaggccaggcctgctttatcggctacggcgggatgttaatggaatctttcgtcgccattatggcgctggtctccgcctgtattatcgatccgggcgtttactttgcgatgaatagcccgatggcggtactggcgccatcggggacagcggatgtcgtagcttctgccgcgcaggtggtcagtagttggggtttcgctatcacgccggatacgttacaccagattgccaatgaagtcggcgaacaatccattatctcccgcgcaggcggtgcaccaacgctggcggtagggatggcctacattttacatggcgcgttgggcggcatgatggatgtggcgttctggtatcacttcgccattctgtttgaagcgctgtttattctgacggcggtggatgcgggcacccgtgcggcgcgctttatgttgcaggatctgtcgggcgtagtgtcgccagggctgaaacgtaccgattcgctgccagcgaacctgcttgctacggcattgtgcgtgctggcgtggggctatttcctccatcagggcgtggtcgatccgttgggcggtattaacaccctgtggccgctgtttggcatcgctaaccagatgctggcgggtatggcgctgatgctttgcgccgtggtactgttcaaaatgaagcgtcagcgttatgcgtgggtcgcgctggtgccaacggcctggctgctgatttgtacgctgacggcgggctggcagaaagcgtttagtccggatgcgaaaatcggcttcctggccattgccaataagttccaggcgatgatcgacagcggcaatattccgccgcagtacaccgaatcgcagctcgcgcagttggtattcaataaccgtctggatgccgggctaaccatcttctttatggtggtggtcgtggtgctggcggtcttctctattaagacggcgctggccgctctgaagattgataaaccgacggcgaatgaaacgccgtatgagccgatgccggaaaatgtggatgagatcgtgacgcaggcgaaaggcgcgcactaa

SEQ ID NO: 400867 - DNA, 198 bp, Salmonella enterica
atgttcgatacgctttcgaaagccggaaaatatctgggacaggccgcaaaaatgatgattggcgtgccagactacgacaactatgtggaacatatgcgcataacgcatccggatcagacgccgatgacctatgaagaatttttccgcgagcggcaggatgcgcgctatggtggaaaaggcggcgcgcgttgctgctga

SEQ ID NO: 400868 - DNA, 1089 bp, Salmonella enterica
atgaaccacactgagatccgcgtcgttaccggcccggcgaattatttttcccatgctggaagcctcgaaagactgaccgactttttcacgccggaacagctttcccacgccgtttgggtgtacggcgaacgcgcgattgccgccgcccggccttacctgccggaagcgtttgaacgtgctggcgcaaagcatctgccgtttaccggccattgtagcgaacgccatgttgcccaactggcgcacgcctgcaacgacgatcgtcaggtggtgataggcgtcgtcggcggcgcgctgctcgataccgccaaagcgctcgcccgccgtctggcgctgccgtttgtcgctatcccgacaatcgcggcaacctgcgccgcctggacaccgctttccgtctggtataacgacgcgggacaggcgttacagttcgaaatttttgatgatgccaattttctggtgctggtcgaaccgcgcattattctgcaggcgcccgatgactatctgttagctggcattggcgatacgctggcgaaatggtatgaagccgttgtgcttgcgccgcagcctgaaacgttgccattgaccgtaagactgggcattaacagcgcgtgcgctattcgcgatctcctgctgaccagcagcgaacaagcattagcggataaacagcagcgtcggctgacccaggcattttgcgacgtggtggatgcgattattgctggcggcggtatggtcggcggcctcggggaacgctatacccgtgtcgccgccgcccatgcggtacacaacggtctgaccgtcctgccgcaaacggaaaaattcctgcacggaacgaaagtggcttatggcattctggtgcaaagcgcgctaccgggacaagatgacgtgctggcgcaattgattacagcgtaccggcgatttcatctgccggcccggcttagcgaactggacgtggatattcataacaccgtcgagatcgatagggtcatcgcgcataccctgcgcccggtcgaatccatccactatttaccggtgacgttaacgccagacaccctgcgtgcggcgtttgaaaaagttgaatttttcagaatatag

SEQ ID NO: 400869 - DNA, 1161 bp, Salmonella enterica
atgagaaataacccactgattccaaaaagcaaattgcccaatcttggtaccacgatttttacgcaaatgagcgcgctggcgcagaaacatcaggcaataaatttatcgcaaggcttccctgattttgatggtcctcgttatttgcacgagcggttggcttatcatgtcgcgcagggcgcgaatcaatatgcgccgatgacgggcgcgcaggcgctgagggaggccattgccgataaaacggcggaaatatatggttatcgacccgatgacgtaagtgatatcaccgtcacggcgggcgcgacagaagcgctgtatgcggcgattaccgcgctggtgcgggcaggggatgaggttatctgtttcgatcccagttacgacagctatgccccggccgtggcgctttccggcggcgtgttaaaacgcatagcgcttacaccgccgcattttcgcgtcgactggcaggcgttttcggcgttgcttagcgagcgcacgcggctggtgatcctcaatacgccgcataatcccaccgctaccgtctggcgtcaggcggatatcgaggcgctgtggcaggctatcggcgagcgggaaatttatgtattaagcgatgaagtgtacgagcatatttgttttgccgccgaaggtcatgccagcgtattggcgcaccctcagttacgagagcgggcggttgccgtttcatcgtttggtaaaacctttcatatgacgggatggaagattggttactgcgttgcgcctgcggctattagcgccgaaatacgcaaagttcaccagtacctgacgttttgcgtcaatacgccggcgcaactggcgctggcggatatgctgcgcgccgcgccggaacactatcgcgcgttacccgatttttaccggaaaaaacgcgatgtgctggttaacgcgctggcgcaaagccgattaaaagtactgccctgtgaaggtacctattttcttttaatcgattacagcgcagtgtcgacgctaaatgacgttgagttttgccagtggctaaccgaagaagtcggtgtcgccgctattccgctctctgtcttttgcgccgcccctttcccgcatcagcttatacgtttatgtttcgctaaacaggaatcaacgctgctggccgccgcagagcgcctgtgtaaactgtag

SEQ ID NO: 400870 - DNA, 618 bp, Salmonella enterica
atgcaacaccgactcacaaccgaaataactcactttctctctggactgcctgaagaggaaaggatcgccgccattaatgaatttagaatggcgatacataacgttagtccttttcgcgatgagcctgtcgattgtgtcctgtgggtgaaaaacgatcatatttcgcctaatgactacaacccgaataacgttgcgccgccggagaaaaaattgctgcttaaatcaattgaaaaagatgggtttactcagccgattgtggtggtaaaggccaatacggaggaatacgagattgtagacggctttcaccgtcatgagttgggcaaaggaaaagcggtcctgaaaaggcgcctgaaaggttatctgccggtagcgtgtctggacagagaacgtcacgaacggatggcggcaaccatccggcataaccgcgcgcgcggacgccaccagatccacgccatgtccgaaatcgtacgcgaactttctcagctaggctgggacgagagcaaaatcggacaggagttaggtatggacgccgatgaagtcctgcgcctgaaacagatcaacggactgcaggaactttttgcagaccgtcgattctccagagcgtggacggttaaataa

SEQ ID NO: 400871 - DNA, 1236 bp, Salmonella enterica
atgtcggtttataaagttccgcttgagcaaaatgttctggaagcggctcaagagcgtataacatggcccctggaaactttaccccgggtctgcgtctcattttctggtggtaaagattcaggacttatgctgcacctgacggcaacgttggcgcgcaaaatgaataaaaagatccacgttcttttcattgactgggaagcgcaattctcctgtactatcgcttatattgaatcgttacgtgaatactacgcggacgttattgagcgtttttattgggtcgcattacccttaaccacacaaaattccctttcacaataccagccggagtggcagtgttggcagccgggaaccgactgggtacgacaaccgccagaagatgcgattaccgatccggcctttttttccttttatcaacacggcatgacttttgaacagttcgttcgcgattttgccgactggtcttcagaaaagcgccctgccgctatgctggtcggtattcgttccgacgaatcctataaccggtttgtcgctatcgctaactcgcataagctgcgctttgccgacgataagccctggaccacgttggcccccaaggggcacacctggtatatctaccccatctatgactggaaaaccgcagatatctggacctggttcgccaaaacaggtaaatcatgtaaccccttgtataatttgatgtatcaggctggcgtaccggtccgttacatgcgtatttgcgaaccattcggcccggaacaacggcaggggttatggctgtatcatgttatcgaacctgagcgctgggcggccatgtgcgccagagtcagcggcgtactcagcggaggaatatacgccgggcaggacagccatttttacggccaccggaaaattttaaaacccgatcaccttaactgggaagagtacgcgctgctcctgctacacagtatgcctgaagtcactgccgaacattaccgtaataaaatcgccgtttatttgcagtggtataagaaaaaaggcatgaacaccattccacagacgcagcagggcgatatcggatcgcgggatattccgtcatggcgacggatctgcaaagtattactgaacaatgattactggtgccgggcgctgtcattcagtccgacaaaacctaagagttaccagcgttataacgaacgcatgaaagctaaacgccaggaatgggggatcttatgcaacaccgactcacaaccgaaataa

SEQ ID NO: 400872 - DNA, 903 bp, Salmonella enterica
atggctaacctttacgaccttaaaaaatttgatcttaacctgttggttatatttgaatgtatttatcaacatttaagcattagcaaagcagcggaaacactctatattacaccttctgccgtcagtcagtcattgcaacgcctgcgcacgcaattcaatgatcctctatttattcgctcaggcaaaggaattacgcctaccgtaacaggcattaatttacattatcatttagaaaataaccttaacagcctggaacaaactattaatataatgaatcagtccagtctgaagaaaaaatttattatctacagcccacagatgttgatcacccaatatgcgatgaaattagttaaatatatccgcaaagatccacaggttgaaattgaacatcacgacattttgaccactgacgaactgcctgaagatctgcttgcctaccgcaaagcagatgttgtggtttcaatggccccacttaataatcgttctattgtttgtactcactttaataggctagaatgtatcctggtttgcagtgaaaatcatccccgactaggcgacaccgccactatcgatgaaattctacaagagtcatttacgcaactcgtctcccgagcaaccggtatgaaagagtatcattcacttatagatgatgtgctgggggagagaataattggtttaagaagcaaatcggtgatgactatcgccaactccatcagctccacggagcttattggttttttaccacaaacatttgttgactattactcttcctctatcaaacttaaaaaagtcgccacaccttttaccactgctcctatacaattctatcttatgtacaatagagcttcgctgaataatagcggatttgctgagctcattgagcacatcacaaaaaagcgttaa

SEQ ID NO: 400873 - DNA, 747 bp, Salmonella enterica
atgattaaacgtacattgctgcttgctatgctgcccattctcgcccacgcggaagaactgcctgcgccggttaaagccatcgaaaaacagggtataactatcctgaaatccttcgaggcgccggggggcatgaagggctatctcggaaagtatcaggatatgggcgtcacgatttatctgacgccggacggtaaacacgcgatttccggctatatgtataatgaaaaaggtgaaaatcttagcaacgccctgatagaaaaagagatctatgcgccagccggacgtgaaatgtggcagaaaatggaaaaagcgtcatggatactcgacggtaaaaaagacgcgccggtggtgctgtatgtctttgccgatcctttctgcccctattgtaagcagttttggcaacaagctcgtccgtgggtcgaatccggcaaggtacaattacgcacattactggtcggcgtgattaaaccggaaagcccggccacagccgcagcgattttagccgcgaaagacccggcgaaaacctggcatgactatgaagcctccgcaggaaagatgaagctggaggttcctgcgtccatccccccggcgcagatgaaagtcattaatcagaatcagcagttaatggacgatcttggcgctaacgcgacgccagcaatttattacatgaataaagataagattttgcaacaggttgttggtttaccggaaaaagcgcaactggacgccatgatggggcagccttaa

SEQ ID NO: 400874 - DNA, 564 bp, Salmonella enterica
atgtccttaattaacaccaaaatcaaacctttcaaaaaccaggcgttcaaaaacggtgaattcattgaagtcaccgagaaagataccgaaggccgctggagcgtcttcttcttctacccagccgattttacctttgtttgcccgactgaactgggtgacgttgccgaccattacgaagaactgcagaagctgggcgtagacgtttattccgtctcaaccgatactcacttcacgcacaaagcatggcacagcagctctgaaactatcgcaaaaatcaaatatgcgatgatcggcgacccgactggcgccctgacccgtaacttcgacaacatgcgtgaagatgaaggtctggcagaccgtgcgacctttgttgttgacccgcagggtatcatccaggcgatcgaagttaccgctgaaggtatcggccgtgacgcgtctgacctgctgcgtaaaattaaagcagcacagtatgttgccgctcacccaggcgaagtatgcccggcgaaatggaaagaaggtgaagcgactctggctccatctttagacctggtcggtaaaatctaa

SEQ ID NO: 400875 - DNA, 1566 bp, Salmonella enterica
atgctcgacacaaatatgaaaacccagctcagggcttaccttgagaaactgaccaaacctgttgagctgattgccacgctggatgacagcgctaaatcggcggaaatcaaggaactgctggctgaaatcgccgagctgtccgacaaagtcacgtttaaagaagacaatactctgccggtgcgcaagccgtctttcctgattacgaatccaggttctcagcaagggccgcgctttgccggttctccgctgggccacgaatttacctcgctggttttggcgctgctgtggaccggcggtcatccgtcaaaagaagcgcagtcgctgctgaagcagattcgcgatattgacggtgattttgaattcgaaacttattattcactctcctgtcataactgcccggacgtagtgcaggcgctgaacctgatggcggtgctgaacccgcgtattaaacatacggcaattgatggcggcaccttccagaacgaaatcaccgaacgtaacgtgatgggcgttccggcggtgtttgtcaacggtaaagagttcggccagggacgtatgactctgaccgagattgtcgctaaagtggatactggcgcagaaaaacgcgcggcggaagcgctgaacaaacgcgatgcgtatgacgtgctgattgtcggctccggcccggcgggcgcggcggcggcggtctactcggcgcgcaaaggcatccgtaccggtctgatgggcgagcgcttcggcggtcaggtgctggataccgtggatatcgaaaactatatctcggtgccgaaaaccgaaggccagaaactggcgggcgcgctgaaagcgcatgtcagcgattacgacgttgacgttatcgacagccagagcgcaagtaaactggttccggccgcgacagaaggtggcctgcatcagattgaaacggcgtccggcgcagtattgaaagcgcgcagtatcatcatcgccaccggcgcgaaatggcgcaatatgaatgtgccgggcgaggatcagtatcgcaccaaaggcgtcacctattgcccgcactgcgacggtccgttatttaaagggaagcgtgtggcggtcatcggcggcggcaactccggcgttgaagcggctatcgatctggcaggtattgtagaacatgttacgttgctggagttcgcgccggagatgaaggcggatcaggtgctacaggacaaagtgcgtagtctgaaaaatgtcgatatcattttgaatgcgcaaacgacagaagtgaagggcgacggttcgaaagtggtgggactggagtatcgtgaccgtgtcagcggcgatattcatagcgtcgcgctggcagggatttttgtgcagattggtctgttgccgaatacccactggctggaaggcgcgcttgagcgtaaccgcatgggcgagatcattattgacgccaaatgtgaaaccagcgttaagggcgtcttcgccgcaggcgattgtaccaccgttccttacaaacagattatcatcgccaccggcgaaggggcgaaagcctcgttgagcgcctttgattatctgattcgcaccaaaatcgcataa

SEQ ID NO: 400876 - DNA, 561 bp, Salmonella enterica
atggattcaatctatgaatcactgacggaattagaaaaaacagggcttacattgcgtgatttttttaattctcatgatagtcattcactgaaatctgcctacgtgagattaaatccatctgctgcggtaaaccttaccgaccgggcgtggctggaagcggagtatgactttaatgcgctattcgtcggccctggcaagctgctggctgcgcctttcgcttcagtgtatctggaagaggatgcgctggtgatgggaaaggcgacgctggagatacgggattttatggcagcgttgggattatcggctaatcaggaaagcaatattcctgacgatcatatttcctgcgtgctggaattgaccacactattactggctaatacccggcaaacgtcacaataccgctctaccctcactcaatatatcaataactatttaacaaagtgggtgccattatatatcgaaaaaataaaaactcatgcacaaacgaccacgttatatacggtggcggacatcttattttattggtttgatgaattaaaacgagagtatcaatatgagtaa

SEQ ID NO: 400877 - DNA, 2280 bp, Salmonella enterica
atgagtaatgagacgggacatctgaacagacgttcttttttaaaggggatagtggcgctgggcgccgttgcggctttacccggaggattactgacctcccgatgcgcgcttgcgcagccgcctgttccctttaaccctaaaacgtacaaaatttatcgtaacgcgtgtccgcgtaactgctatgacacctgtagcctcaagacgtgggtaaaggacggggtcattactttcgtggaaggtgcgccggaatcaacatttactcacggtacgccttgcgtcaaagggttgagctatccgcgccgggtttatagtcccgatcgtattaaatatcccatggcgcaggacgttcgcggtagcggcaactggcgtcgcatctcatgggaagaggcgatgcagcgtattgccgccaaaatgctggagattaagaaaaaagacagttctatgctcggtctggcgctgaccaaatattccggtaagtttggcgtgctgaactatgccgttgaagggatgatgtcctcgcttggctataccacccgttttgccggtacgccgtgctggcctgccggtattgacgcgcaaaactacgacatgggcgacatgtggtgtaacgacccggaagatatggtgaaagcaaaatacatcattatctggggcgcgaacccagcctggtgctcaatgcactccatgaaatatatctatcaggcgcgcgagaaaggggcgaaggtcgtggttatcgacccgctgctgtcgcagactgccgccaaagccgatctctacctgcgcgtacggcctggctcagacggcgcgctggcgctggggatggcgcgccatctggtggataagggcctggtggatcaggattttgtcaacaacgacgctcatggctatccggaatttgaagcctatctgcgtaaccatgtaaccgtggagtgggcggcagaaatctgcgggttgtcggcacaggtgattcgtcaactggcggaagagtttacggcggttaacccggccacggcctggattggttacgggatgcagcgtcatgtcaacggcggcgccaacgttcgcgctatcgatgcctttgtcgctatgtccggcaacatcggtgtcgaaggcggcggcgcgcgttatggccatctgcatacctggggctttaactataacgccatgctgcagaagccgccggtgggcgctattggcataccgggagcggcgggcaccaccagtgaattcggggctgccgctggcagcgacgccgtgcagtactccgatcgctctctgaatattaaccagacggcgcaggggattctggaggccaacgatccgccggttcgtatgctgtgggtcgcctgtaaaaacccgtttgcccaggatttcgatcgcagcaagatgaaaaaagcgtttgaaaaactggaaatggtggtctgcgccgatcagttcttcaacgaaacggtgcaacacgctgatatcgtgctgcccgttaccaccgcgtttgaagagtggaacgtggatgcttcttactggcactactggctttccattaatcagccggcgattaagccgatgtatgaagcaaaatgcgaccttgaaatcgctaccatgctgtcgcgcaccattaataagatggcgccgggttcctgtaccttcccgcaagagttcgatcacaagcgctggctggatcaggagttcaacgacggtatggcgaaaatgttcggcatctcttcctgggacgatctgctggacgggccaaaaaaagcgatcctgccaagctctgccgcctggtacgatcgcaagttcaaaacgccgtcaggcaagtatgaatttaaatctgaactggcggagaaaaacggccacaccgcgctgccggaatacaaaccggaagccgagagcaaactgcctttccatctgtttacgccgcacgtgcagtttggcctgcactcgcagtttatcaacctggactggatgcaggtgttctatccggaaccgtttgtttatatccatccttcttccgcgaagaaaaaaggcattagcgaaaatgaccgggtcaaagttttcaacaacattggcgaggtggaactgcgggcaaaagtcaccactaacgtgccggaagattttctggtgatgtatgaagcgtggttcccgaaacggcagtacaacgtgcaaaacgtcgtggccgatacgcctgctgatatggggctgatgaaaactggcgcgccgggcgccgctatccacagtcagtttgctgacgttgtattgatcggtaaaggggaatccgtagcatga

SEQ ID NO: 400878 - DNA, 558 bp, Salmonella enterica
atgagacgtgcgtttttagtgaatagcgataagtgcatcggctgccgcggctgtgctatggcgtgtaaaagctttaaccaactggagccggatcgcttctggcgctacgtttatccgttggataaagacatctatccacatgaagagcgggcgttttactcgctggcctgtaaccactgcgaacatccggcctgcgtcgccgcctgtccggtcgaagcctataccaaacgtgaagatggcgtggtggtgcataaccctgagcgctgcatcggctgtaaaaactgtattcgtaactgtccttatggcgcgccgcgttttaatgaagagacgcgtaaagcggaaaaatgcagtatgtgctacgagcgtcttgatatcggtatgaatccggcgtgcgtgaacgcctgtccggtgggcgccttgtcgattatcgatttggatgccgatcctgtgcccgataatgcggtgcagtatccgccagggttcccgcatatgccacagctcaatccaggaacgcgctttattctggcgcgccagcctaagcagccggaggacaagtaa

SEQ ID NO: 400879 - DNA, 768 bp, Salmonella enterica
atggaaaaatatgaactgccgctggtgttttttacggtattaagccagatgtctgtcgggatggctttggtactgacatggcgtacgctgcgtggtgaagtggaaggccagcgtttctattggttggccaccgggctggtgctggcattggcgtctattgccgcgattctgcatctggcgcatcccgatcgcgcttataatgcgctgattaacctgcgacatgcctggttaagtcgggaaatccttggcgccacgttgtttggcgcagcggtcggcgtaacgttcctggcaaagggacataaagcgatggctcttatcgcctccgtgttcggcgtgttactggtggcggtgcaggggatgacctacgccgcgccagcgatggtagctatcgctaatggatttaccatgctgttattttttattacggtatgggtcatgggttgcgcggcgattccgctgttaagactcaggcctgccgttcctgcgttacgccagggaattgtggtgtgtatcgcggtacttatcgcggcgccgctggtgtggttaagcgggggaacggtcatgcagatgacggcgcgttcatggctggcttccccgttttatctggcaagcctggtttgccttgcgctcgcttttgtcgccagccgtcacggtgattcgcgcccgaaactcctgttcgtcttgttattcgttggcgtatttctgagtcggctggtcttttttggcgacacggtgagtactattgtgaatatcgggcatttgtactaa

SEQ ID NO: 400880 - DNA, 429 bp, Salmonella enterica
atgtataagacaatcattatgccggttgatgtttttgaaatggaacttagcgataaagccattcgccacgctgagtttctggcgcaacaggatggcgtcattcatctgttgcatgtactgcctgggtccgcgagcatgagtctgcaccgctttgccgccgacgtgcgtcgctttgaagaacatttacagcatgaggcggaaacgcgtctgcaaacgatggtgggacacttcagtatcgatccttcacgaattaaaacgcatgttcgctttggtagcgtgcgcgatgtcgtcaatgagatgggcgaagaactggatgcggatgtcgtggtaatcggttcgcgtaatccgtctatcacgacacacctgttggggtctaacgcctcaagcgtggtgcgccatgcgacgctgccagtattggttgtgcgttaa

SEQ ID NO: 400881 - DNA, 333 bp, Salmonella enterica; identical to SEQ ID NO: 380401

SEQ ID NO: 400882 - DNA, 411 bp, Salmonella enterica
atgtccagacccactattatcattaacgaccttgacgccgaacgtattgatcgtcttctggaacagcctgcgtatgcggatctgccgattgccgacgcgctcaacgccgaactggatcgcgctcaaatgtgttccccacaagagatgccgaacgatgtcgtcaccatgaacagccgcgttaaattccgcaatttgagcgatggtgaaacacgcgtgcggacgctggtgtaccccgccaatatgacggacagcagtacccagctttcggtaatggcgcccgtcggcgcggcgttgctgggactgcgcgtcggcgacaccattcactgggaactgccgggcggcgcctccacccatctcgaagtgctggaactcgaatatcagcctgaagccgcgggcgacttcctgcgttaa

SEQ ID NO: 400883 - DNA, 807 bp, Salmonella enterica
atgaacacaatatggcattacagtccgctgctggctgtcctcttaaccccgatttttgccgccaacgccgacgaacttcaggcgcaacagtacggtgatttcactgactatgtgctggcgctttcctggcaaaccggtttttgtcaaagccagcatgaacgccgccatcgggaacccgatgagtgccgtctgcaaaaagagccagccaacaaagcagactttctgaccgtccacggcctgtggccaggattacccaaatctatcgccgcacgcggtgttgaccagagacgctggcagcgctttggttgtgcgacgcggccaatcccgaatctgcctgaagtcaaggccagccggaaatgctccgcccccgcccccggactttcgcctgacatcgcgacagcgcttaaggaagtgatgcccggcgcgggggggaattcctgtctggagcgctacgaatatgccaaacatggcgcctgtttcgggtttgatcccaatgcctatttcggcaccatgatacggctggataaggcgataaaagacagcgcgctggggcagtttctggcggataattacggcaagaccgttagccgcgctgagtttgatagcgtcgtcgcacaaacgtggggccaggataatgtcaaagccgttaaagtaaactgccatggcaatcccgcctatttaacagagattcagttttcattaaaggcgtcgatgattaacgccccgctctcctctgcctcattccagccgcagccgcatcccggcaactgcgggaaacagtttattatcgataaagccggttattga

SEQ ID NO: 400884 - DNA, 1506 bp, Salmonella enterica
atgtctttatccaaagataatatatggaagttgttggccccattagtggtgatgggcgtcatgttgctaattcctgttccagatggtatgccgccgcaggcctggcactattttgcggttttcgtcgcgatgattgtcggtatgatcctggagccgatcccggcgacagcgatcagttttatcgccgtaaccatttgcgttatcggcagcaattacctgctatttgacgcttcagaactggccgatccggcgtttaaagccagtaaacaggcgctgaaatgggggcttgccggtttctccagcaccacggtctggctggttttcggcgcgtttattttcgcgctgggctacgaagtgaccgggctggggcgccgcattgcgctgtttctggtaaaattcatgggtaaacgcacgctgacgctcggctatgcgattgtcattatcgatattttgctggcgccgtttactccctccaatacggctcgtaccggcgggactgtcttcccggtcatcaagaacctgccgccgctgtttaaatcgtttccaaacgatccttccgcacgccgcatcggcggttatttgatgtggatgatggtgatcagtaccagcctgagctcttcgatgtttgtcactggcgcggcgccaaacgtgttaggtctggagttcgtcagcaagatcgccggcgtccagattagctggctgcagtggtttctcagctttctgccggtagggattattttactgatcgttgcgccgtggctctcctatgtactttataaacctgaagtgacccacagtgcggaagtcgcggcctgggctggcggcgagttaaaaaacatggggcgtctgtcccgcaaagagtggacgctgattggcctggtgctgcttagcttaggattgtgggtttttggtggaaaaatcatcaacgccactgccgtgggtctgctggccgtctcgctgatgctggcgctgcatgttgtgccgtggaaagacattacgcgctacaacagcgcctggaacaccctggtgaacctcgctacgctggtggtcatggccaatggcttaacccgctccggctttattgactggttcgccaataccatgagtacgcatctggaaggtttctcgccggatgcaaccgtcattgtactggtactggtactggtactggtactggtactggtactggtactggtactggtattctatttcgcgcactatttgttcgccagtctttccgctcacaccgcgaccatgctgccggtcattctggcggtgggtaaaggcattccgggcgttccgatggaacaactgtgtattctgctggtgctgtctatcggtatcatgggctgtctgacgccgtatgccaccggccctggtgtgattatctacggctgcggttacgtgaaatccagagactactggcggcttggcgcaatctttggcgttatctatatcgcgatgctgttgctggtgggctggccgattctggcaatgtggaattaa

SEQ ID NO: 400885 - DNA, 897 bp, Salmonella enterica
atgatgccgattcccgccaacccgactaacgcctccattcagccgcggtcgctgtacgacgcctgggccgatttggcctggcgcgccatgctgaccgaggtaaatttatcgccaaaacccggtctggtagaccgactaaactgcggcgcgcacaaagatatggcgctggcggattttcaccgcagcgcggaggcgattcgacactggctgccgcgctttatggaatatggcgccagctgcacgcgcctgccgccagagtcggttctggcgggcctgcgtccattggggatggcctgtgaagcagcgatgtttcgcgcaacggcgggcgtcaatacccataaaggcagcattttctcgctggggttactgtgcgccgccattggccgcctgtatcagctacgccagccgatcgccgcagaaaccctctgcgctaccgccgccgatttttgccgcggcctgactacgcgcgaactgcgccagaacaacctactgctcaccgcaggtcagcggctgtatcagcaacagggattaaccggcgcgcgcggtgaagcggaagcgggctatccgctggtcatccgccacgcgttgccgcactaccgcgcattactggcgcaggggcgcgatccggatctggcgctgcttgataccttactgctgctgatgtcgcttaacggcgataccaacgtcgcgtcgcgcggcggcgcggacggtctgcgctggctacagcagcacgcggcgttcttattacatcagggcggcatacggacgcctgacgatctcgtttatctccaccggttcgatcagcaatgcattgaacgcaatctcagcccaggcggtagcgccgacctgctgatcgtgacctggtttttagcgcaaatttcgcaagttaatcattaa

SEQ ID NO: 400886 - DNA, 552 bp, Salmonella enterica
atgcgcctgtttcctgaactcgccacctgtcacgacgtttctattcctgagctgctcgccagccgggatgagagacaagcaagacagcgcgcctggctaacgcgtcacgctactccgctggtctcctttaccgtggtggcgccaggcccgatgaaagacagcgcgttaacccgccggatctttaatcacggcgtgactgccctgcacacgctggcagaagagtatggctggactatccgggagcaggctgcactggtttccgccagcgggccggaagggctgctggcgattgacgcgcccgctcaggcgctcaaacaggcgaccatcacgcttgaacagcgttatccactggggcgcctgtgggatatcgacgtcctgacggcgaaaggcgaaatactctcccgccgccatttcgcgcttcccgcccgccgctgtctgctgtgcgggcaaagcgcggctgaatgcgcgcggggtaaaacccacgcgctgactgatttactgattcatatggaggcgctgctgcatgatgccgattcccgccaacccgactaa

SEQ ID NO: 400887 - DNA, 1530 bp, Salmonella enterica
atgacgcagaaaaatgaatctcaacgccaggatcgcgtagccgcctggagccgtcacgctgaaagcgaactgagcgcttaccacagtgcggcaaaattggatctacaagcgcaaaaaccgcgcgaccacaaactgtgcgccagcctggaagaggccatccgccgttccggtttacgcgacggcatgacggtctcctttcaccacgcgtttcgcggcggcgatctgacgattaacctggtgatggaaaccatcgcgaagatgggcttcaaaaacctgaccctggcctccagctcgctgagcgactgccatgcgccgttggttgaacacattcgtaacggggtggtcagccgcatctacacgtcaggcctgcgcagcccgctggcggaagaaatttctcgcggcctgctggctgagccggttcagattcactcccacggcggtcgtgtgcatctggtacaaagcggcgaactcaacattgatgttgcgtttcttggcgtcccctcctgcgatgaattcggtaatgctaacggttataccggcaaggcctgttgcggttcactgggctacgcgatggtggatgccgacagcgcgaagcaggtcgtgatgctgacggagcaactgctgccgtatccgcataacccggcaagcatcgcccaggatcaggttgatctgatcgtgcaaatcgaagaagtcggtgatgcaaacaaaatcggcgctggcgcgacccgcatgaccactaatccgcgtgaactgctgatcgcccgcagcgcggcggaagtcattgctcactccggctacttcaacgaaggtttctccctgcaaaccggcaccggcggcgcatcgctggcggtcacccgtttcctggaagacaaaatgcgtagccgcaacattgtggctaatttcgcgctgggcggtatcaccgccaccatggtcgacctgcatgaaaagggcttaatccgcaaactgcttgacgttcagagcttcgatcgtaacgctgcgcaatctttggcccgcaacccgaaccatatcgaaatcagcgctaaccagtacgccaactggggctctaaaggcgcttccgtcgaccgtctggacgtggtggtactgagcgcgctggaagtagacacccacttcaatgttaacgtgctgaccggctccgacggcgttctacgcggcgcgtccggcggtcactgcgataccgccgtcgcggcggcgctgtccatcatcgtcgcgccgctggtgcgcggtcgcatcccaacgctggttgataacgtcaccacctgcgtcacaccgggctccagcgtcgacattctggtcaccgatcacggtatcgccgtcaacccggcgcgtccggagctggctgaacgactgcaagcagcgggaatgaaagtggtatcgattgagtggctgcgcgaacgcgcgcaactgcttaccggtcagccccgccctatcgaattcaccgaccgcgtgattgctgtcgtgcgttatcgcgacggttcagtgatcgatgtggtgcatcaggtgaaggaataa

SEQ ID NO: 400888 - DNA, 909 bp, Salmonella enterica
atgatttccgcctctctgcaacaacgtaaaacccgcacccgccgcagtatgttattcgtaccgggcgccaacgcggcgatggtgagcaattcgtttatctatccggccgacgcgctgatgttcgacctggaagactccgttgcattacgcgaaaaagacgcggcgcgccgtctggtatatcacgcgctgcaacacccgctttaccgtgacgtcgaaaccattgtccgcgtgaatgcgctggactccgaatggggagtcaacgatctggaagcggtcgtgcgcggcggcgcggacgtggtgcgtttaccgaaaaccgacaccgcgcaggacgtcattgatatcgaaaacgaaattctgcgcattgaaaacgcctgcggtcacgaaccgggcagtatcggcctgttagccgccgtggaatcgccgctgggtattacccgcgcggtagaaatcgcccacgcctctgaacggttgatcgggattgcgctgggcgcggaagactatgttcgcaacctgcgcaccgaacgctctccggaaggcaccgaactgctgttcgcccgctgcgccattttgcaggccgcgcgttccgccggcattcaggccttcgataccgtctattccgacgccaacaacgaagccggtttcctgcaagaagccgcccacattaaacagttgggctttgacggtaagtcactgatcaaccctcgccagatagaactgctgcacaacctttatgcgccgacgcgtaaagaggtcgcccatgcgcgtctggtcgttgaagccgcagaagccgccgcccgcgaaggtctcggcgtcgtttcccttaacggcaagatggtcgacagcccggtgattgaacgcgcccgtctggtgctctcccgtgcagaactttccggtattcgcgaagaataa

SEQ ID NO: 400889 - DNA, 297 bp, Salmonella enterica
atgaaaataaaccagctagccgtcgcaagcacgcttgagtccggcgatgtgatgatacgcattgcgccgctcgatacgcaggatattgacctgcaaatcaacagtagcattgaaaaacagtttggcgaggccattcgcgccaccatcctggaggtgctttctcgctacgacgtgcgcggcgtacaactgaacgtcgatgataaaggcgctctggactgcattttgcgcgcccgactggaaacgctactggcgcgcgccagcggtattgccgctctgccctgggaggatcgccaatga

SEQ ID NO: 400890 - DNA, 1077 bp, Salmonella enterica
atgtttggcaataatgtattcactcgggtaaaacgctctgaaaataaaaaaatggcggagatcgctcactttctcaaagagaatgatttaagcgtcgataccactgtagaagtgtttattaccgtcagccgtgatgaccgtcttattgcctgcggcggtattgccggaaatatcattaaatgcgtggccattagcgaatcagtacgcggtgaaggcttagcgttaacgctggcgacggaattgattaatctcgcctgggaacggcactgcacccatctttttatttataccaaaacggaatacgaagctctgtttaaaaagtgcagcttttcgacgatagccagcgtccctggcgtgatggtcttaatggaaaatagcgcgacccggttgaaacggtatgcggaatcgctggcgacattacgtcacgagggaaagaaaattggctgtattgtgatgaacgccaatcctttcacgaacggccatcgctatctgatccaacaggcggctgcacagtgcgactggctgcatctgttcctggtcaaagaagatacatcacgctttccctatgaagaccgactcgatctggtccttaaagggaccaccgatatcccgcgcttaaccgttcaccgcggctccgaatacattatttctcgggcgacgttcccctgctatttcattaaagagcagagcgtcattaatcactgttataccgaaatcgacctgaagattttccgccagtatctggcgcccgcgcttggcatcacacaccgctttgttggtacggaaccgttttgcaccgttaccgcccagtacaaccttgatatgcgtttctggctggagacgccaacgcttcccgccccacccattacgctggtggaaatagagcggctttgcttccaggagacgccgatatccgcctcctgggtacgcaagctgctggttaaacacgatctcacggctatcgcgccgctggttcccgacgccaccctgcgctatttacagggcatggtcgaacgccatccgggcagcgcggcagcccgtcaaaagtcccccgtcttagcaacaggtgaaaaatga

SEQ ID NO: 400891 - DNA, 1428 bp, Salmonella enterica
atgtcctaccagaaaaataaaaagctgtttcctttttttcggcaactcgcgtttccgttacgtatttttctgctcattctggtggtttctgttttcattgtggcagcgttagcacaatatttgtctgccagtttcgaagattatctggcatcccatgttcgtgacatggcgatgaatcaggcaaaaattattgcttctaacgacagcattatcgctgccgtaaaaaaccgggactataaacgcctggcgataattgcgaataaactacagcgcgggacggattttgactatgtggtgataggcgatcgccactcgatccggctttaccatccgaatccggaaaaaatcggctatcccatgcagtttacgaaacccggcgcgctggaaagaggagaaagttatttcattaccggtaagggctcaatagggatggcgatgcgcgccaaaacgcctatctttgacaacgaaggcaacgtgatcggcgttgtttcaattggctatctggtcagtaaaatcgactcctggcggctggacttcttattaccgatggcgggggtttttgtcctgttgctggtggtattaatgctgctttcctggtttttcgccgcgcatatccgccgacaaatgctgggcatggagccgaaacagattgcgcgcgtggtacgccagcaggaggcgttgtttagctcggtttataaagggctgatcgccgttgatccggagggacatatcaccgcgattaaccgcagtgcgagaaaaatgttggggctgccgtcgccggggcgtcagtggctgggcaagctgatagcggaagtcgtcaatccggcagacttttttacctgccagatcgcggaaagacgccaggacgtgatggccaacttcaatggcctgagcgtcatcgccaatcgtgaggctatccgttccggcgaggagctgctgggcgctattattagttttcgcagcaaggatgaaatcgcgacgttgaacgcgcagctaacccagattaaacagtatgttgagagcctgcgcacgctacgccatgagcacctgaactggatgtcgactctgaacggcctgctgcaaatgaaagagtatgatcgggtcagagagatggtgcagggtgagtcgcaggcgcagcagcaacttattgatagtttacgcggcgccttcgccgatcgtcaggtggccggtttgctgtttggcaaagttcagcgcgcgcgtgaactggggctcaagatggtgattgttcccggcagccagctacatcaactgccggaggggctggatagcacggagttcgccgccatcgtcgggaatctgctggataacgcgtttgaggcgagtttgcgtacacaggaaggcgacaataccatcgaacttttcctgagcgacgagggcgacgaggtggtaatagaggtcgccgactag

SEQ ID NO: 400892 - DNA, 681 bp, Salmonella enterica
atgacagaaccattaaccctattgatcgttgaggatgaaacgctgctggcggagatgcacgcagaatatatccgccatattcctggctttaagcagatatggctggcgggcaatctggcgcaggcgagaatgatgattgaccggttcaaacctggattaattctgttggataattatctgccggatgggaaggggattacgctgctgcatgaattaatgcagtcgcgctatcccggcggcgtagtgtttacgaccgccgccagtgacatggagacggtagcggaagcggtacgtagcggcgcgtttgattatctggtcaaacctattgcttatgagcgtttggggcagacgctgacccgttatcaacagcgcaggcgtatgctggcgagcgcggatagcgcaagccagaagcagatagatgaaatgttcaacgcctatgcgcgcggtgaaccaaaaggggatttgccgacaggtattgatgccttaacccttaatgcggtgatgaagctgtttgccgatccaaccgtacgccatacggctgaaacggtcgcgcaggccttaacgataagccgcaccacatcccgacgctacctggaatattgcgcgagtcggcacctgattgtcgcagagattattcatggcaaagtgggcaggccgcagcgtatttatcacggcggctaa

SEQ ID NO: 400893 - DNA, 1386 bp, Salmonella enterica
atgctaacagttatagagctccttatcggagtcgtcgttattgtgggtgtagcacgctacatcattaagggatattccgccactggcgttttatttgtcggcggtctggttctgcttattatcagcgcgctgatggggcataaggtattacctgccagcgaaaccagtaccggctataccgcaacagatattgttgaatacatcaaaattttgcttatgagtcgcggcggcgatcttggcatgatgatcatgatgctgtgcggctttgccgcctatatgacgcatatcggcgcaaatgatatggtcgtgaagctggcgtcgaaacctttacagtatataaactcgccctacctgttgatgattgccgcctattttgtcgcctgcctgatgtcgctggccgtctcttccgcgacggggcttggcgtactgctcatggctactctcttcccggtgatggtcaacgtcggcattagccgcggcgcggcggcggctatttgcgcctctccggccgccatcatcctctcgccaacgtctggcgatgtggttttagccgcaaaagcggcggagatgccgttaatcgatttcgcgttcaaaaccacgctgccaatttccatcgccgccattatcggtatggcgattgcgcactttttctggcaacgctatctggataaaaaagagaacatttcacatgagatgctggacgtggcggagattaccaccacggccccggcgttttatgccattttgccgttcacgcccattatcggcgtactgatttttgacggtaaatgggggccgcagttgcacattattaccattctggtgatctgtatgctgctggccgccgtgctggaattcgtgcgcggtttcaacacgcaaaatgtgttttccggcctggaagtggcttatcgcggcatggcggatgcgtttgccggtgtcgtgatgctgctggtcgcggcgggcgttttcgcccaggggctgagcaccattggctttatccaaagtctgatctcgattgccacttcttttggctccgccagcattattctgatgctggtcttagtgattttaaccatgctggccgcgatgaccaccggttcaggcaatgcgcctttttacgcctttgttgagatgatccctaaactggcgcactcctccggtatcaacccagcctatttatccatcccaatgctgcaagcctcaaacctgggacgcacgatttcgccggtctccggcgtcgtggtcgctgtcgccgggatggctaaaatatcaccgtttgaagtggtgaagcgcacgtccgttccggtcatcgtcggtctgttgatcgtcattatcgccacggaaattatggtgccaggcgcctcttccgccgttactggcggctga

SEQ ID NO: 400894 - DNA, 573 bp, Salmonella enterica
atgtatgttgcgatgatcatcagaaagtattttcttattattgctctccttgttatgccatggctggctattccttcagtctctgcggcggataaagggtggtttaacacgtttaccgataacgtcgcagaaacgtggcgacagcctgagcattatgatttgtatgtccccgccattacctggcatgcgcgctttgcctacgataaagagaaaacggatcgctataacgaacggccgtggggcgttggttttggtcagtcgcgctgggacgataaaggcaactggcatggcctctatatgatggcctttaaagattcatttaacaaatgggaacccataggcggttatggctgggaaaaaacctggcgaccgctggaagacgataattttcgtctgggactgggctttaccgcaggcgttaccgcgcgcgacaactggaattatattcccatccctgtgctgttgcctttagcgtcgataggctatggtcccgctacctttcagatgacctacattccgggttcgtataacaacggaaacgtctattttgcctggatgcgtttccagttttga

SEQ ID NO: 400895 - DNA, 210 bp, Salmonella enterica
atgtctaagattaaaggtaacgttaagtggtttaatgaatccaaaggattcggtttcattactccggaagatggcagcaaagacgtgtttgtacacttctctgcaatccagaccaatggttttaaaactctggctgaaggtcagcgcgtagagttcgaaatcactaacggtgccaaaggcccttccgctgcaaacgtaactgctctgtaa

SEQ ID NO: 400896 - DNA, 384 bp, Salmonella enterica
gtgttacagcttcttttagcagtttttattggcggtggaacggggagcgtagcccggtggatgctcagtatgcgttttaatccgcttcatcaggcgattcccatcggtacgctaacagcaaatttacttggcgcgtttattatcggcatggggttcgcctggtttaaccgcatgacacatatcgatccgatgtggaaagtgctcattacgaccggcttttgcggcggcctgacgaccttttctactttttctgccgaagtggtattcttgctgcaagaggggcgctttggctgggcgctgctgaatgtgctgattaacctgttgggttcgtttgccatgacggcgctggcattctggctattttccgccgccgcagcgcgttaa

SEQ ID NO: 400897 - DNA, 789 bp, Salmonella enterica
atgttcgttgcagccgggcagtttgtggtgagttctgtatgggaagagaatgcgcaagtttgcgtttcgttaatggcgcaggcggcggaccgcggcgtatcgcttctggtgctgcctgaggggatattagcgcgagatgacatcggccttgacctgccgattcgcgccgcgcagccgctggatggcgcgtttatgacgcggcttcaggaagaaagcgctcataataatatgacgacgatattcactatccttgtcccgtcaacgcctggacgggcggttaatatgctggtggcgctacgggcaggtcacattgtcgcgcgttacgcgaagctgcatctctatgatgcgttttcgatgcaagaatcccaaagtattgatgccggaaccgttatcgcgcctgtgctggacgtggagggggttaaggtggggcttatgacctgttatgacctgcgctttccggacatggcgctagtgctggttttacagggggctgacgtattggcgctgccgacgggctgggttcgcggcccgttgaaagagcagcagtggtcgacgctgctggcggcgagagcgctggataccacctgctatatgattgcggccggggagtgtggtaatcgtaatattggtcaaagtcgtattatcgatccgttgggggtaacgatagccgcggcagccgatcgtccggcgctgatcgtcgcggaaatattcagagaacgaatagaccaggtgcgggagcaacttcctcttttgcagcaacgacgatttgcgccaccgcaattattatga

SEQ ID NO: 400898 - DNA, 204 bp, Salmonella enterica
atgggtgagattagtattaccaaactgctggtggttgccgcactggttgttctgctgtttggtaccaagaagttacgtacgctgggcggagacctgggcacggcgattaaaggattcaagaaagcaatgaacgatgaagacgcgggcgttaagaaagacgtcgacggtagcgttcaggctgaaaaactctcgcataaagagtaa
